United States Patent Application Publication US 2026/0092266 A1 - sequence listing, part 4

SEQ ID NO: 629 - DNA, 20939 bp, synthetic construct
  misc_feature 1..20939: note = Synthetic
  source 1..20939: mol_type = other DNA
gtcgttagaatgagaatgtattttgcgattattttgagatttattttgcatatatcaaaggagcatagcgggctatgtgactgcagatataggtaaaataaagccaaaataatccaaaagacagctcataagtttcaaaaataataaagtaagcacttaaactggtctaatgaccaatttgggtttaaaaagcctttgcgggctaatgaccggtttgggataatgctttctaaaaggaaaaacagacaacagataagttaatcttagaagcctaaaccctcaagaatgccttgcaaacctgaccctacttctaatactttgtctaatattccgtcttttgctcccttagccatatactttgcacattctccctccaaacggcgaatacgttggcgttcggcttcgttatagttatgacgagagatgtctttgcgcaagcttataaattggttagcagctatttcccaatctttcacaccataattgcgactcttatcacgcagttcgtaagagaatttctctaagttattgatagctgcttccttagtggtacaagcggttaacgctaaaaacatagcacacgcaaatagactaaaaatagtattcttcatctttttcatatctgtttgttatttgcttagttacgatttcccttgttggtcaaggtgggagacttcctccctatcgtgcgcaaaaataggaatttatacgcaataaaaccaaatttttgctcccaaactatccttttttagtacttttaacctacctttgcggtatgaattttacacacgaattgctcaaatggtatgcacagaatggcagagatttgccgtggagagccaccaaagacccttacgcaatatggcttagcgaggtgatattgcaacagacacgcatagcgcaaggacacagctactgggagcgctttatgcaacaatggccacaagtaaacgatttggctgcggctaccgaagacgaagtattgcgagcgtggcaaggattgggctattattcgcgtgcaagaaatctgcacacagctgccaaacagatagccgaacttggacatttccctactacatataacgaaattataaagctaaaaggcgttggcgaatacactgcagctgccatagcctcaatagcttacaacgaagctgtggcagtggtagacggcaatgtatatagggtgttggcacgatactttggcatcgatacaccgatagataccaccgagggcaagaaaacctttcgggcaatggcacaagcacacctttctacaaccgaaccagcagcttacaatcaagccattatggattttggggctattcagtgtacacccaagtcgcccgattgttctgcttgcccactcgtagaaacgtgtttcgcttaccaaaatcataaaatagacttgctccctacaaagagtaaaaagataaaacaacgtgaacgcaagttccaatacgtctatataagatgcaataaccatatcgctattcgccgccgaggtgcaggggacatttggcaaggcttatgggaatttcccaccacagatgccttgtcggttcctctcgcttcgctccatctcctccaatctaacgcaaagcacgttctcactcatcaaattatctatgctgatttctacctctacgaaaccgccacacgccccaccctctcctccgattttatatggattgaggaaagcgagatagataagtatgctttgccaagactaatggagataatgctaaagcacttggaaaaatatcattaataaaggcatagcacaacaaaaacatagaaacaataaagccttacaattcctttatgagtttaggaatgtaaggctttattatttaacccaaatcgctcattagcccgcaaaggctttttaaagcgtttagatgttatgcttttcttcgtctttgcaacttattttagctcttttcgtttgttttttcagttgtttagctcgctaaacgtcttcaaaaacaaccaaaaatagctcaaaataagctcgcaaatctcgaagaagtctaatgacctatttgggtttaatatttctacccttatatatcattggctgaaactcgtattgctaaccctatggctttgcccaatagtggtggcacagcattgcctgtctgaacaagttgtttgtttttgggaccttcaaagataaaactatcaggaaacgactgtaagcgtgccatttcgcgtgcggtaagcactcttggcagctttgggtgaatgtttacaccgccatgattctcttttattgtacaagaggcttcgtcccaaggacattttttccacgcatccgaataacctttataaagactctttccttcagggcaagccagtattcgctcttgcatttcagggcggtgctttgtaggaacatggttgaaagcaaggtcttcagggtgattgattaagtcgcctattgcttgtcctgtggtaatatacttatccgatgacaatataggcttagggtgaaagttcgacctgcctattctattgcctataaatatcacacgttcacgcttttgtggtgtataataatcggctgcacaaagcgttgtaacattcatatcgtaaccaatagttcgataatcttctaatatcttttgttccacacgaccattgagcatagaccgcaatccctttacgttttcacaaataacaaattcgggttgtaagactttgacaatctccaacatctctaaatacaaagaattacgtgggtcgtcaactattctattacctgccatcgaaaaaccttgacaggggaaacccccagcgataacgttaagcggacgaccattaagttgctgtttaacggtgttataaaactcttccttaacttcaggtaatgttatatcgccatttacaaaagggtggttaaagtttcgtcgataggtttcacctgcttccttgaaccagtctaagccacaaataccttgcagccctgacatttcaagtcctttagataatccgccagcaccgcagaacaggtctacaaaagtaaggtcagaaggagttggactatcccaatattggctaatatctatccacgaagtttcgttctttatcgtttttgaacgagataaaggttcagcgataggattaccaaaaaaattgtattgtacttgcttttcagtatttgaaggcttattaataaagttttcaagagcagaaataggaattctgtatgatgttcctatctttatagcattcagttcatttgctgcaatatatcttctaatcgacttttgagacagctttaattgccctgctacttctgctattgtataaaatggttcgctcatgttttacattcaatttgtacactattgtctaatgtgtatgaaaaattacgaaataaatcttatctggcaaagattatcctttcttgaacacaaatatatattcgtgcttgaaaaggaatgtgtcgcttttaagtgtacgataacgccacaaagcctccattcctattttacctctgttgctcaccatatcttttacaacaatgcctttaagcttgcattttatttgctttctaatcgaatacattaaataaaaacctaaaggaacgacctcttgatttcgatataaatcaccaaccacgattgcaaaatgtttacctgcacgaagaaattctaccatattcttcattgctaatgtgaattggttgatgaatttgtctaattctataatattggataagtcttccttacaatccgtagggcaacttgttccatatacccaaaacgaacctttataaaaaagaatatagcgcaacattatgctgttacgctatattatggaattaatatctgaaacatcaaaaacttattctccgctatctttcttaccaaatgtcgggtctaccttcaggattgaggcaacgaggaaggggaaaaggcacgataccataacaataacaaagaagtaatggtagcccacagcatcggctaacgtacctgcaaataagccaggaagcatcattgagagtgccataaagcctgtacaaagtgcataatggctggtcttgtgttcgccttgactgaaataaagcataaagagcatataggcactaaagccaaatccgtagccaaaattctcaacaaagatagctgcactgatggcaaaaacactttgcggaagtacaaaaccaagatatacgtaggcgatgttgggaagcgttatggcaatggtcataggccacaaccatcgctttagtccgtcacgacttgccaccagtccgccaagtattcctccaacaagcagtcctaccacacccacaatgccatttacaacaccaaaggtttccaacgagagttgcaatccgccttttgccgtttcaccacgaaggaagagtggcgcaacgggatttaagagtgcttcgggcaaacgaaaaagtagcataaaggcaatagcggtcagtatttgtttcttgcggaagaacgaagcaaaggtttctataaattcggaaacaagttcggaagccgaaagacgtgtatgttcggcatctgcaagtggacgtggcaacacaaaattatgatagagtgccaagccaataaataaggctgctaacccataaaacaccaacgaccacgagagttggacgctcatataggtctgtaacaatcctgcaagagccaccaagccaccctttccaactatcattgagatgcgataaaacgtagaacgaatgcctacaaagaacgattgttcgtgagcgttgagccctaacatataaaatccatctgcgccgacatcgtgtgtggcactcgaaaacgccaacaaccagaagaaacatatcgtaccttgcagccaaagccctacatttatggtaaaggctacacctgcaaaggctgcgccaagaagcaattgcatagccacaacccaccaacgcttggtgcggataaggtctaagaacggactccatagtggcttaattacccaaggcagatagaaccaagaggtgtaaaaagtaatctcagcatctgacaaacccatttgctgatacattaccaacgataccaatgtaactgccacgttgggcaatccttctgcaaaatataggctcgatacccaagcccaaggcgatattttatgctttgtttccaaactatttatgtttttacaagtgtattctaaatgtataaatgttatgcggaactcgatacgcattgatgaacttgctcataaaccgagtccctacacctttgccgaatgcagcatattttagcacaaaggtaataaaaaaaatacaaactccttatgttttcttctctttagcaagcaatctcttcataccatcactataaacattgtcttgacaacaaataaaaagggattaaaaaagtttataagcaacagcacgtgaatgggcttctgcaatgttagccactttgagtttattgaacacattgcgcttataaaactttatactatcaacacttttacacatcttttctgctatttcgctcattgttagtcccactgccgaaagcctcaacacctctatttcctcgtctttcagctgcactgccgtgcgttctttccatttatacgaaaggaaagcgtattcccaataattacgattgctctccttgtgcaattctacgtgtcctttgtctttgtgcgaagatggcgaaaccacacacatagctatccatatccgcccatcggcagtgagttctacgggagtaaggcgatggttcaccaaggtttgcttcttcccattttgcaaatgaaaatcgtacgacatagaacatctgcacttatcttctatactgaaagtatcgaaaaactgaaatccacttctattgatttccaccaacatcttttgttcttctttgggtacgtgctgcaaataaaaactataccccatcgcctttacctcctcagcggtgtgtccacagagaaacaaaggattgtcggcaacatatagaaactcttgcttgtaataatctatcaagtaaacactctgataggttacacgtgcaaaagtctccaccgtctgtatcactgccgcaattgttttcgcattataagttggcatttctttcacttcattgagttcaagaaagaagtctttcacatctaccattgtcgtatgcttaattattcatctacaagaataaacaaaaacaccgagccaaagcaatatcattacacaaaagtgtaaaaacaaaccttcatacttaaaatttacacaaaagaataatgaaaatatttaaaatcaacttacctttgcataagataatttgtcgtaggtaaagcgtaggagcgtgacttattcgcaagctcatcagacgtatcacgttccaaaacatcaacttcgcaacagaataaaaaacaaacaatgattatgaacagaaacatcttaaaactccttactttgtattttgtgctatttagctttaacattgcaaaggcacaacactatcgaccatacgaggcatataccgccagtgcttttgtagaatataacgacctccatcctaaagaaatagccacagccgacaacaattgggatatactaatggcattccgacaatggcataagcccaactatttagactcgctaaacgtaccttacacccaaagccaactgatgttgctcaccatcaacaaaatgctaaaggcggatagagacggttacatttctacaatacctctattcgactcgctcgccacagctcgtatgcgcaaggatagtcgaatatttgtagaacaaaacattgaccacatcgcaccttattgcacacaattgcgccaactaatggcaaaagacaaatgtgaagccaatacatatagcatcctcttctcgtatatcctcgacaccattacgtgggagcttctcaacaccaacagggatagtatgaccatagccccaacgtggaaaggtgctttctacttacattattaccctcgtcaaaatgcgtgtggaaccaatacctacggcagtatgcagatggctatttcgcataattacagaataaagggattcgactacatagacggattaccttttgaagagattgcagcggaatatcagagaaatggttgtatcaaagacgaaaaactaaaaaagcaaattatgccatacggagtttgtgataaaaacggcaaaatacagatacctgtcatccatttccaaaaagaatcacaactcaaccttattgcactgaacattgcgcaagccataaagaaagattttacacaaaccgcatacgttcaaaactttatgaaacaatatcacatagacaagcgtcaattggcaattgttattctctatcacgaatatatgtgggacttgctcgacatattatgtgaacgtaagctgatacaacaacccaaactttggacaagcaagacccacgatatagccgacctgcgctatcaactatttttgctcaaagtgaaagaataggttacaaatagcttaaggctggttctataaattagctttgttagattttgagcttatttttgaggtcaaaatgcaagagcgtgaaggagtgtagcgagctacacgactgaacgaacttacattttgaaccaaaacggagcaagccgaatgcaatcaaacttatttgaatggttgaggcgcaacctgttttatataaaaagaagccaaaagataacaaaacgtatttcataaaaatttaatgactatatgcggtggtaatttatagaaccagccttaacatttagaactgcaagaacacataagaattatagggtataaatagattcaaacctcttatatcgaacgcttattcatctcaaataatcgcctatttttccgaatacaaagatataaatgttaaaaataagcctcataactctcatatttgcaaccacaaaggctgttggttgtaaatatgagaattatacgtgtgcaatcataaattactgataatctgaaagaaacaaagacatacatagaactgtgcaaaaacacactgctcttaatacacgaatatagaacgctaaagaggaaaatacagacaggaaattacgcatttgtacatatttaggagggctaaacatcaactttgaccctcccaaagttcaactttgacaccctcatacatatatgtttgacattctcaacattgaacttttacagcattacacttccgtttcagagttttaaaatataatatgcgaaaaatcgaataatcctatttcggaatttcaaatgttaaatcgcaatttctcaactcagcatttggcatagcttttgtatataccgaataaaaataagaaatgaataaaaaacgaacaattttataagaataataaaagaaaaatagaacaaaaatattacctttgtaaaactaagaacaaaagtacatagactgctaacaagtttcatcacatacgaaaggatacaaagaaagcgagttgttaaacccgctttatttgttttcacaacggaataatccttattgtgatttgctaaaaaatcgtggtgcaaatatagcaattttattacaaactgccaaataattagtaaaaaatattactttaaaccaaaacagaataaaaaatgaagaacattttaggtttagacttgggaaccaatagcattggttgggctaaagtctcagtagacgaaaatggaaaggtgatgagcgacatacaacttggaagtcgcattatcccaatgactcaagatgtattgagcaagtttgataacggacaaacgcagtcgcaaacagccgaacgcacgggctatcgtgggcatcgccgcctcttagaacgctcgcttcaacgaagagagcgacttcacagagccttgcacgtgatgggtatgttgcccccacactatgaaaaagaaataggatggaacagaaacgaacctaaaacatacggaaaatttatagataatgccgagccaaaaatagcttgggaacgtggagaagatggaaaaatgcagttccgttttatggactcgttccacgaaatgttggcagattttgcccaccatcaaccagcattagtagctgatggaaaacgtattccattagattggacactctattatctgcgcaaaaaagcactcaccgaggcagttacaaaggaagaattggcgtggatattgcttagtttcaaccaaaaacgtggctattaccagctgcgtggagaggaggaagaagaggatataaccaaacgaaaggaatatcacgagttagaagtggaacgtgtagatgccacaggcgaaaagaaaggtgacaaggaatggtataacatttggctaaaaaatggttggctgtacagaagacagagcagcataccgcttgacaattgggtaggaaagattaagaagtttatcgttacaaccgaatatgaagctgatggtataaccattaaaaaggacaaagaaggcaacgaacgccgttcgttccgttcgccttcggaagacgactggacactaagaaagaaatgtaccgaacagcagatagagcaatcgggcaaaactgtgggtgctttcatttatgatcatctgcttgccgaaccgtctgacaaaattcgtggcaactatgtgcgcaccatcgaacgcaattattataaagacgaattacgggctatattgcaaaaacaaagagagtttcacgaggaattgcgtaacaaaacgttagtggaagcttgcgcaaaggaactctatctacgcaatgaaacacatcagaaggttcttatgcaaaaagatatggtgcacctattgctcgacgacttgatattctatcaacgtccattgaagagcaaaaagtcgctcatagccgattgcccatacgaaaaatataactatacagataaagaaacaggagaaataaaaacccaaacaaagaagtgtgccgcaaagtcgaacccttattttcaagagtttagattgtggcagtttgttcagaacttacgtttgtataagcgtgaggacgatgcggacgttacggcagactacttaaaaacaactgaagactatgctaatctctttgattttcttaacgaccgcaaagagataaagcagagtgttttgctgaaaaatttctttaaaataaagaaaacaaaggtaggcaaagagtcaatcttccccataagatggaactatatagaagacgaaaagaagacttacccttgtaacgaaactcgatatgagctactatctgctctgaaacgtgcaaatatagagggagattggctcacaaaggagcgtgaatacagaatgtggcatttgctttactctgtggaacacaaggacgaaacacgtaaagcattagagaaatgggacgagggtgaagactttataaatgcttttctaaaggtgaaaccattcaaaaaagattatgcttcatactccgaaaaagccataaagaaattgcttaccgtaatgcgaatgggcaagtattgggaggaagacatagtaaaaaccattgctggaaagcaaatagaaaagattattaacggtgaaatagacgaaaaactaaaggagcgtattcgtaatgcaaaactgccattagaaaacgtgaaagcctttagtggattgcctgtatggttggcttgctatgtgatatatagtaggcactctgaaactacacagataactaaatgggaaagtccagaaagtttgatgtcgtttatcaaaggctttaaacaaggcgaaatgcgcaatcctattgttgaacaatgcgtgttagagaccttacgcaccgttcacgatatatggaaagctgcaggacatattgacgaaattcatatagagttgggacgtgaaatgaaactcacagcagaagaacgtcaacacagaacaagtgctatactgaataacgaagcaaccaatttgcgcatcaaacagttattgatggagttgaaaaacgataatagcatagagaatgtgcgccctcactctcctatgcaacaagacattttgcgtatatatgaggaaggtgcactgaacgaattgaaagctgaagatgcagaatataatgacattctaaagatttcgcacactgcccaacctacccaagatgaacttatacgttacaaagcttggttggaacagaaatatcgctcgccttacacaggtaagcctataccgctcgggaaactatttacagctgcatacgaaatagaacacgtaattcctaaagcacgctactttgacgactcactatctaataaggtgatttgtgaagccgaggtgaacaaaacgaaaggaactatgttgggatacgaatttatcaaagagaaagcaggaacaaagatacattgcgctgccataggagatgtagtaatattcagtcaggctgaatacgaacagtttgtaaaagagcattatgcgaacaacacaaagaaacgcaacaagcttttaatggacgaaataccacaagactttatcaatcgccaattgaatgacagtcgctatatcagcaagatggtcaaatcgctattatcaaacattgtacgtgaacaaggagaaagcgaagctacatcaaagaacgtaatactttgcactggtggcattacagacaggctcaagaaagattggggaatgaatgatgtgtggaacaacttaatatatcatcgatttgaaagaatgaacaaactaactgaaagtgagttattcggacattgggagaataagaacggaaaacgcgtgtttcaaaccacaatgcctattgagttgcaacgtggatttaataagaagcgcatagaccatcgccaccacgcaatggacgcattaataatagcttgtgcatcacgcaacattatcaattatctaaacaatgagtcggcagctgatgagaagaagcgatacgacctaaaagcaaaattatgtggagagaaaggaatgataaagaaaccttgggatagctttacacaagatgctcaaaaggcattaagcaatgttgtagtaagtttccgtaactatgtgcgcattatcaacaaagcaacaaacttctatgagcgtatagacgaaaaaggaaaacatacacttgtgcctcaaaagacgaaagaaatgtgggcaatacgcaaaccattgcataaagaaacctattatggaaaagtgaacctcaaacgtccagatacggtatcattatcaaaagcattggaacaagtggagcggatttgcgacaaagaattgcgcaaatatatccttcaactaaaagagcaaggaatgaataacgccaagataaaagcacatttcaaagcgttagaaaatcgttggaacgaaaaagatgtatcgaaaatagatattatcacctttaccaatgataaaggtgataaggaagcaatggtagcatcaagaaagccattggacacctcgttcgacgaaaaagcaatccgctcaataagcgatacaggtattcagaaaatacttctcaactaccttaaagccaaaaatggaaatgaaaagttagctttctcgcctgaaggtatagatgagatgaataaaaatatttcgctttacaatgatggaaagccacaccagccaatccgcaaagtgagagtaaccgataaattgggtctgaaattccaagtaggacagcaaggcaataaaaaagataaatatgttaaagctgaagtaggtacaaatctttactttgcaatctataaagatgaagaaggcaacagagtttataatacgccggaatttagcgatattgtggaaagacttaaacagggtctcaagcctgtaaaagaaacatacaataatgctaaattattgttcaccttatcacccaacgacttagtttatgtgccaacagaagatgaaatgaacatagataatgtaaaggaattaaatcctgaacatatctataaaatggttagctcgacagaaaatcgtagcttttttattcagcatagagtggcaaaaagcatacaagataagtatgagttttcttcaaaaaacaaaatggagcgtgctgttggagatacagatgtaatgataaagtctgtctgttggaaacttgaagttgaccgattaggcaatatcactaacatcataaaatagtattgaacaaaagaaaggaggaatatatatgataaagaaaacattgtgtttcacaaatcctgcctatctcagtatgcgcaacgaccaaatggtattgcgcataccagaggtagtaacaaacgaagcgttgccacaaatgctgaaagacgaagctgtacgcaccatcccaatagaagatattggggtggtagtactcgacaataaacgcatcaccataacaagcggcttaatggaggctttgcttgcaaacaattgtgcaataatctcttgcgatagcaaaagtatgcccacagggatgatgttgcccttatcgggtaatacgctacaaaacgaacgttttcgccatcagttagaatcttctttaccattacgcaagcagttgtggcaacaaaccataaaacaaaaaatacttaatcaagaacacgtattgcgtaccaacaccaccaccgaaacaaaatgtatgcgtgtatgggcagtagaggttcgtagtggtgatgccgataatacagaggcacgagcagcagcctattactggaaaaatctattccctactattcctaacttcgtccgcgatcgtgaaggcattccatctaacaatctgttaaactatgggtatgccattctgcgtgcagtaatagctcgctcattagtaggaagcggactcttacccacacttggcattcatcaccataatcgttacaacgcatattgcttagccgatgatataatggagccctaccgaccttacgtagaccaattggttatcagtataatgaataccgaaaccgattattcggaattgaccaaagacataaaaatgaaacttctcggtataccaatgatagaagttgaaataggcaaaaggcgcacacctctaatgatagcttcacagcaaacaacggcttcgctgtacaaatgttttgcaggagagatacgccaaatagcatatccagaactataaaaagaaagagtttatgagcggtttagataatttaagcgaatataaaattatgtggctacttgtattttttgaccttcccaccgacactaaaaaggataagaaagcatacgctgacttccgaaaagtattaataaaagatggatttacgatgtatcaattctccatctatgtacgccattgcgcaagcaaagataatgcagaagtacatatacagcgagtgaaaaacaatctacctcgctatggtaaagttggcattctctgtattaccgacaaacaatttgccaacatccagttctttaatggagctaaacctgccaccgccacagttccttaccaacagttagaactattttaaacagccatttacagctgcaaaaacctatccttacctattgcaaaattaattaggaccgctgaattaataaattgccacgactacaaaacagcgggctctaaactttgcaatggtatctgcccataaattgagcttaatttcgaaaagggcaagacaaagttccctgaggaactttatcacgttcttgacaaagtagcacattcctgtccagcattctgctgtttctggaagcttggctctgatgttgttggctcgatagactctcttgcctgtgccgaaagagcattcgacttcgtttcgttctccgatggccttggccatcttcttgagatattcgggacttctgggtttctttggcggtcgacctaatggtttgcagcaagtctttatctcatattcttcctctatcaatacttcgttaattctaatgtaatcgtttgaaaatgagagagttaattaacttaatataactaataaaatttggccaagtggctgattatcagtaactttatagtagcaaaaacataaagcaaatgacatcagaaccactcgaccaatatacagaaatctgcagagatgccatcaaaagctcatctgcaaaattaggcaaaacttttgagaatctactcttggaaatactcttattgtacatggcgatacaaagaaagataaatttcactcaaatggagcgttacggcacccattgcgagcagacctacagaacgaatttcaaccgcagccgggctaagtgcatcaactgggttaagttcaacctctacctttcccagcgttatctgaacatggacggactgctggctatagccatagatccgagctacatcagtaagtcaggcaagaagactccgcatgttggtactttctggtccggctgtgcaggttccatgaaacacggcattgaaattatgggacttgcccttgtcgatgtctacgccaacaactgtatgatgcttcgtgcccatcaaaccccttctacaagagagttgaaactgcgtagcatgactcttgtgcagcattacattgccgtcatcaaacgctacaggaaagaattgttgaaggtcaccgatattgttgtcgctgatgctttcttctctatccgtccgtttgtggagggaatcaaggagcaaggctttcatcttgtcagccgtttcagggatacggcgagcctatactatgtgtacacgggacctcgttccaataagcccgggcgtcccaaaacacttgacgggaaaatcaattacaagaaactcgacctcacgcgtatggcgaagatgcatatcgaaggacttgaaggcacagcttacacactcatcgcctattcaaaggcactgaagcagaaagtgcgtcttgtcatttgggtgatgccgaacggcaagcacaagcttttcttctccacaaagacatctatgtcgggtgaagaagtattgcgcacataccgctcaagattccaaatcgagttttgcttccgtgatgccaagcagtataccggactcgcgcattgccaggcaaggcacaagaatcagctggacttctcctacaacgcatcatttgcatcacagaatgtggcaaaggtgatgatgaaggaaaacgggctaccgtattccatggcttctttcaaggagctcatggcgagcacatacattgcaaaattaattttcgacaggtgtcggagcataccgaaccgaaagttaattagtcatactatcaaagaactctttggctggcagaggaaagctgcgtaacaattatctcaaattttaacgaactattgctctataaaacctgaaataaattcccgccaaagtaactaaaacggccgtttttcgggacaacctcacataccaagtgtatacagactcctctccgagcctgcataaattataatgatactttcctcttcgagctcagggcgcacactgggttccatcgccgaccatgtcgttggttaatttgcaaagcgaggtcacatgccatcacaaagatagtagcctttccatggccggtatatcgtgccatccgttttaggcgaatgtttcgattctgttgtcgaagtcctggtacggaacgttttctccgagaatgtgccatgcgcagacgagtatcttacgcgcgatggctacctgtactttcatcttattcttcttgaacacaccaaaaactttctcaataatttcgcccgtgctgcttaaaatacaaagaaaaatgctatctttgtgcacgtcaaggccacatacgattctcataagcctacatttgaggattattaattttttgctcaaagataatacatattgtgacatagagcacgcatttaggacaaagaatttatgctggccttgacacttttccgtcaaatgggaaggcgattcgggaatttatttcccgttttttatttccacaggcttatatttcgagatttttatgtatctttgcaacataagtacagtactaacagccgatatcaatagcaaatggcatcccatcgggtcatcggagctatgacagacttgtaattagacaagcggaggttagtattagcccgataagcgataaggtgataaatatccttatcgcttacttttttaatttatgataaaccagcaacccagttcttggtttagtatcttcaagaatataccacgatttaaacaccattttacttttttgaattttgcaaatgcacacaatagctacatctttataaaactttattagatgccactctgtgagttggtaatccttttgctgtttatctttataactttgccctaaccatacctcatcaggattttcctctataaaacctgaaataaattctcgctaaagtaactaaaacggccgtttttcgggacaacctcacataccaagtgtatacagactcctctccgagcctgcataaattataatgatactttcctcttcgagctcagggctcacactgagttccatcgccgaccatgtcgttggttaatttgcaaagcgaggtcacataccatcacaaagatagtagcctttccatggccggtatatcgtgccatccgttttaggcgaatgtttcgattctgttgtcgaagtcctggtacggaacgttttctccgagaatgtgccatgcgcagacgagtatcttacgcgcgatggctacctgtattttcatcttattcttcttgcggacttgtgtctggtgataggaaaaacggttgaagaaacaatcttgggttcggcttgcgccctatgaacactggatgatggtgcgtcgcagatatcggttgccatatgtgatacggcgtgacttgaaggttccatttgactggtcgttgcgtggtttcagtccgctccataaagtaagatggcccgccgtctcgaagtgtgttatgtctgttccgatttctgcaatcagtgatgtggcggctctcattcccactcctgggatggtctgaagattgtgaagggcttcggcgtattcattctcgcagatttcttgcatcctgtccatacattcctgcttgtgccgctctgccatgtctatctcggccgtgagctgcgcataatgtcaatgtcgtatgccgtgatgcatcctgtgagcgaggctatgatgacctcccttctatggtgtttgataatccgcccgtggacttctctgacgagcgtctcgggatctgtttcccctcgcatattttgccaatcacgttcttgtaactcttgctgtccgtactcgagacgtagttgctgagccgtatggtgcagcactgcaccgcagcgtcaagtttgctgagcttacgcacgatctcgtcatcaaggtcgtagatgcgacggtcgtattgctggatgcgctccaacgggacaaaacctccacgaaccagttccttgagcatgcactccgctatccattgggcatctttgacatcactcttgtgtccgggaagctgcttgatgaaataagggttgatgagcttcaggcggaagtgcggctcaagcatgcgccatacggaatccaataaacactcgtgctttccatcccgacttcctgtacttgatatttgagcaacaaatcacgcatttcgtacagttcgagggtcaacacaccaaaaactttctcaataatttcgcccatgctgcttaaaatacaaaaataaatgctatctttgtgcacgtcaaggccacatacgattctcataagcctacatttgaggattattaatttttttgctcaaagataatacatattgtgacatagagcacgcatttaggacaaagaatttatgctggccttgacacttttccgtcaaatgggaaggcgattcgggaatttatttcccgttttttatttccactggcttatatttcgcgatttttatgtaaatttgcaatataagaaacaacttcttcctcatattgcatcaaagacatatagttgtgatttgctcgaaaaatcgtatctttgcaatataagaaacaacagacggtaaaattattttagaagtatggaagttgtgatttgctcgaaaaatcgtatctttgcaatataagaaacaaccttcgtttgttctggggttggtaaagaaagttgtgatttgctcgaaaaatcgtatctttgcaatataagaaacaaccagctgctgatactaagattaagctcaacgttgtgatttgctcgaaaaatcgtatctttgcaatataagaaacaacagcggacgtatgatagcacagtggtggtaagttgtgatttgctcgaaaaatcgtatctttgcaatataagaaacaacgacggcagatggtgtactttgctcttatacgttgtgatttgctcgaaaaatcgtatctttgcaatataagaaacaaccgttatgtagaactacctttccaacgtgcagttgtgatttgctcgaaaaatcgtatctttgcaatataagaaacaacaaattcttcgatgaaatcattgctggcacagttgtgatttactcgaaaaatcgtatctttgcaatataagaaacaacaaagcagagttgaaaaacgttaatcctgtagttgtgatttactcgaaaaatcgtatctttgcaatataagaaacaaccttagtgtcgggattataattctgatccctgttgtgatttgctcgaaaaatcgtatctttgcaatataagaaacaacagagcttttccgactggacagaccacgcccgttgtgatttgctcgaaaaatcgtatctttgcaatataagaaacaacttagtgttacttttgcatcgcagtcgaacagttgtgatttgctcgaaaaatcgtatctttgcaatataagaaacaactaatgcttcagtaatataatagtctataatgttgtgatttgctcgaaaaatcgtatctttgcaatataagaaacaacctcaaatcaacagggcagcgtatgcaatccgttgtgatttgctcgaaaaatcgtatctttgcaatataagaaacaacgtgttacagatagagacttttacaccaatagttgtgatttgctcgaaaaatcgtatctttgcaatataagaaacaaccaccgcctggcacaccgctaccccccggacgttgtgatttgctcgaaaaatcgtatctttgcaatataagaaacaactgacgctacgtgtaggaaaggctgcgccttgttgtgatttgctcgaaaaatcgtatctttgcaatataagaaacaacgttctgttgaaaaaaccgccacatataagagttgtgatttgctcgaaaaatcgtatctttgcaatataagaaacaacgagttctctaatgctatacccttcggctctgttgtgatttgctcgaaaaatcgtatctttgcaatataagaaacaactccccctcgatggtggtaagtccatcacgcgttgtgatttgctcgaaaaatcgtatctttgcaatataagaaacaacagaaagtatgccagtaggagggaggattaggttgtgatttgctcgaaaaatcgtatctttgcaatatgaagttacgaaaagagtgtaatttattgaaaatgagcgtaggttaattgctcttgatagtaataggttacgatttagttagttatctactgcattatccttctgcgcgtcgcgtaaccttcaaagaactctttgtatgcaaaagtagctattttatccgagattttgatataaactcccggattttttatcacctcattcattagtttttccgtaaaagcggtattgttcgtcggaacaccattgcccaaaacgagtttagaacaaacgtgtgccgactaccgcatagccagagaaaagggcattgcctcacgcctaaacgatgtttagactgatgaagcaatgcccctttcttttgcgcctatgccaagaggtgcttttacgggttttcaaatgatttttcttttttcgctgtctcttttgccgtaagcatccaatattagccgcctttgtgtaacattcttactttactacctttgcccgaaaaacttatgtttgtactcaacgaaacaaatgtttttcgggtttgttgcactcctgtggatatgcgtcagggtattcttcgcctgtcccaattggtacgccgca

SEQ ID NO: 630 - DNA, 20136 bp, synthetic construct
  misc_feature 1..20136: note = Synthetic
  source 1..20136: mol_type = other DNA
cagcaactaccaagatagcaccatccatctgagcagcaccagtaaccatgttcttgacatagtcagcgtgacccggacagtctacgtgtgcatagtggcggttagccgtttcatattcaatgtgagcagagttgattgtgataccacgctctttttcttcaggagcgttatcaatctgatcgaaagacttaatttcctgtgcaccgaagcccttctcgtgaagaactttagagatagcagcagtcaaagttgtcttaccatggtcaacgtgaccaattgtaccaatgttaacgtgcggtttggtacgtacgaattcttccttagccatagctttctttttttatttatataaatgtatttataatcgtttttagtttctcgctgtatccaaagataagctctgagtagagctgtaactgagagttgaactcaggacctcttccttaccaaggaagtgctctaccactgagctattacagcaaaaccatagagcggaaaacggggctcaaacccgcgacccccagcttggaaggctagtgctctatcaactgagctatttccgcaaaacaaccttttaggttgtgggtggtgatggattcgaaccaccgaaggcatcgccagcagatttacagtctgccccatttggccactctggtaaccacccatattattcatttactatcaaagaacaaacgctctatgttgagcctcttgtcggattcgaaccaacgaccccgagattacaaatcacgtgctctggccaactgagctaaagaggcaaatccatgcagccgatacgactttactaggacgtgttctaaaacggctgcaaagatacgatttattttttaatcaccaaaacttttaatcagttttttcaatgattgcggattttttccttgaatttagtcaactgcaccttcattgaatctactgcttcatcaattccttcctcaaatgtatcacaggtctttgcgacaaagagcttttgtcctggaacagaaaccgtaatactggcttctttattgagggcggtggcaggtttgactacttttaactgcacctctactttctgtatatcttcgtaattcttttctaacttggcgattttcttttcaataaacgcctgtaacttttcggtagcgtcgaagtgaatcgactgaatttttagttccatagttaactccgtttttaagggttaagcccgaggatgggcactataatactcgcgtttaagctgctcaaaagttgtatgtgtatagatttctgtcgttgacagactctcatgaccgagcaacttctttacactttcaatcccagctttgttattaagcattgctgttgcaaacgtatgtcgcagcacatgaggcgttcttttcttcagtgtacaaacctttgaaagattttttcttacggcttccctcacttgactcgaagtcattcgccgcccttttgctgaaacaaacaaggcttcagactgccgattcacttctttatcacgacacttcatgtaatcatgaaacatcgccaagagttcctcaccaaagggaatcacacgctgtttattcctctttcccgtcactttcaactgccgattcgaaaaatccaccatgctatcatccagtcctatcagttcagaaagtcggattcctgtttcatagaaagtcatgattaccatgcgatcacgcacatcttcaaaactctccgtccaactttctgcatcgagcaacctatccatttcattctctttcaagaactgaggcaaaggtctacccttctttgaccccgtgacaccatgtaccggatctttatcaaccaacttccttgcaagagcaaaacgatagaaagaacgcaacgcactcaacctccgattgattgaagttgcattattccctttatccatcatgctctccatccagtcgcggataatatccaaatcaaccgacttccaagagtgacaaccttctaagctcccatagaattccttaaaagcccgtaggtcttctccgtaattctttatcgtcaaatctgagcgattacgctcaaacttcagatagtttagaaactcattaatcatcataaaagcgccgctggcatatatgtttacggcaacgaatttacggaattaaattcaaactaccaaattttttaacgagttttattcctcgttagtacgcagtttctgtacatagacagcgtgttccatcttgagtctcttcaaaacagaaggcttgttgtactgctgacgagcacgaagctctttaacaacacctgtcttttcgaattttctcttgaactttttcaaagctctttcgatgttttcaccatcttttacgggtacaataatcatgtttcttttaaatttattaattgatttatatttcactcatagtcaagcatttaccctccaacgagagccaattcgcccactacaagcggctgcaaaattacaaagttttcaagaaagtcccaaacaaattactgattttcttttagttatcccatcgttaatcacgagaagacgagtcctcatcgcttacctctccaccttattatatagactggcgctgcacactttctaatcgcttattcagcaaatcaagaatagcttgcggcttcatctcgagattatccactgggaagctctcttgcgccccaatcaactcttcattcattcgccgaaaagctttccctatggcatgcgttgcttccaactttttcaccctcacatcgggtttatatttcactgcaatttgcatcgatttactcacgccaactaaatgaaaagcctcaacatctgcaaagcgaacagcccaaacgcgctgcccatctacagcaatgccatcttccgagataaccaaataaggatggtcacccaagcgttcgcgcaccaaaaggtagagtaaatacaaaccaagaccaccaaacagcacgatatttccccacgcaaggaatgcctgggcaccgcttatcagtaaataaacacccccgcaggcaaataccgcacataccaataacagtaaagcatttttctgcaacgaacgataaatcttaatttcttccatttctatcacttcattatttttacacgtgcaaatataacataattctcataccattacaaataacaactcaagaaattggccttgatcacaccttccgcccttattccctttttcgaatacgctgtcggtatttgttattcaccacaaatggtacacgttccaccgttacattacttgtgtcaagacctaaagcttgttcatcatccacaccaatatggcgaataacgccaaaaagatggagcgtgatattatccaaagcactcaccactgttgaagcataataaatgcgatggatgacgataaaacggaaatcgccggcaatattatgctgacgcagcgaaggataaccactgcggatatcaaaacgatgctgagctatcaaatcttcaactatttgacgaagatatagggtcatcagtggattcacacgaaaacccactcgaatatcaatggtgtaaagtgtgtcggctatcaattcatgacaagtgtaatccaacgtgtctggtgcatcatcattggtaaaatgcactaaaaaataatggtctgcacgtttcggttgcttattgataatcgaataaatcaacttatcttctaccatctcttcatgttctgactgccgaacatacaccaagtttgttgcaaactttggtatcgtttcgtccgcctttaagtcacgaataatatcataataatcagaaagttttttaaatttcaaatactttctacgaatattccatgcacgataccatacacgcatgatagcacctgtgaggagtgccagcataatggtaaaccaacctccatgtaggaatttcgtcaaattagccaagaaaaagaatccctctattcctaaataagccactaaaaaaatgaggacagcccaagttggtgtaaagcgctgatgcagataaaccgctaacatcaccgttgttgtgagcattgtgatggtgatagacagtccataagcagcctccatgtgagcggaggtctgaaacagcaacacggtgacaacacacaagatataaagtaggttattgatttgtggaatataaatctgccctttatctacagaaggatacttaaatttcaacgtgggccagaagttcaaatgcaccgcttcgctaaagatggtaaagcaaccactgatgagcgcttgacttgcaatgatggctgctcctgtagccatcacgataccagggataagcaaccaattgggcatcacggcataaaaaggattgatacccgtgtgtacgctatcaatatgaaaaatgacataagcaccctgccccatatagttcaagatgagcatggctttaacaaacagccaacttattgtgatattacgacgaccacaatgtcccaaatcagaataaagcgcttcagcacccgtcgtacaaaggaacactgcgccgagaattaaaaaccattcagggttggataacaacagttttaacgcataatagggattaaaagcttttacgatgagagggaaatccacgatatgcacggcacccaatacccctaaaagcaaaaaccaaaccagcatgaaaggtccgaaataagtaccgatagaacctgttccaaaacgctgaataaagaatactattgagataatagctatcacaatcggaacaatgggaatgtcagccgagaatgtatgcagtccttctattgccgaagtgacggttatagcaggggtgattaccccatcggcaatcagtgtactggcacccaacatcgccacaacagacaaccaacgataaccacgtttacgtatcaaagtgtaaagtgccaacacacctccttcgcctttattatcagctctaagtgccacgacaacatatttcaaggtggtttgcaaggtcagtgtccaaataatgcacgacactgcacccaaaatataatctgcatcaaaatgtggatttgcgcgcaaaatagtgcgcatcacatagagtggagaggttccgatatcaccaaagacaataccaatggcaattaacagtcccatggccgtgagcttcttgtgtgttgttgttcctgaattcatcttttcatttacgcctgcaaaattaatagaaccattaaaaagaaaatatcatcatgggttaaaaaaggctaacattacaccctacttatccgaagcgattccacctgagtcctactcgccttccgaaccaccctaataaccaccattcacaaagcctgtcagcgctatattgcaatagctatgttatttcttgataatagcatgcaaatcatagagcaatatggtgcagattatcctgtaatataccctttattacatcagcattccattttcttcttacagcaaagctatgcaaacatccatcccataagaagttactctttcatgcatctcaagcccctcaccggcacaggaaataacctaaatcgactattgagcaaaaaaagttggccaaaaagttgttgttttatcagagaaacactacctttgagactgcgaaaaagaaaaggacgagtcgccccgccctgtttgttttcacaacggaaaaatccttattgtgacttgcttaaataatatctgagtgcaaatataggagttttttactaaagaaccaaacaaaataaagaaaatatatgaaaacaattcttggcttagatttaggaaccaacagcattggttgggccaaagtcatcgttgatgacaatgaaaattatttaagagacattcaacttggcagtcgtatcatccccatgagccaagatgttcttggcaagtttgacaaaggagtaacagagtcccaaaccgccatccgaacgaacttccgaggcattcgacgccttagagagcgcactttgcaacgccgcgagcgcctccatcgcgtgctacacacgttgcattacttacctcctcactacgattcggccattggatgggacaggaaagcgcccactacctatggtaaatttttaaatcatggcgagcctaaattagcatgggaacgccgagaagacggcacaatgcagtttcttttcatggatgctttccatgagatgatagcagacttcgctaaacatcaacccgcactcgttgctaacggcaagaaggtgccgcttgactggacgatttattacctgcgtaagaaagcacttacacaagccatcaagaaagaagaacttgcatggattttgctcaacttcaaccaaaagcgtggctattatcaacttcgtggcgaagaggatgaagagcatgcagcaaaacatgaagaatatcatgagttgaaagtggttggcgttgaagccgatgaagcaggaaaaggtgacaacacctggtataatgtaaagttagagaatggctggatatatcgccgtcaaagtaaaatacccttagacgactgggtgggtaaagtcagggctttcattgtgacaaccgaatatgaaaaagacggaacaacacccaaaaaagataaagaaggcaacgtgaaacgttccttccgctcaccaaatgaaaacgattgggggctgcgaaagaaacaaactgagcactcgttagaagcatcgggcatacctgttggcgcttttatctatgaccaccttttaaaggagccctcggataaaatccgcggaaaatttatccataccatcgagcgcaaatactataaacaggaattagcagccattcttcgtgagcaaagcaaacaccatgaggaactatgcagcaaggacatgttaaaagcatgcgtcgaagagttatatccaaacaacccgcttcatcgtgaaagtctgttaaaaaaggacatgacttacttgctcatagaggatcttatcttctaccaacgcccgctgaagagcaaaaaatcgctgattgcggagtgcccctatgaggcctattcctatgtggacaaggaaacaggcgaagtgaaacggcaaggcattaaatgtatagcaaggtccaacccctactaccaagagttccgtttgtggcagttgatagccaacttacgcctacgcaatcgagccgacgagcgcgacgtaacagccgaatatctgcctcatcaagaagactatgtgcgcttgtttacctatctaaacgataggaaagaaatcaatcaagagacactgttgaaggactttttcaagttgaagaaggtggcgataggcggtgaaaaggtgtttcctattcgctggaactacatcgaagacaaagaaaagaaatatccttgtaatgcgacacgccacgaacttctccttgcacttgacagagctggcatggagcatgactggttagataatcgagatttggcttatcgactgtggcacttgctctattctgttgactctaaagacgaaacagagcgtgcattgcgcaagttgaaagatgacgatgctttcgttgaatcgttcttaaaaattaagcccttcgagaaagaatatggtgcctattcagagaaagccatcaaaaaactgctacccgttatgcggagaggaagtttatggaacgaggcggacctctgtccttctactaaagagaggattgctaatattttgcaaggtaccatcgatgagaaactcaaaaaaaagataggcgcgtttatttcgtcttgtcaacaggtgtcagactttcaaggattgcccgaatggttggcttgttatgtggtatatggacgccattctgaggctacagccatacaacactgggaaacacccgaacagcttttagcttatattcatgggtttaaacaatattccttacgcaaccctatcgtggaacaatgcatccttgaaaccctccgtacggtgtatgacatctggaaagaagcgggacagattgatgaaatccatgtggaattaggccgagaaatgaaaaagacggccgaacaacgtgcgcatctcacagagaatgtgctgcgcaatgagaacacgaaccttcgcatcaagagcctgttgatggaattgaaaaacgatattgatataaaggacgttcgcccccattcaccgatgcaacaagaaatcttacgcatttatgaggaaggcgctttgcaaaccttatcgaaagacgacgcagcgtttgccgagatcatgaagatttcaaaaatggcgcaaccctccacaagtgagttgaaaaggtatcgattgtggctcgaacaaaaatatcgttcgccatatacggggaaaccgattgcactttcaaaacttttcacttctgcctatcagattgagcatatcattcctaaaaaacgctattttgacgactcgttctccaacaaagttatctgtgaagctgaagtaaatagagagaaaggtagcatgttagcctatgaattcattaagaaacgtggtggagatgtaatacattgtacggctttaggtgatgtaaccatcttgagcaaagcggaatacaaggccttggtaacagaattgtatgcgaataacacatcgaagaaagagaagctactgatggaggatattcctcaggaatttgtcaaccgacagctgaatgacagccgctatatcagcagggtggtgatgactttgctttctaatattgtgcgcatcgaaggcgaagaagaggctacttccaaatttgttattccgtgttcgggaggcattaccgacaagcttaagaaggattggggtttaaatgatgtttggaacaatattgtttatccgcgttttgaacgtttgaatgcgcttaccaacaccactgactttggccaatgggagaacaaagaagggaaacgggtgttccaaacttcggttccacttgaactgcaacgtggctatcaaaagaagcgcattgaccaccgacaccatgctatggatgccttggtgattgcctgcgcctcacgcaatatcattaactatttgaacaaccaagaagctaatgaccccacgaagcaagaaaatgcgcgaaaacaactctgcattaaaagtcgcattatccgcaaaccttgggaaacctttacgcaggatgcccacaaggctttagataacattgtggtgagtttcaaaaactatgttcgtgtgatcaacaaagccaccaattattatgaacggtatcatgccgacggaaagaaagtcgttgacgaacaaaagggggagacgatgtgggctattcgaaagcctatgcacaaagatacggtctttggtcatgtcaacctgcggcgcaaagctgtcgttaagttgaaagatgcgttagagaatatccctgcaatttgtgataaaacgctccgtcattatattcaggacttgcagaaaaagcacttcaacaccaagcaattactggcacattttaaaaacattaactaccgattgaataagcaagcggttgataaagtcgaagtttggcagtatagtgataataaagaacagctggcagcaacgcggaaaccattagacacttcatttgatgcaaagcacattgccacaatcaccgacacgggcattcagaagatattgttgaactatcttcaagcaaaaggtggcgacccagccatcgcttttacacccgaaggaattgccgaaatgaatcgaaacatagcagtttataatggaggcaagcagcatcagcccatcctaaaggtaaggattgcagaaccaatgggcgctaaatatcccataggagaaacagggaacaagggtgctaaatatgttgaagcacaaaagggcacaaacctttactttgctatctatgaagatgaagagggcaacagaacctatgacactgttgccctgaacgtagttgcagaacgattgaagcaaggacttactcctgttcctgagaagaatgaaaagggggttgcattgaaattttatctctcacccaacgacttggtgtatgtacccaccgcggatgaactactctctaagaaatgtagtttagacaaaaatagaatttataagatggtaagtgcaacaaagtatcaatgcttctttttatcccatcgcgtggcaaagactatttatgacaaggttgaattcgaggctttaaacaagatggaaagagctttgactggagaaatgattaagtcggtttgctggaaaatagaagttgaccgcttaggtcacatcatcaacatcatcaaatagcctctttagcgtatgattaagaaaacactttgctttagcaatcccatctatttgagcctacgctatgcgcaattggtgctccatctgcctgaagtggtgcagaacaacacgctacctgaagcgatgaaaaaagaagccgagcgcaccatccctatagaagatattggggtggtggtgctcgacaaccctcgtatcacggtaacttcgggtgtgttggaggctctattagacaacaattgtgcagtgatcacatgcgatcaaaggagcatgcctgtggggttacttctgcctttatgcggcaacaacacgcaaaatgagcgatttcgtgcacaagtagatgcctcactccccttgcgtaaacaactatggcaacaaaccatcaaacagaaaattttaaatcaagagcatgttttacgtactactacggacaaggaaaccaactgcatgcgcgtatgggcaaacgaggtacgcagcggtgatccagacaatcttgaggcacgagcagccgcccactattggcgtaatctatttcttgattatcctcattttgttcgcgatcgggagggtactccacccaacaaccttctgaattatggctatgctatcctacgcgctgtcattgctcgagccttggttggaagtggtttgttgccaactttaggcatccatcaccacaatcgttataatgcttattgtttggctgatgatatcatggagccttatcgcccgtatgttgatcagcttgttattcagatactgcataaacataaagaggcttcagtacttacaaaagaactaaaaatggagctcttaggtattccgatgctcgacgttgtaatgaatgggaaaagaagtccactgatgattgcagcacaacagacaacagcctcgttagcaaaatgcttctctggagaaatacgccacatcagttatcctgagctgtaacccctcttatggtcgactttaaacgcttcagtgagtatcgcattatgtggattctcgtattctttgatttgcctacagaaaccaagaaggagaagaaagcctatatggactttcggaaaatgctgataaaagatggctttaccatgttccaattctctatctatgttcgccactgtgcaagtatagaaaatgcagaagtgcacatgaagcgcgtgcaggtgagccttccacaacatggaatggtgggaatgttatgcatcacagataaacagtttgccaacattcgccttttctttggcgaaaaacctaagacacctaacgcacccggacaacaattggaattattctaaaggatgtaggatggctaaaataagagccatccatctcccgataaaaaagctctgttaaaaaagaaaaaatatttttatcgcttacgaataatctaccatataaacaagaaatatgggaagaaggcatcataagaagttaccctaatagaaaacaaaaatcccacttcaatgaagtgggatttcgttttgtggtaccattttttatttcctgtgataaccttatatccttttgataaacaacaaattacaatgaatcagttgttgttgctaccacaaagatagatatttttaagcaaatcacaacctatgccggaagaaggtgggatggcggcgtggttgttgttgctaccacaaagatagatatttttaagcaaatcacaactgatacctcaatccatctattcaggccagcgttgttgttgctaccacaaagatagatatttttaagcaaatcacaacacaatcatcgtgacagctatagtgactatggttgttgttgctaccacaaagatagatatttttaagcaaatcacaaccgccgggggttggcttcttcttctcctgttgttgttgttgctaccacaaagatagatatttttaagcaaatcacaacaggaatcaatggggttgtaaatagtgtagagttgttgttgctaccacaaagatagatatttttaagcaaatcacaacctttaaagtatttactatttgttctataccgttgttgttgctaccacaaagatagatatttttaagcaaatcacaacgcagtcggcgcaacggacgaaagaggtctagttgttgttgctaccacaaagatagatatttttaagcaaatcacaactgtttttgttagtttattaattacttccgtgttgttgttgctaccacaaagatagatatttttaagcaaatcacaaccagcatgagtgtacatagcatcaccacttggttgttgttgctaccacaaagatagatatttttaagcaaatcacaacagattttcttcaatatgtttagagcttctgttgttgttgctaccacaaagatagatatttttaagcaaatcacaacctgttggttatatttctaatatgtcagttagttgttgttgctaccacaaagatagatatttttaagcaaatcacaacttatctctatcattcataccttcttcgtgcgttgttgttgctaccacaaagatagatatttttaagcaaatcacaactcgtacatataccctttcttggaaaagaccgttgttgttgctaccacaaagatagatatttttaagcaaatcacaactgacaaccgagcgattgttgtttaactcacgttgttgttgctaccacaaagatagatatttttaagcaaatcacaactagagatatggtagagatactttagcttctgttgttgttgctaccacaaagatagatatttttaagcaaatcacaactcatcttcgctcctgaatggagctttaattgttgttgttgctaccacaaagatagatatttttaagcaaatcacaacgcgtaccaatagcagacgtaaggaaattaagttgttgttgctaccacaaagatagatatttttaagcaaatcacaactgtaatcatacccaagatttttaaagtctagttgttgttgctaccacaaagatagatatttttaagcaaatcacaacgtatctttgtggtgataatatattgttaaagttgttgttgctaccacaaagatagatatttttaagcaaatcacaacggcatcgcggcaagcctgatgcagaaacgcgttgttgttgctaccacaaagatagatatttttaagcaaatcacaacagagaattctactaatgagaatcctactacgttgttgttgctaccacaaagatagatatttttaagcaaatcacaacgcattgagccatccatatacgaactaagacgttgttgttgctaccacaaagatagatatttttaagcaaatcacaacaggctatggtgagctgttcaatgatggaccgttgttgttgctaccacaaagatagatatttttaagcaaatcacaacttattacaataataataactatatttgtatgttgttgttgctaccacaaagatagatatttttaagcaaatcacaacaaaatcttcaaattcagctttataatgctgttgttgttgctaccacaaagatagatatttttaagcaaatcacaaccacaacacatcaaaggtattgcccacttgggttgttgttgctaccacaaagatagatatttttaagcaaatcacaaccaaagaatgctacgttaataacgattattcgttgttgttgctaccacaaagatagatatttttaagcaaatcacaactgcaaaatgttcaggcttatggagatatgggttgttgttgctaccacaaagatagatatttttaagcaaatcacaacgttaatctgtacgacaccatcgaccttagtgttgttgttgctaccacaaagatagatatttttaagcaaatcacaacgactggcaaacaaagaaagatattccattagttgttgttgctaccacaaagatatgatgtggcaagctaagataggcctttataggaaagcgtacgcagcacacacacgtcacttattgattatatttttctaaatggagtaagtattttcctaactatgcttgttataatgatagcactgctgataggatgagttgcataacgcaattgattttcaagagactcatgctacgatggtgcccttataaattgtgcgaaagaagtgtgttgtggtttataactctctaaagttttatgtctaccgaatcacaagttacattgattgtagcacaacctaagctataagagattactacttaaatgaggcattttataataacacggaatgaagatggcatttaccataccttttatcacaaaaaaggtgtaagtggatgccttaaaagctatattgattattaattttcatattctaaatattacttgattcaaacaacatgaaatcaactgtacaaaagaaaacaagtcgaaacataccctggaagaagtcgctttgcgtgggtatgctcttcatttcggccactcatgtgtgggctgaaaatccacttcttctggcagcttcactgcccagtacgcttcgttttgaaacgattctcccagcgccacaacaaactcatgttgtagagggaaatgtaaccgacgtgaaaggcgagccgcttttgggggttaccgtacgcgtgaaaggaacgaaaaatgccgttgtcacagatttagacggccattttaagattcaagcatcacgcgatgccgtattggaactttcttatgtgggctacacttcgaaagagattaaggccaataccatcaacaagcctattattttggaagaaaattcaaaagtgcttaatgaagtagttgtcactgccttaggtattaaacgcgcagaaaaggctctgagctataatgttcaaaaggtcactgcagacgaactaacacgcaacaaagatgccaactttgtgaactcattagtaggtaaagtggctggtgtgcaaatcaatgcgggtgcagggggtgcaggaagtgctgtccgtgttgtgatgcgtggtacaaaatctattgagaaaagcaacaatgtcttgtatgtgattgatggtataccgatgtacaatcacgctttcggcggtggtgaaggagcctattcaacgcctatgggttcggaaagttctgcggacatcaaccctgaagatattgaaagcgtgaatatgcttactggtccatcggctgctgcattatatggcagtgatgctgcaaatggtgttgtcatcatcaacaccaagcgcggtagtaaagataagacgagtgtcacagtgagcaatagtagtactttctctcgtgctacgttcctaccaaagatacagaacagctatggtacaagttctggactgatgagttggggtgccaagcaagtgggtgactttgatattgcgaaattcttcaatacaggttccaatatcattaattcgatatcgttgtcaacgggtaatagcaagaaccagacctatttatccatgtcaaccacaaatgcgaaaggtatcgttccgaagaacacttattcgcgttataacttcacagcccgcaataccacatcgttcttggatgacaaattggtattagacttcggtgcaaactatattctacagaaggatgcaaatatggtgtcgcagggtaaatataacaatcccttgcctgcattatatctcttccctcgtggcgatgactttaatgaaattcgcaactatgagcgctgggatccagtattgggctacatgacgcagtactggccttatggggaaggcgttcattcactgcaaaatccctactggattcagaaccgaatggagcgcacaacagacaagcatcgctatatgttaaacgcgtcgttaaagtggaacgtatataactggctaaacgttgtagggcgcgttcgggttgacaattctgaataccgactactgaacaagaactatgcttctaccttattaaccatttcggatgtgaatggtggttacggagatcagacacaacacgatcggacactttatggagacgtgatggtgaacatcaacaaacgcttcggagagtactataatctcacggctaatatcggaacatcgataaaagaccaggtgtttgaagctgctggaggtgcaggtaatctcctccttgtgaacttctttgcaatgaacaacatcaactatgccaataagtacaaaacgatacaagagggttggcacgaccagacacaatctatcttcgggtcggtagagctcggttataaggacatgctttacctcaccgttactggacgtaatgactgggcatcacaattggcctattccgaccaatcatcgttcttctatccatctgtcggcttatcggctgtcgtttcgaacatgaccaagctgcctgaatggataacctttgccaaggttcgcgcgtcttattccaacgtagcatccgcctttgaccgctttttgtcgaaccccagttaccactttaacaatcaaacccacttgtgggagaagtccaacgttgcaccattagcacacatgaagcctgaaaacactcgttcatgggagcttggtttgaacacgaagttcttaaagaacaccattaacttggatgttaccctctatcgctccaatacgtaccatcaaactatttatggaaagacaagcacgtcatcgctctactctgagcagattgtgcagagtggtaacgtgcaaaaccaaggtatcgagctatcattaggataccgcaatacgtttggcaggataggtgtttcctctgtcctcacatatactttaaaccaaaatgaaatcaaagagttgtcgaaggccagtgtcaaccagcaaggcattcctgagatacaaaaggcatatcttggtgccagttctgtcgctccgcaagttattttacgtgaaggaggttcaatgagtgacatttatatcaaacatgaactgaaacgagatccaaacggtagcattgccatcgatccctcttctggtaatttaagtatgcaggaggtggcacaacataaggctggccatttagctcccaactataatatgggttggaacaactctatctcctatcaaggcctcacgcttggctttgtgctttctgcacgcgttggcggactggcttactctgccacgcagggtattctcgactattatggcggttcaaaagctactgccgatgcacgtgataatggtggtattcccgtaaactttggcaaggttgacgctaagaaatactatcaaactatctccactgcagagggtggttatggtgcctattatctatatagcgctaccaatgtgcgtttgcaagagctaagtttaagctatgaccttcctaagaagtggtttagcaataagctcaacctatctataggcttattggcacgtaatctatggatgatttactgcaaggcgcctttcgaccccgaactgtcggcttctaccagcagcaactattatcaaggcgtggactatttcatgcttccttcaacccgcaacattggtttcaatgttaaagttcaattctaatcacagcatatccttatgaaacctataaaaagaataaccagcattgctctcctcatcttaggcttagcaagctgtacaagcaattttgaagattataacaccaatcattacgccatttataaaggtgatccttctgtattactcccagccatgatggagcctttgatgtttgtccagcaaaacaattcacaaatggtagaccaaatggtcggcgcattgggtggctatatgacctgttcaaaccgttggggcggccagaactttgacacattcaacgcctcagagggatggaacgccttaccctttaacatacccttcaaagggctcgttaacctctatagcattgaggaatcaacgcataaatcggggcattactgggcaatggccaccctattaaaggcagcagtgctcatgagagtagctgattgttatggacctattccatacagtagcattgccaatggtcagttcaatacggcctatgagtccgtagaggatgtttatacgcacatcattaccgatctcacctctgcagccaacacgctctatcagtatagccgccaatatccatcatcacgacccttggctgccaatgatttgctctatgcaggtgattacagcaaatgggcacgcttagctaactctattgccttgcgtgccgctgtgcgtattggcaaccaaacagcagcagagcaaatctgtaatagcgccgcggggctcatagatgccaatcaatacaatgcattaatgtcacctggcgtacaaggtaatccctatcaactggcatccaccagctggggcgacttgcgtgcaagctcatctattgtcgactatatgaatggttacaacgacccacgctgtagcgcttacttcacagcgtcggcattcgacccctcacgctacattggcatgcgaacgggcgaagcgtcgtttcagaagaacgatgtagccaactattcattgcccaagtttcaagctacttcaccattacccatttgcgtcgctgctgaggtttcgttcttaaaagctgaatgtgcgttgcgcggttggaacgttggaggaacggcacaagccttttatgagcaaggcatcaagctgtcgatggagcaatatggtgtagacgcagcaaccattcaggcttatatccataataacactgctatccctgacggacatgccaacgatccgcgcggctcgaagtataactatcaccgcaatacaacggttaagattgagtgggatgccgatggtagcgaccataatttggaacgcattattacacagaaatggattgccatctatcccatggggctcgaggcatgggctgaataccgccgcacaggattccccgagttagcaccgtctttggataatctcaatccacaagtcatcactaacacacagcgtggcatgcgacgcttgcgttatcccgatacggagcgcgaccttaacaagcagaactacgaagcggctgtagggttactaaatggcactgataacgaagcaacagacctgccatgggctaagagaaattaaatcaaagcacttgcttcgctgcagcctgtcgcaacagctttaaccgaagcaatgctcacattttatcaataaataacagtttatattatgcatcatattttcaaagcattaggtttgacaagtcttgtgctattgacagccgcatgtagcgactggacagagaccgaagcactacagatgacccaatacaccaacacggagatagcgaaaaaagaaacctactaccaagcgctcagagagtggaaaaagagtccacactccatatcgtttggatggttcggtggctggagtaatccagctgcatcaactacaaacatgctggccggactacctgattccatggatgttgtgtcattatgggacaactctaccaatctttcagaaggacaaaagcgcgaccttgagtttgtgcaaaaggtaaaaggcacaaaagtgttgtactgcagtttcaccagctatgttggacaaggagcaacgcctaaagcccacaatgccgacgaagctgcccgacataaattctggggatgggaagctggcaacactgaaaagcaagaagctgctgtgcgcaagtacgctaatgccattatcgacacccttagcaaatacaactatgatggcttcgacatcgactttgaacccaattatggctatggcggcgaactggcgagcaattatgaactcatgcatgtcttcatcaccgaactggcgaaacacattgggccaatgtcacctcatcccgagaaactgctcatcgtggatggagaaccgcaaacgcttctggccaagacggggcctttcatcagctattatgtcattcaagcttacttcgcgaaggaagggaatttagatggacgcttgctcaacggcatcgataagttcaagtctgtaatgagtgaagaggaaatcactaaccgttatgtcatgaccgaaaacttagagagtgccatcgattgcctgaacggaggatattcgtattccacccgtgacggacagcccaccccctatcgttcattagaagg

SEQ ID NO: 631 - DNA, 18370 bp, synthetic construct
  variation 2394..2402: note = n is a, c, g, or t
  misc_feature 1..18370: note = Synthetic
  variation 10088..10223: note = n is a, c, g, or t
  source 1..18370: mol_type = other DNA
  variation 14893..14975: note = n is a, c, g, or t
ggcacgtagagcgtctgctgcgggcctatcgaccagatgcgacccatggcgtgtccattcacataaacctggcccttgccccacgtctcgaagttcaggaaggtgtcgcccaccttcttcagtgtgaagtagccacgatggtagccaggcttcataaacgcagagagctttgcagattcctcataattgcgagtaacagctattcctggtgcactaccgctcatgttggatttggcattgaagtccttcaccatgtcgagtgctttttttgctgtctcgtagtcatcagggatggccatgtttgtccagtttttcggtgtcagcactatgtcagcatcggcagtttcggtgctcagcgtgacgttgcctacaatacccttgaagtccttgatggcgcggccgaaattgatgcggcccatgccttcaacaataatcatcagctcggcacccttcttgacggcaggaatggtgagcgacttctcattcttcactcggtctatcttgccaatgtattttccatcaataaacacctgcgcaaagtcatggaattcacctgacaacacactggtcgaggtgatttcgggcaaacgggtagaataaatcatcgtaccccagcccatgtccatttcttcaaaggtcttcaaagcgcccttctccatctttccgccttcggctgttgcggtcatcaaagtggcaaactccttcagctcgaacttcggcacggtcactattggcatcgcggctttgggcacggagggcagcttctttccatcgttgtacttctccatcatcgtgcgcagctcatagtatttcggggtggcctgaccatactcgttgatgggcgcatcgtagtcgtagctggtcacgtcgggggcaaagcctggactgttggcacctgcccagtggccgaatgaggtgccgccgtgagtcatatagagcgagaaggagatatttttcgagagcatttcgtccataccgtcaaccatcgccttggctggacgtgtctcgtggcgtgctccccacttgtcgaaccatccgctccagaactccgagcacatcagcggtgcattggggcgcaattgtttgagtcgctggaactgcttgtcgatgttggcacccgttccgaagttcatggtccatgtaaggtcgtcgagtccgtttttctcgaagttgctggcccagtcgcactggaagagtgccagttccttgccatagatgccgcgcaggcagtcgcgaatctccgatacatagggcttgtcctcgccatacgaaccgtattcattttccacttgtaccatgatgatggggccacccttctggatggtcaggggagcgagttgctcgcccactttctgctcgaaaatcttcacgcgctccatgaaatagggatcgcgttcgcgcagcttgatgtcttttttcttcaacagccaccaaggcagaccgcccatttcccattcggcacacacataggggccggggcgcacgatgacatacatgccattcttctgtgccaggcggcagaactcggccacgtcgttttggccagtgaagtcgaactgtccttcacgctgctcgtggatgttccagaagatgtagatgcacacggcgttcatgccgagcgccttgcacatcttgatgcggtgctcccagtaggggcgcggaatgcgtggataatgaatctcggcagctttcaccacaaaaggtttgccgttgagcaggaaagtcttttcgcccacggtgaacgtgcctttcttgttgttagctgcttgtaggggcatagccatagtgagcatggccaggatgagtgtgagtaatagtttgtttggtttcatgtttttcagatttttgttgcaaagataatatttttgaattaattttgcaaacgaaacaagcaaaacagaggatatgatcaatagtacgatgatgattggtttgctcattccgttgttgggcaccatgctgggctcggcctttgtctttctcatgaaggaagagatgtcggccgtagtgcaaaaaacgttgctggggtttgcctcgggtgtgatggtagccgcctcggtgtggtcgttgctcatacctgccatcgagatgggcgagagtgggggccgctgggcggtgcttcctgccgcagtaggctttctgctgggcatggggttcttgttgctcgtcgacgaactgacgccccacttgcaccttggcgccaaccaacctgagggaccgcgctcgcgactctcgcgtacggctatgttgtcgctggctgtcaccattcacaatctgcctgagggcatggccgtgggtgtggtgtttgccggggcgggtacgggcgatgctcctatctcgctggcggcagccgtagccgtgtcgctgggtattgccattcagaatattcccgannnnnnnnnggtgccatcatttcgatgcccatgcgtgctgccggcaactcgcggtggcgctcgtttatgataggcagcctgagcggagtggtggagcctctgggcggactggtggtcattctgctggcctcgctgatgacgcccgtgttgccttatatgctggcctttgctgccggtgccatgctctatgtggtggtagaggaactcatccctgaagcctcagagggtacccacaccaacatgagcaccatcggctttgccttgggctttgtgctgatgatggtgctcgatgtggtcatggggtaatcattactaatctaaaatacaaaacatctatggaaatcaaagctgtaaaattcagaaaagacggtttttatactcagcctttcgtcatgggtggcgaaggtggtgattttgatcagaatatccgctatcgcggcagtttgcagaattggctgattgacactggttcagaagttattcttgtagatacaggcatccccgcaggtacaccagaagaagttcccgatgagaactcgttcggttttactggcaaggacatctgcacatatatggaggccttcgaggctcttggatataagcctgagcaggtgacgaagatcttgctcactcaccgccatgcagaccacagtggagaactgaaaagcttcccgaatgcaaaggtctatgtgaatcaggatgagacagatgctgccgaactgcagggactaacaaacatcgtgccagtcacctacaccgatggaccatattacaacttccctgaggctcagaagattcaagatggcatctaccttatcaaggctaaggggcataccaagggcaacagcatcattattgtcgagaacgaaggcctgttctatatgcttcacggcgatatcacctatgtggatgaggctctctacgaagacaaactgtctgtggtctatgacgacctgccagccgctcgggaaacgcaggaccgcatacgtgagttcatccgaaatcatccaactgtctattgtggtactcatacgccgcagggctacgagaatttggaggccaaacgcgtgatggatctcgacaatcccgtgccgacaatccttgccgaggtggatttctcaagccagaaagccagcggtaagtatgtttgctccatctgcggctatgtctatgacccggccgagcacgacggcgtagccttcgacgacctgcccgacgactggaaatgtccccgctgcaagcgtcccaaggacaaatttaacaaggcatagcatacgttataaaaaatggaaaataaacaggcgtcccgttattactccggacacctgtttatttcctttatcactcggcatggattgccgacagctacaacagttacagttataaaaacaaaaaatccaccgttgaggacgatggatcaggacctaatgttttcacaacggaataatccttattgtgatttgctgatattagtatctgcacgcaaaggtaaaccaatttttcaattaaacaaaataaatcttatattaatatgaaaaatattttaggtcttgacttaggaaccaatagtattggttgggctgttgtcacatccaacgacaatacaaatgagaaacctcaagttgaattaggtagcagaattataccaatgagccaagatgtacttggtaaatttgatagcggagtcacccagtcacaaactgctgaaagaacaggatatagaggtgcgagaagaattcgcgaacgttatcttctgcgtagagaaagacttttcagagtattgcatattctcggatttctgcctcggcactttgaagaatctataggatgggataaaaacgacaataagacctatggaaaattcaaggatgactctgaacctaaactggcatgggatgatagtgataaaaacaacaatcactttatatttgttgattccttcaacgaaatgttagaagagttcaagaaaaaaaatccatcatttataagtagtgataagaaaataccctatgattggaccatgtactatttgagagacaaagctactcgtcaacctataagcaagcaggaactagcttggattatattaaatttcaatcagaaacgcgggtattatcagttacgtggagaagatgaagaggaaaatacaaagcataaaacagaagagtattacgaactaagaatcgacagagtagaagctacaaatgaaaagagaggaaatgacatatggtacaatatatatttggaaaacggatgggtttatagacgttcgagtcgaatcccccttgaggattgggtaggaaaaaagaaagaatttatagttaccacggaatacaatgaagatggaagtattaaattagataaagacggtaatgaaaagcgttcattccgagctcccaaagatgatgattggggactgcaaaagaaaaagacagaattccaaattgattcttctgaacagactgtgggtagcttcatatataatcatcttttagctaacccaactgaaaaaattcgcggcaaagttgttagaacaatagaacgtaaatactacaaacaggaactggggaaaatcttagctaagcagaaagatttcataccggaactctcaaactctgctcttcttgaacaatgcattcatgaattgtatgcaaacaacactgcgcatcaggatagtcttaggaaaaaagacatcaattatcttattatagatgacattattttctaccaacgtccgttaaagagcaagaaatcactaattgcagattgcccatacgaacagtatgaatatataaataaaaatacaggtgaaataaaaaaacaacacattaagtgcattgcaaaatccaatccttattatcaggaattccgtatatggcaatttattcagaatttacgactatacagcaacgacttagacaatacagatgttaccaaaaactatttaaagaacgaagaagattatgtccacctattcaaatatctgaacaacctaaaagaaatatcccaggaaacattattaaaagatttcttttcgattaagaagcccaaaggtaaagactctatatatcctgtcagatggaattatgtggaagacaaaaaatacccttgcaactctactcgctatcaaatgttagcagctttaaaggatgcggaaataccagacactctcattgataacaggaatacagaataccgtttatggcacctcctttattcagttgaagacagaaacgaattaatcagcgcattatgctcatttgccagagacaataaattgccagaatcattcgtagattgtttcaaaaagattccgtcttacaagaaggaatatggagcatattccgagaaagcagtcaagaaattactttccgtaatgcgggtgggaagtctctggtcagaagataatttacccaacaatatccacaacgtgataaatggcacaattgatgagaaagtaaaaaaacggatagaacacaaaggttttttcctttccgaaaaacaaagtttcagaggattgcccgaatggttagcatgttatgtagtatatggtaggcatagtgagacaagtgacatttcaagatgggaaacgccacaagatttagctaatttcattcacgatttcaaacaacactcactccgtaatcctattgttgaacaatgtatattggaaacccttcggactgttcatgatatatgggtaagacacggtcgtattgatgaaattcatgtggaacttggtcgtagcatgaaaagtactgccgagcaaagagaaagaatgtccaaaacaatcatccaaaacgaaaataccaatcttcgcatcaagaatcttctcttagaacttaaaaacgattcaaccataaaagatgtacgcccctactctccaatgcagcaagacttacttcgcatttatgaagagggagcactactgactctcaaacgcgatgataaagactataatgaaatttcccgtatttcaaaactttccgcccctactcagagcgaactgacgagatataagctttggcttgaacagagataccgttctccttatacaggcaaaacaatttccttatccaaactattcacacctgcttatcaaatagagcatgtgataccacaaggacgttatttcgatgattcgttttcaaacaaagtaatttgcgaagcagaggtaaaccaacgcaaatcaaacatgcttggatatgagttcatccaaaaatgtggtggagaaattattcattgtgcaaccttaggagatgtaaaagtattaacggcaaaggaatataaagattttgtgtcagatcattacgaccctaaatcatctaaggctcagaaactaatgatggatgatattccagaaacattcatccaacgacagatgaacgatactcgctacattagtaaagtaattaaaagtttgctatccaatatagttcgtgaaaaagacgaaattgatgcaatttcaaagaatgtcattccttgcactggtggcataacagaacgtctgaaaaatgactggggactcaaacatgtatggaatagcattgttgcgccccgttttatacgtatgaatcagctaacaaattccgaagctttcggacattgggaaaacaaagatggtaagcgagtattccaaacgactatgcctatagaactcgaaaaaggatttagcaagaaacgtattgaccatcgccatcatgctctggatgctcttgttatagctcttgcatcaagaaacatcatcagctatcttaacaacgaatcagcccgcgatacgaatcgaagagaagatttaagacggctgctttgcgacaaaaatcgaatcatacgaaaaccttggaatacttttactcaagatgcttatgtagctctccaaaacatcgtagttagtttcaagaactatgtccgcgtcatcaataaagccagcaactattatgagcactatgatgaaaacggcagaaaaaaacctattgctcaaaagggagaagaacaatgggctatcaggaaacctctacacaaagagactgtatttggacaagttaacctacaacgaaagcgcgaagtatcatttgcaaaagctatagagcaggtttcatgtattgttgacaaagatctacgcaataccatcaaatctatgattaaagcaggtatggatgaaagccaaatcagaaagcattttaaagcacaaaacaatatctatgcaggcaaatcaataaacaaggtcgaagtttactattatacagactctgttgaaccgatggttgctacccgcaaacttctggatgacagctttgatgaaaagaaaatacttagcataactgatactggcatacagtcaattttattaaactaccttgaagcaaaaggtaatgatcctaaattggctttttccccagaaggaataatggaaatgaatgaaaacatagcaaaatacaataatggaaaatttcatcaacccatcattcgtgtcagggtgtcagagccgaagggtgaaaagtataatattggaacaactaagaataaagccaagaaatttgtagaagcacaaagtggaacaaaccttttctttgcaatatacgaaacagaaaatggtaatcgctcatacaaaactattccattcaaccaagttgtagaacgaatgaaaatgggatggacacctgttcctgaaaagaacgagaatggagataagctaaagttttatctgtctcctaatgaactggtttatgtgccaacagaagaagaaaggatgtcaaactcaattaacatcaacaaagacagaatctacaagatggtttctgctacaggaaatcaagtattctatgttcgacataatatagcatctgttattgagaacaaagtagaattacaatcactaaacaaaatggagaaaacaatggaaggagaaatgataaaatccatttgttggaaacttgaagttgacagactcggaaacattacaaatatcatacgatgatcaaaaagacattatacttcggaaatcccgcatatctgtcgcttcgcaatgcacaacttgtagtaaaatcgccacaagttgaggaacgtcaagatctggcagaggatacaaagaaggacttagagcgaaccattccgatagaagatattggtgtggttttactcgacaataaacggataaccataacatcaggcgtaattgaagctcttgtggcaaacaattctgccgttatcacctgcgacagcaaaaatatgccaacaggacttatgttgcccttaataggaaacacactacaaaatgaacgctttcgagcacaattggatgcatcagtcccgctacgcaaacaactttggcagcagacgataaagcagaaaatcatcaatcaggaacatatcctgcacctatattcttctgccaagacaggatgtatgcggacatggagcactgaggtacgtagtggagacccagacaatatagaagccaaggctgctgcatactattggaaaaatgtctttgaagacttccctgactttgttagaggtcgagaaggtggaccacccaacaacctactgaactatggctacgcaatactgcgtgctatcattgcccgtgctcttgtaggcagtgggctcctccctactcttggcattcaccaccacaacagatataatgcatattgtctggcagacgatataatggaaccatatagaccttatgtagatgaagtggtgcttgacattattcgaacagaacgaaacatttcagaactgaatataaacattaaagccagacttctgaacattccagtaattgatgtcgttattgacggcaagcgaagtccgcttatgatagctgcaggacaaactacagcctcactctataaatgttttagcggtgaacagcgacaaataagctacccatctatggtttaacagctatgtttacagaccttactcggtttagcgaatacagagttatgtggatacttgttttcttcgatctgccaactgaaacgaagaaagacaaaaaagcctacgttgattttcggaagaatctgcaacgtgacggcttcacgatgtttcagttttctatatacgtgcgccattgtgcaagtaaggaaaatatggaagtacatacaaaacgagtccgctcttttctacccgagtttggaaaagttggaatactaagtatcactgacaaacaatttggagaaatagaaattttttatggtagaaaagcccaagcgcctacagcaccaggtcaacagttagaacttttttaaagtaaaaaatcctgctatagagcaggatttttcattgtcataaatctaatttttattttcgtcacacacacatctattctctgataaatagcaacttacaaagaataagttgtttatgacattacaaaggtactaatttgtcagcaaatcacaacagaatcagaaacttattgctgacaagaaatgttgtttatgacattacaaaggtactaatttgtcagcaaatcacaactaccgccacacgattgatgcagcggtagcggttgtttatgacattacaaaggtactaatttgtcagcaaatcacaaccaggttgatataactccaatctatgatgtgttgtttatgacattacaaaggtactaatttgtcagcaaatcacaactaagtgcgagactctctcgtctgaatggtgttgtttatgacattacaaagnnnnnnnnnnnnnnnnnnnnnnnnnnnnnnnnnnnnnnnnnnnnnnnnnnnnnnnnnnnnnnnnnnnnnnnnnnnnnnnnnnnnnnnnnnnnnnnnnnnnnnnnnnnnnnnnnnnnnnnnnnnnnnnnnnnnnnnnctaatttgtcagcaaatcacaacgtcatgctgcttttctgatttatccgatagttgtttatgacattacaaaggtactaatttgtcagcaaatcacaacagattatgtactgattatttcaataatatgaacttcgtggttgttgaaccaataatacacgattgggctgctttgcgatgtataattagctttcgtggttcaatatatttaaaatagaatgaacttcagagtccgaaaagattccactgttctctgattccagaagtattttttatgttatcctgcaaaaaaataaaatatgctatttactccgttttccggatttttcttatggaatgaatagcagcgagaactcaacatatttctttcactcaatggatttgacctttggtcgagtctgctcccgctcgtaaaagtcgatgcaaacaccgctctcctctcgctcaataggaatcttcttcataaactttcctaataaacagtgcaaaattagccataattcagcgattatcgctaactttgcagatacatttaagcacttttagaaaatcaaacaaatacgattatgaacattctgattttacaggcatctccgagagccaacggaaacaccgcttggatggcggaagagtacaagaacgctgccgaggcagcaggtcatcaggtgacactggtcaacgtgtcgcacaagaagattgcaggctgtctggcttgcgaatactgtcacaacaagggcaatggtgcctgcatccagaaggacgacatgcaggagctctacccgctgatggccgaggccgaggtgctggtactggcagcgccaatctattacttcacactcaacgctcaaatccaggctcctatccagcgtatgtactgcgtcaacgctccagccaaggtgaagaagatggctctgctgatgtcatcctattcgcctggtgtctatacaggcgcaacggctgagtaccacgacatctgcaactactggcacgctgaggacagcggtatcgtgactgccaagatagacgagcagaagaccgacgaaaccaaggctaagattcaggctattgtcaacaatctgtagatgaaggtacgcatcaccgccatccgccagacggtctatcccgacctgatggcgaaatacgaaaatcctatcgagcatacatcagtaaacaacgattattcgtaaacaataaaagacaagcagttatgatacttacaactacacaacagattgagggtcacactatccgcgagtacaagggtgtggtgacaggtgaaacgattatcggagcaaacttcgtgaaggactttttcgcaggcatccgcgacattgttggaggacgctccagcagttacgagaaggtgctgcgcgaagcaaaggacacttcgatgaaggagatgatggagcgtgcacaggctataggagccaacgccatcgtgggcattgacatcgaatacgagaccataggcgagaccaactctatgctgatggtggccaccagtggaacagcggtagttatataaatcggaatttagcaatatgacactcaaaatcattgatgaaacattttgtgtctgccaagtcgcagactaatttgcagaaccaatatcataatgctttcagcagtgattgaaattactccgctattaaaataataatactgaaatgaagatagaactattttctaacgaagattttgctaaagcctttcctttggcagcaggcgcatggggcgaattttatgccgatgaacggcattggtttatcaatgcagtagcagagtacatcctccgctataactacagcaatccctcgctggcattgaaagctgtgggcgatgatggtatgattcatggggtgttgtttgccaacttccatgatgacaaagcagatgtcagtcagtggcgcgagaacattgaggcacagatgaccgaccatgagcgtgaacgtttccgtctattggccgactatatgttggaggttgacgggaaaacggtacagtgcatgagtaacggcgaagtgaaactatcacttttcatcagcaatcagaaaggatgtggaaaaaagttgttgcaggaaatgatggataagttccggcacagagacctgaggcatctatacctttggaccgacaccagttgcacccacgaatattacccacaacatggtttcacactggtaagtcagttcctcagcgaggtctatgactcgtacgctcctggctataccacgtatatctataagaagggcatataatctgagcattatgaaagaatggttgttcttgataggtgccattgtcttagagacatttgccaccacgatgctcaaatactctgagcagttcaccaagatactgccaactgtcgcaatggcagtaggctatctgctttcgttctattgcttgagccatgccctacgcacactgcccatcggcatagcatacgctatttggagtgctcttggaattgtgctgattactcttataggtgttctcgctttcaaacaagtaccagacgttcctgcttacattggactgtcgttaataattgcaggcgttatcgtaatcaacctgttttcaaaaatagaagtacattaagataaatcggaatttatgagtaagataaatgcgtttaatcaacaaacaatatagtctttagcatattatgtttatgctttaatagatccgagagataataggattttctatataggaaaagggaaagggaataggatttttcaacatgcaaaagatgctttagacaataaagatcaaagtcttaaacttgatattataagaagtattttaagagaaggtaaacaagtaggtctctacattttacggcacaatctgactgaagatactgcgtatgttgtagaatctgtacttattgacctgcttacatatagcaaatttaacaagacaaatattttggcaaatattgtttctggtcatcatcaatgggacgagggtattaaagatgttgatgaaattgattcaatatacaactgtatgaaaatagaagtaaatcaaagggatacattgcttttagttagtctaaacaaaagttttgaccaagcaaaagccaatggagtatatcgcagaattgacatttatgaggctactcgcaagtactggaaaatcggcaagagtgcgcctcaaaagattaagtacgtgcttggtgtatacaaaggcgttgtccgcagcgtaatagaaataacatcttgggaatggacagatgtagcggaagatggtacgaagtttaagtctgaccgctgcatctttgaaggcaaactactcaatgattccacatatctcaacaaagatgtctctgactatccctttggcagtggaggagctgtaaggtacataagtaagtaaattccaatttataaaaatggatttgaataaaattatatttctgatgatgctttgcgtcccgatgttcgtgggagcgcagacgctgactttcacagaccacgagccgatgggcaacatgcggacgcaggtaactcggcagttcttccgccttgtagagcaggaaagcaaggggcgcatccgcattgaccaccattggaacggcgaactttcatcgagctatgatgcctacgagacggtgcgcgaaggcactaaagccgacatggctacggtagtacccgaatacgatagccagcggatgccactccaccagttgttcaagagtttcctggcaggaccctcgggcgaggcacaggtcgcacttatccgcaaagcctacaagacgattcccgaactgacagaggagctgcaccacgcgggcatccaccccgtgctggtagctacaggctatcccgtgggcttctatagccgagagccgatggcagacctcagtgcgctgaaagagcagacgtggcgaactgccagtttctggcacatcagttatctggagaatgcaggagcaacgaacaaacgcatcccctggggagagcaagtttccgattcgctgcgctccggagccatcgacggcatcatggtgaacatcgacagcggatgggacatcggtgcccaccgtgccgcccctcacctgttggtgtcgcaggaactttggttagggcacatctatttagtggcgatgaacctcgaccgatggaatgccctgcccccgaaggacaagcgagccatcgagcgtgcggcaagcaagacctacaaggcgatgggcaagacgatggatgagagttacgagcagatgcttcagcaactgagcaatgaaggctgcaccgtacgccgcctcacgcacgaggaagtgtccgatttcgtcaccaacgtccgtcagagcgaagtgcaggaacgatgggtgaaggaaaaagaatccgaaggcacggcagacgtccgccgcgtattcgagaagctccgttccttggtacaacatagtgcaaagaggaaacaatagaaaactacagttatgaatacggaactccaaaagagtatggataccgacaaggacaatcatatcatctactttggagaaatagtagatgcgtatgttttagaggataaaggagaacctgtgatttaatgcaagtctttgtaattcctgcaaatcttgatcttctgtttttctcatttttaaacgatgtttttattcaacgtttttcagggtaagacacaatgttacaaagttactttgtnnnnnnnnnnnnnnnnnnnnnnnnnnnnnnnnnnnnnnnnnnnnnnnnnnnnnnnnnnnnnnnnnnnnnnnnnnnnnnnnnnncgcatccaacgagagatgatcatacgcatggctggcatacgagttagggaaacggcttgttaatgctgcaaaataaaaccgcatacggcagtattgtacgtatgcggcaatataattgaaatcgaagtcatgctatcgcgtcagcctgatttcctcgtggtagaaatagttgaccacgacgggatggccatactctgagcgaccatagggcaggtcgttgatgacgtagggcatctggtgctccttcgtgtaggcttccacctgcagggcgagcgtctgccagtagtcacggcgcttgcgcttgtagatgtcgtcgtagagcggtagcaggtcgggatgctcttcgcggatgtactgcatgatggtgggcttgaactgtccgcgaaggttcaggttctccagccatacaaggtcagaataatccttaacacgctcgatgatggcaaagacatcggtaatgcctgggaagatgggtgacacgaagcagacggtgcggatgcccgactcatagacctgcttcattgcagccagtcgtcgctcgatgctgggcgcatcgtccatcgcttccttgaactgctcgtcgagggtgtttacagaccacgataccgtgacgcgcttgaacgttttcagcaggtcgaggtcacgcaacacgaggtcgctcttcgtggtgacgataatctcgcagtcggcaccctgtagctgttccagcagtgcacgggtacgcttgtattcagcctcctgctcgttgtagccgtctgtcaccgaaccgatgacgatgcgctcgccgtcgtacttgtgcggattggttatggcaggccagtacttcacgtcgaggaaagtcccccacggctcggtatgacctgtgaagcgcttcataaaagaggcgtaacagtacttgcaggcatgggtacagcccacgtacggattgacggaataaccgcccacaggcagcgatgactttgtcatcaccgactgcacttgtttgtcatttataatcataaccctgttgttttaatacttccttaaattcctgtggcaactcctgtaccatatttgcctcccccataatgggaacgaggtcttccttcatgaaaacgggaatgttcagccggtgtgcctgttctgtcaaattctccacccaactgacttccgacacggccttgcccttgcgcttacccgtttccgttcctatcacaatccagctaatgccgtgcaagtcaacctctccaatatcgttgaacatcggctcgaaggtgacatgcaggtgagttgaacctacattctcccgcaactggtcgatacgctgcttttccttcgaagaggtcaccgtgactccaaaccatccgttgtcgggtgtaactgacatgtgcagcaggtcgggccgtttactgagaaacagatattggtgctgcacgttctggtgcatcttgtcgaacaccagttcacgccattcgtctttccaccccgcgaggtcactcatgcctgtcagcagccagttgtggggcttcggattgcccatcagccgcagcttgccaggatagaattccggcacagagaaatcgtctgtaatgtggtagcgacgacaattgttgcgggcatagcaataactacagccgatattacagccaatcacaagattcatgttctgaatcaggtctttgatacaaacactcatcgtctctcgtttacttgctgacatttacgctctcaccgtcctcgggaatgtggacgcgcccggacactccatgctccctggcagcctgaaggagtgcggcacgggtgacgtgattgtggttcacgccctccaggtgggtggccacgaaggtggccttcggtgcgtagtccatcgtcttcagcacatcgggaatgtgcatgatgacatgccctcccacatgaaacttgttgccgccagcattgactatcaccacatcgggctgccagcggtcaaggttgcgacgcacaccactataccagatggtgtcgccagccagataggtcgtaggctccgcagggtgctggaacacatagccgcaggtgtggccggccttcggcagcatccaccagtggccgtgatggctctcagccttcgacagacgaacatcgcccagctgcatctcgccctcaatcactttcacctgcttgaacccatgcgacacgaccatctcacggtccagctcgtcctgcacgacgatgagcatttccttcggcagctgctcataagcggcatcgtctatgtggtcagtgtgcagatgggtcagcaacacgcagtccacatcccttaatagttcgtccaccgtcatcggcaggtcgtgaatcgggttgcgcaattcctgatggtgcgagaacgggaacggcggcatacagcccttttcgcccagcatggggtctatcagcatcaccttaccggcatactcaatcttaatcgtagcgtttctaatctgttgaatcttcatgttcttttctgtttttttgatttctgggtgcaaaggtacggcgaaatgttaaagatgtctataccagaacaacatgttgttatgccattttgataaatcacgcttttttcgtaccttcgcagccgaaatcatataaagaggtatggcaaaaacaacatacaggctcgtagaggtgcctttcagcaagacggaatgtggtgtagatttctttatcaacaccgcccatggcagtgagcggaggggcgtgctgacggaataccccgtgttcaagaccgattttttcgagatgttcttcttccgtaaggccaatggctatctgttgctgggctaccagaagatagaactgcgcgatggcatggtgctcatcctgaagccccaccagcagcaggaatggcacattgacgaagatgccctcgactacgatttccttatcttccgcaacgacttcatgcgtacgtttattgccgacaagttttttgtctatcgcctgcagtactgccagcagacagacacgccaccatacttcatggcaacagccgacgaactgacggaatacgaacggctgctgaagaaaatccgcagcgaactgcgccagcctgtagccgacagctaccatatcatcgtcagcgtgctctactatctgctggccgtcttgaaccgacgctataccgagacatatagtctgcccattgaactgccgaagaaccactacgctttcctgtttgtggagctgatggagcagcacatccgcgacctgcagcgtgtgcaggaatatgccgacctgctgcacgtcagccgggtgacgcttaaccagagcgtcatggcgcaatatggtgttccagccaccgtcctgctgaagcaacgcctgctggccgaaatcaagaacggactgttgttcagccacaagacggtcagcgagattgcctacgacttccacttctc

SEQ ID NO: 632 - DNA, 18257 bp, synthetic construct
  source 1..18257: mol_type = other DNA
  misc_feature 1..18257: note = Synthetic
agcagggggagatcttcatagggtaaagatacaaaaaaagaaagaattgacaaaataaaaaagaaaatagttttgcagaggtctcatttaatttcaaacaatcatgaaaacaaatttacttacgaacacgttcgcggcgacagtcgcgctgttcactgccctgtttgccctgccgcagacggcgcaggcgcagaccgacaacgacctctacattgccggcacgcaggtaacctccgccaactgcaacgacctcagcgtgattgagggcgtgagcggcacggtgaagtacgaccccgccaccaagaccctaaccctcgacaatgccaccatcaacgccggcggtaacaacaaaggcatcgaatcaagcattgacggcctcacggtgaagctcaccggcaccaacacagtaacggcgaattctgctgccgtctttcacacccagccgatgactatcaagggtagcggcacgctcaacgcagagggcacagctgcctccggcatctataccgaagaaacctcgctcaccatcgacggctgcaccgtcaatgccaagggggaatggggcatcgcaggaaatgacggctcctcggaaaccctcaccatccgcaacgccacggtaacagcagagggcacggtcgtctccatctgcgacctccggaccctcaccctcgacggctgcaaaatcacaagccccaccggagcggtgtggaacgccgaaaagaacgccgtgtgcgacgccgcgggaaatatcatcaccgacaaggtgaccattgcaccggttagcacctacgacctcaaaattgccggcacgcaggtaacctccgccaactgcaacgacctcagcgtgattgacggcgtgagcggaacgatgaagtacgagcactccaccaagaccctcaccctcgacaacgccaccatcaacgccggcggtaacaacaatggcatcttttcaaaaatcgacaacctcacggtgaagctcaccggcaccaacacggtaacggcggaatattcagccgtctttcacacccagccgatgactatcaagggtagcggcacgctcaacgcagagagtacaaataaccccggcatctataccgaaagaacctcgctcaccatcgacggctgcaccgtcaatctcaaaggcaaatggggcatcacaggaaataacggcgactcggaaaccctcaccatccgcaacgccacggtaacggcagagggcacggccggctccatctgcgacctccggaccctcaccctcgacggctgcgccatcacaaaccccgccggagcggtgtggaacgccgaaaagtacgccgtgtgcgacgcctcgggaaatatcatcaaatctaaggtgaccatcgagccgcaggttaccacctacgacctcaaaattgccggcacgcaggtaacctccgccaactgcaacgacctcagcgtgattgacggcgtgagcggaacggtgaagtacgagcactccaccaagaccctcaccctcgacaacgccaccatcaacgccggcggtaacaacgccggcatcgtatcaagcattgacaacctcacggtgaagctcatcggcacaaacacggtaaaggtgaacaaagcagccatcagccacaccctgccgatgaccattgcgggcggtggcaagctcaacacagagagcacaaacaacggcggcatctttgtcaagaatacctcgctcaccatcgacggctgcaccgtcaatgtcaaaggcaaatggggcatcgcaggaaatgacggctcctcggaaaccctcaccatccgcaacgccacggtgacggcagagggcacgtccggctccatctgcgacctccggaccctcaccctcgacggctgcaaaatcacaagccccgccggagcggtgtggaacgacaggaagcacgccgtgtgcgacgcctcggaaaatatcatcagagacaaggtgaccatcgagccgtcggttagcacctacgacgtggtgctcgaggcgcacaacaacaataaaataacctgcatcaaggtcgtccgcgaactcaccggaatcggacttaaagaagcaaaagatctcgtggaaagtgcgccctgcatcgtgcttgaaaatatcgccaaggcaaaagcagaagccgcacgcgacaaactcaacaccgccggcggcaccgccaacatctatctgcacggcacatggaagccaaccgccatcgaagccgtgacgatcgccgtgcctgccggcaagcgcggcgtgtataacctccaaggcgtgcgcctcggcgacaaccccgaccgcctgcccgcaggagtatatatatataatggtaagaaaatcatcaaaaagtaaaaggctcacccctgccccctcccgggggtgggggaaagcttttccctaagccctcaaagagagggggagagccggtgggcgacaggggctgtcgggaatactgtgccctaagacaatccccaaaaacgcatgaaagaaaggcggcctttgatttgttcctccacttccggatcgctcaaaccatgccaagtgcgcaggagttctatcttgaagaaaagaataccctcataagagaaacgtctcgttgaggagcttccttgcgtatagactttttcgatcaatcgggcaagaggtttccggtcgatgagttgattgatttgagcaaacgaatacatgttttgctttgcgatcggaaacgattgggtcggcaaaacaaagttgggagcaaacggagatcttcatggggtaaagatacaaaaagaaagaattgacgaaataaaaaaaggagatggttttgcagagggctcgacaaaggccaaacggccaataaaacggccgttttcaccctgttttttgttttttactgttttgcctccgcaaaatcgaccaacttgctgaatttcagcgagaaacttgcgaaggcaagtgaaggcaaaacgcagaagcgaaaaataacagcctgactgtcaatcacctccggtgaaggcaaaacccaccgtttgctttcacttgcttccgcaattatcggagtagaaacggcgaaacggaggaggtgaaggcaaaaatcgggttcatcaatctgatttacaaggcattgcgatttgttttttcgttttgccttcacttgccttcgcaagtttctcgctgaaatccagcaagttggtcgattttgcggaggcagtgaaggcaaaaacacaacataaggagatgcgcgcgcgtgcgcgcgcatgcgagagagcagcacggaggagtatggaggagcgagaagcggcatggcgcacaatgctcgaaatgccgtgtcggcgtgtcggcttgcggtgatcgctccgagcggtgaaaacgctgcatgggagaaaaaactttttgcatgggaagaaaatttttctacgttggaagaaaatttttcggcattggagctaaatcgctccgcctccccggtggaggagatcgggcaagaataggagaaccggccaagaaaaacgccggacaaaaaagagacgggagaaaaggcggagaggcattgaggaacggcttggcaacaaggaaaggcaaggaaaggcacggcgcggactacggataggggtgttttgacagctcaacctttcaaagaagacagttttcttctattccgttcaccgaaaagactttattttcattctaaaactcctttactggttgcttttttgctaaatttcggtctgaaatctcagtttttgaaaaaaaaacttttttctaagttttcttttttctatctttgaactgcaatcacgcgtgccacgcgccgctgtgaacggaattgttgtttttcgacacacttattttgtttttataaccttaacctcgccctcgtctatgcctttcctcaaatttgataaaacgcaaatgaccaacctgcaagagtccctcatgaaggaattcttgctcaccaacaagtcgggcgcatattgctcctccacgcttgtgggctgcaatatccgcaagtatcacggtctgttggtggtgccggtagaaaatatcgacgacgaaaaccatgtgcttctttcttcgctcgacgaaacggtaattcagcacggtgcggagtttaacctcggacttcacaaatatgtgggtgagaattacagtccgaaaggtcacaaatatattttgagtttcgagtgggacaaagtgccgacttggatttatcgcatcggcggcgttttgctgaaaaaggaaatgatgttcagaggcgagcgcgaccgcatcttcatccgctacaccttgctcgaatcgcactcgcccaccacgttgcgcctgcgtccctatttggcgtttcgcagcgtgcggcaatggacacacgaaaacggcgtggccgacacgcgatatgccgaggtggaaaacggaatccgcatgaaactctatgacggctatcccgatctctacatgcagctcaacacgggcgaggcggtatatcggcatcaccccgactggtatcgcggtttggactaccccaaagagcgggagaggggatacggagaaacggaagacttgttggtgccgggatattttgagatgccgatcaaaaacggtcagagcatcatcttcacggcatcgctttcggagcgcgacccgaagacctatgcccccattctcgacgaagaaatcgagaaacacgactcgcgcgactctttctatcactgccttgtcaatgcggcacaccaatttcggcagcaaatcaagggtgaggaatatctcgtggcggggtatccgtggttcaaagcgcgcgctcgcgacatgtttatcgccatgcccggcctgacgctgtcgatcggggagatcgaccaattcgagaaatacatgcaaacggccgagaaagccctcgacgacttcatggaggggcgaccgatcggcgtgcagatctacgaagtggagcagcccgacacgttgctgtgggccatttggtgcattcagcaatatgcaaaattcgtggggcggcggcagtgttttgaaaaatacggcggcctgctcgccaaaatgatgcgcttcatctttgagggcaaacatcccaatctctttgtgcactcgaacggattgctgtatagcaacgggcgcgaccaagccgtgacgtggatgaactcgcaagcctacggccgccccatcattccgcggtcggggtatatcgtggagttcaacgcgctctactataacgccaaaaagtttttcagacagatgctcacggacagcggcgaaaagagcaacctgctcatcgccgaacacatcgaggaggaatgcaaactgctcgaacagtctttcaagcaggtctttctcaacgaacacggctatcttttcgactatgtggacagccacgcggccgattggagcgtaagacccaaccaattactggccattgcactcgactactcgccgctcgatcgcaaggagcgcaaaagcattctcgatttcgtcactcgcgaactcaacacgcccaagggcatacggtcgctttcgcccaagagcgatggctacacgccctactacgtggggcggcaagatcgccgagatcatgcctatcatcagggcacggcttggccgtggctgacgggtttttatctcgaagcctatttgagcgtctacaaaatgagcggcgtcaattacatcgaacggcaactcatcgggtttgaagaagagctttactatcactgcgtgggcaccattccggagctgtttgacggcaacccccgcttttcgggacgcggcgccatctcgtttgccatgaacgtgagcggcattttgcgcgccatccgcctgctcgaacaacccaaaacagaatcataacacatcccccgaaggcggcacggcaaacggactgcgaaaagattgccgccacagagatttctccgcccccgttggcagccgacggctgcgcagcgagccataaaccttgaaagaaaagaaaacacctctatgaaagtactcatgtttggttgggagtttcccccacacatcctcggcggattgggcacggcctcctacggcatcaccgcgggattggcacaacagtctgacatggacatcactttttgcatacccaaaccttggggcgacgaagacaagagcttcatgaacatcatcggactgagcgaaacgcccgtggtgtggaaagacgtgaactacgactatgtcaaagaacgacttgccgggaagatgtcgcccgaacaatactatgccttgcgcgaccatatttatgccgatttttcctatcgaaatgtcaatgatttgggatgcatagagttttccggacgctaccctcaaaacctgcacgaagagatcaacaactattccatcgtggcgggcgtgatagcccgacaacaggattacgacatcatccatgcacacgactggctgacctatccggcaggcatacacgccaagagcgtgagcggaaaaccgctcgtcatacacgtacacgcaacggacttcgaccgttcgagaggacaggtgaacccgacggtctacggcatagaaaaagacggcatggatcacgccgattgcatcatgtgtgtgtcggaactcacgcgccgcaccgtcatcaaccactatcaccaagacccggccaaatgtgtggcgatgcacaatgccgtctatccgctcgacaaggaaatacaagacatcattgcacaacggcgaccggcggccgaacgcaaagagaaagtggtgactttcctcggacgcatcaccatgcaaaaagggcccgaatatttcgtggaggctgccgccttggtgctgaaacgcacacgaaacatcagattttgttttgccggttcgggcgacatgatggaggcgatgatagacctcgccgcacaacgcggcattgccgaccggttccattttccgggatttatgaaaggcaagcaggtctacgagacttttcgcgactccgatgtctacgtcatgccctccgtttcggagcctttcggcatctcgcccctcgaagccatgcagtgtggtgtgccgtcgatcatttcctatcaaagcggttgcgctgaaattctcaacaagtgcatcaaaaccgattattgggacatcgaagccatggccgatgcgatgtattcgatctgcacgaacgacggtctgtacgaatatctgcaacacgagggcaaaaaagaggtagatgccatcacatgggaaaaagtcggacagcgcatacgacgatgctacgacgaaaccatagcccgatattattgaataacaacggctgaaacaaccaacttcttctccacttccccaaaaataaagcccgctcatgaaaaccatttgtctatattttgaaattcaccaaaacattcacctcaaacgttatcgttttttcgacatcggtacggatcactactactatgacgactacgaaaacgagcgttcgatcatcgaaacggccgaaaacagctatatccccgcactcaatgcactcatcgaaatggcacaccgctatggggactacttcaagtgtgccttctccctgtcgggcacggccatagaactgctcgaacaatacagtccggaggtgctcgaactactcgatcagctcaacaaaacgggatgcgtggagtttctggccgaaccatacagccacggattttcgtccatcaaaaacgaagcgtgcttcaaagacgaagtgaaacgactgtctgacaaaatcaaaagtttgtttggaaagacgcccaaggtgtttcgcaactcctgcctgatgtattccgacgacatcggagaactcgtcggacaaatgggcttcaagggaatgctggccgagggagccaaacattcgctcggatggaagagccctcacttcgtgtatcactgcaacagaaacccgaacctcaaactgctcctccgcgacccctccctttcggaagacatcagtttccgcttcaacgacagctcgtggagcgaatatccgctctttgccgaaacctatgcgcaatggatcgacaacctgcccgaagacgaacaggtgatcaatatcttcatggaactctgtgcgctcggcatgtttcaaccgctttcgagcaatatcctcgaatttttcaaagcacttcccgaacaactccgaaatcgcggcatttccttctcgacaccgtccgaaatctgcgaacgcctcgacagtgtggggccgatacacgtggaatttcccacgacatgggtcgatgaggaacgcgatctctcgccgtggctcggcaatgtcatgcagcaagaggcactcaacaaactctattccgtggccgaccgcgtacgcattgctcgcgacaaaaaactcatgcaagactgggactatctgcaagcctccaacaatttgcgattcatctcgacaaaagccaacagctacggaggttatcgaggcatatattcttcgccgtatgatgctttcaccaattacatgaacatcctcggagattttatcaatcgcgtcaatgacctctatcccctcgaaatcgaaaacgacgaactgaacgccttgctcaccacaattaaaaaccaaggcgacgaactgatgatgaaaaataaagagattcagaaactcaaaaatctcatcggacgtttggaaaaagaacgcagacaggaagacgccgaggcgacccaaacagacaaaacggccgacaaaacagccgaaaccggaaaaactccgaaaaaagcggccgcaactcctgccaaaaaatcaaaaaaagcgacaaaaaagaaataacagccgcttttgatgaaaaagaatgacaatggacaacaaagcatttcgccgctactcccccgaaagagtggcggcgaaatgctttgcacagtgctttgtcctgctgtttgaaaagcacgaaaagaacatcattcgcctcgccgaaaacaaaattttcctcatcgacaagaaaaaagcaggcgaaaagaaaagccggccgaaaacacaaggaaaaaataaagaaagatttagaaaattgaacaaaaatgatttaatttgcaaatctatttcataaaaacacaaaacaaaatcccggtagagcaaaaaaagaaggcgagttgccccgccttaattgtaaaacacaacggaataatccttattgtgatttgcttaaatcagtgatgcaaaaatagcgtattattttatattgtccaaataattacaagaaaaaatgaaaaatattcttggtttagacttgggaaccaatagtattggttgggctaaagtctcttttgacgaacagggtaaacccgtcggcgatattcgtttgggaagccgaatcatcccgatgtcgcaagacgtgatgagcgattttgaaaaaggtgtcaccaattcgggggcaaaggaacgcacgagctttcgttcgatacgccgattgcgtgaacgttgcctgcaacgacgcgaacgcttgtttcgagtgctccacacgctgcgcttccttcccgaacatttcgacgccgcattgggttgggacaaaaacgacaacaaaacatacggcaagtttctgaacggcgaagaaccgaaagtggcatggagaagaggaaaagacgggaaaatggaatttatcttcatggaggcatttgaagagatgctggccgactttgtccatcgcagtccgaaatggaaggcgggcaccaaagtgccgctcgactggacgctctattatctgcgcaacaaagccttgacgcaacaggtgagcaaggaagaattggcttggatactgctcagcttcaatcagaaacgcggatactatcagttgcgcggagaagaggaggaagaaaacgtgcaaaaacgcgtggagtttatggaggccgtggtggtgaaagtggaagccgaagaggcgaaaaaaggcaaagacacttggtataacctccacttggacaacggactggtctatcgcagaacgagcaaaactccgcttgaaagcatcgtcggacaaaaacatgcgtttatcctgacgaccgaatacgaaaaagacggcgtaacaccgaaacgcgacaaagagggcaatgacaagtattcgatcagaatgcccaaggaagatgactggacgttgaaaaagaaacgcaccgaacacgatctgaaaaacagcggaaagcacgtggggacgtttatctacgaacaacttctggctgaaccgaccacaaaaattcgtggcaacttcgtacacacgatagagcggtatttctacaaaaacgaactgaaagccattctcgaaaaacaatgcgagtttattcccgaactcacggataaggccatgttgcatgcttgtgccgaggagctgtatgcgcgcaacttggcacgaaaaaagagcttgtgcgaaaaagacttggtttacctgttgatcgacgacctcatcttctatcaacggccgctgaaaagcaaaaaggggttgatcgacaattgtccgtatgaaagctattcgtacgtggacaaaacgaccggagagatcaaagaacagcccatcaagtgtgccgccaaatcaaatccttattttcaagagttcagactgtggcagttcatcggtaatcttcgtctgtttgaccgcacgacggaggcggaagtgacgtcccaatatctcgcaacggaggacgactacgaacgcttgtttgtatacctcaacgaccgcaaggagatcaagcaggaaaccttgttgaaagagtttttccaactcaaaaagccgaaaggaaaagacgccgaataccccctgcgttggaactacgcggaggataaagaaaaggtatatccgtgcaacgaaactcgcgcggccatatttggcgcgttgaaaaaagccggccttgatgcaagcctcatcgacacaaaagaaaaagaatatgcactttggcacctgctctactccgtggaagacaagctcgaattggaaggagcattgcgcaaatggaacttgggcgaagatttcgtgcaggcattcgcgcgtttgaagccttttgaaaaaagctatgcggcttattcggaaaaagccattaaaaagctattgaccttaatgcgccgaggcaatcgctgggcggcagaaagcatagatgtcaaaacacaaaagcgaatcgaagccgtcatcaaaggagatatagaggaaaagctcaaagcaaaaatcggcaaatatcctcttcctttgaaacaaatcgatgatttcaaggcacttcccgtatgggtggcctgctatattgtatatggtcgccacagcgaatcgggaacaatagaacattgggagaaaccggaaagtttaagagcttacatcaacggtttcaaacagcactcactgcgcaatcccattgtggaacaagtggtgctcgaaacgctccgcaccgtacacgatatttggaaagaatacggacagatcgacgaaatccacgtagagatgggacgtgacatgaagaaaacttccgccgaacgccaaaaagatacgaagaaagtactcgaaaacgaaacgagaaacatgcgcatcaaatatctgcttgccgaactcaaaaacgacagtaagatagaaaatgtcagagcttactcgccggggcaacaagaaatcttgcgcatctatgaggagggagcattggccaatttgaaagaagatgacaaagactacgacgaaatcagcaaaattgccaaatcggcacaccccacctctgccgaactgacgcgctacaaactgtggctcgaacaaaaatatcgctctccctacacgggacgtcccatttcgctcagccacttgtttacaacggcgtatgaaatcgaacacatcattccgcaagcgagatactttgacgattcgatgagcaacaaagtgatttgcgaaaccgaaatcaatcgcgaaaaaggcagcatgctgggctacgagtttatcaagaaacgcggcggagaaatctttcactctccgatattgggagatttgaaactactgaaagccgatgactacgaacgatttatcgaagaccaatatcaaggacgagagcttcgcacgaagaaaaagaagctgctgatggaagacattccggaggactttgtgcaacgacagctaaacgacagtcgccatattagcaaattgatcaaaggactgctgtccaacatcgtgagagaagaaggcgaagaagaggaaacatccaaacatctcattccctgcaacggtagcatcaccgaccggctcaaaaaagattgggggttgaacgatgtttggaacagtttggtttaccctcgcttccaacgcctcaaccaactcaccaattccgaagccttcggctattgggacaagaaagacggaaaacgcgtgtttcaaacccagatgccgcttgaactccaacagggtttccgcaagaaacgcatcgaccatcgccaccacgccatggacgctctcgtcatagcctgcacttcgagaaacatcgtcaatttcctcaacaacgaaagtgccaaagacacccaaaggcgagaggatttgcgcagactgctttgtgtgaaaggacgccaaatccgcaaaccatgggaaacattcacacaagatgcggaggcggctctccgtggaattgtggtaagtttcaaaaacaatatccgcatcctcaacaaagccaccaacagatacgaacactacgacgaagagggaaagaaaaagcttcgcacacaaaagggtgaggcaaaagctgtaagaaagcctttgcacaaagacaccgtatacggaaaagtaaacttgaaacggaaaggaacagtgacatttgccaaagctctcgaaaatattcccgccattgtcgataaagatttgcgccatcgccttctcgaactttcgcaacaaggatacgacaagaatcaactacaagcctatttcaaaaagcaaaattaccaattcaaagagcgcgatgtcaccaaagtggagatttggacttttagcgatgacaaagagcctttggtggcaactcgaaaggccgtggatactactttcgacaaaaagacaatcgaaaaaatcaccgatacgggtatccaaaagatcctgctcaatttccttgaatacaaaggaggagatccggccttggctttctctccggaaggcatcacggagatgaatgcgaatattgcatcgttcaacaacggcaagcctcatcaacctataaagaaagtaaggttgtttgaacctttgggacagaaattctgtgtcggtcaaaaaggcaacaaaaagagtaagttcgtagaagcccaaaaaggcacaaacctttatttcgccatctacgaagactccgagggcaaacgccactatgccaccattcctttgaacgaagtgatcgaacgattgaaacaaggactttctcccgttcccaatcagaatgaatcgggagttcctctcaaattttggctttcgcccgatgatttggtctatgttcccacacccgaagaacaggatagtcaaacggacattaagaaattggacaaatcgcgcatttacaaaatggtgagttccacggggaaaagctgtttgttcgttccccatatcgtgacaaaagccatacaaaacaaagttgagtttgaagctctcaacaaaatggaacgtgccatacatttggaagcctattgcgcggagaaactcccggtaaaccttccggaagctcctatgatcaaagctgtttgttggaagctcgaagtcgatcgtttaggcaatattctcaacgttatccgttagttctatgatcaaacgtactctttattttggcaatcccgcctatctttctttgtcgaaccgtcagctcatcatcagaagacctgaaatcgacaaagagggtgagagcggacaaaccggccaagaggaatgcgtggtctctcgcccgatagaggacattggtgtcatggtgatcgatcatccgcaaatcaccttcaccaatgcccttatcgcggcattgctcgacaacaactgcgccatcatcacctgcaacgctcgaagaatgcccacaggcttactgctccctctggccgtcaacacgacacagtccgagcgttttcaatgtcagatcgaagcttctcagccccttaaaaagcaactttggcaacagaccgtcaaacaaaaaatttccaatcaggcggccgtattgaagcagatgaccgacactgaaacccgctgcatgttgaaatggtcgcaagacgtgcgcagcggcgataccgacaatttggaaggcagggcggccgtatattattggaaaaacatctttgtgcgcgaaatcgacaattttgtcagaggtcgcgaagaggctccgcccaacaatcttctcaactacggttatgccattttgcgagccgtcgtagcccgcgcattggtgtccagtggcatgctgcccactttgggcatccaccaccacaaccgctacaatgcctactgcctcgccgacgacatcatggagccctatcgcccctatgtcgatgcccacgtgctctcatgggtgcgaagcggggtttcctacgaagaactcaccaccgacatcaaggcatacctcttgcaaatccctacgctcgatgtttgcatcgacggcaagcgcagtccgctcatggtcggtgtgacacagacaacggcatcgctctacaaatgcttcacgggcgaaatgcgtaaaataagttatccgcaaatgtaaatcgtcgatggatcgtttcagtgaatatcgtgtcatgtggattcttgttctttttgatctccccacagaaacgaaaaaggagcgcaaagccgcagccgactttcgtaaggatttaatcaaagacggctttacgatgtttcagttctccatctatatccgtcattgcgccagtgtggagaatgccgaagtacacatgaaacgcgttcgggcactcatccccgaacacggcaaagtttgccagctttgcatcaccgacaagcaattttcgaaaatagaaatcttctacgggaaaaagccggagaagccaaaattgggccccattcaattagaactgttttagcgtaaaacctccatttcgccgacagcatcaagaagtctttttccgatgcctcaaatgctctcctccgacagtttccgccacagcggtttcagtccatttattttgatttcctcccgacgattgtcccaatagcgtttggtgcaaccggcggaagtatgctttcctccttttcgtaaaggaatcagaacagccgtattgtcacttcgtcatctcgaaaaatgtttgtatttttgcacaataagcaagtattcggaatgaacgacgattagaattgatgccgttttgcgtcggtctgccgtcaaaaaaagcgtgcaatgtaaggcacgcgaacgacgtccgaggccgaaatcggctcgcgcgagagaggcagagagaccgtaaagccgacgaagaacgcattttccctcaaacaacaatgtgcattcattttgaatacctgtttgccattaaccccacagctctttaagactttaagacaagctcacaactatgtttgataatctcagtgaaaggctcgaacgctctttcaaaatactgaaaggtgaaggaaaaatcaccgaaatcaatgtcgcggaaaccctcaaagacgtgcgtcgtgctttgctcgatgccgacgtaaactataaagtggccaaaaacttcaccgacacggtaaagcagaaagccctcggccaaaacgtgctcacagccgtcaagccctcccagctcatggtcaagatcgtacacgatgagttggccgctctaatgggaggagaagccgccgatttgcgcctcgaacaccgcccctccgtcatcctcatggccggattgaacggagccggtaagaccacgctctctggaaaactcgcactcttcctcaaaaccaagaaaaaccgccgtccgctccttgcagcttgcgacacctatcgccctgcggccattgagcaactccgtgttttggccgagcaaatcggtgtgcccgtcttcatgaatctcgaagagcgtgatccggtcaaaattgcccttgacgccattcaagaagccaaggccaaaaactacgacacggtcatcgtcgacaccgccggtcggttggccgtcgacgaggcattgatgaacgaaatcgcagccgtcaaagccgccaccacccccgacgaaaccctctttgtggtcgatgccatgacaggacaagacgccgtaaacacggccaaggagttcaattctcggctcgacttcgacggcgtggtgctcaccaagctcgacggcgatacccgtggcggtgccgcactctctattcgcgccgtcgtagacaaacccatcaagtttgtcggaatgggcgaaaagatggatgcgctcgacgtcttccacccctcgcgcatggccgaccgtattctcggcatgggcgacatcgtcagccttgtcgaacgggcacaagaacaatatgacgaagaagaagcgcgcaaattgcaacgccgcatccaaaaaaaccaattcgacttcaatgattttcttgctcaactccggcaaatcaaaaaaatgggcaacatcaaagacctcgctgcaatgatccccggagtaggaaaagccatcaaagacgtagatatcgacgatcgcgcattgctcggcgtcgaagccatgatcttgtccatgaccccctacgaacgcagtcaccccgaagccatcaacacatcgcgaaaaacacgcatcgcgaaaggttcaggaaaaaccgtgcaagatgtaaaccgactcctcaaacaattcgaccaaacccggaaaatgatgaaaatggtcaccggcggaggcatgaagcaaatgatgagccgtatgcccaagggatttcccggcatgcccaaactctaaaatgatcatacgcgagtacacggatcgaatgcaccacgcggagcatcgacacgagtactcgctttttccatacccacctccatcggagcacaccacacaaccctatccccctcttttttcaccctaaacgatcgtcttaatttatgcccctactcatcgacggaaaagccaccgcagcccaaataaaaagcgaaatcgcccaagaagtggccaccctcgtggccgaaggccgcaaacgccctcatcttgccgccgtcctcgtcggaaacgacggaggcagcgaaacctatgtcaaaaacaaagtccttgcctgcgaagcctgcggatttgagtctaccctcatacgttttgaagacaccgtgagcgaaaccgaattacttgcaaaaatcgacgaacttaatcgcgacgaaaacatcgacggcttcatcgtgcaacttcccctacctcgccacatcgacaccgacaaagtcatagaagccatcgaccaccgcaaggacgtagacggtttccacccgatcaacgtggggcgtttggccattggcctcccttgtttcatcagtgccactcctttgggtatcctcactctcctgcgccgatacggcatcgaaactgccggtaagcattgcgtagtggtcggacgaagcaacatcgtgggaaaacccatggtgcagcttatgcttcaaaaagagcacggcaatgccaccgtgacctgcatacactcctacacccaagacgtggcagccgaatgccgcaaagccgacatcctcatcgccgccatcggtcgtcccggctacatcacggccgacatggtcaaacccggagccaccgtcatcgatgtcggcacaactcgcgtgcccgacaattcgcgcccttccggttttcggctctcgggcgatgtcgatttcaacaccgtcgctcccatagccggtgccatcaccccggtgcccggcggtgtgggaccgatgaccatttgcatgctcatgctcaacaccctcgcagcaggtaagaaaacctactatcgctaaaccaaaatgagcttcggccggtgccgcagaaaaagctctcccttttcgcagtgatgaagcgaaccgaaaaaggagagggcttttcattttcgccttaacctcttccccacaaatcaccgacaaagagcacctctgctcatatatggtttgcgacatatccgggactttttctcgccgactcttctttttgcccggaattttcattcggatttaccctttgcctgcccgatgacagccgctcgggaaacgaagcggtttaactccaacgcagaaaaactgtcggctctatcacgttttaaggggcttttgcagaggtctcataaaagcaatcgttaagcttttggttctttgatccgttgcctcttccaagaaaaatgtttcaaaaagcggcttaatggtcaaatgtactcctgaaagggggcataatgctctctttttcatacctttggaggtgtttataatgctataatggaatatc

SEQ ID NO: 633 - DNA, 18130 bp, synthetic construct
  source 1..18130: mol_type = other DNA
  misc_feature 1..18130: note = Synthetic
accttcaaaacacgaggagaaaatgattgcctacttgcaggaatttgctcagaagaacaatcttgccttcaaaaccgacgaagctggcaatgttttgattgcaaaacctgcaacaccaggtatggaaaacaaggagacaatcgttattcaaggacacatggatatggtttgcgagaaaacaagcgaccgtgtgattgactttgcgaacgatccgattgaaacatatattgacggagagtggatgaaagccaaagggacgactcttggtgctgatgacggaatcggtgttgctttggctatggctgtccttactgacgactctatcaagcacggtcctatcgaatgcctgttcacgcgtgatgaagaaacaggtcttacgggtgctttcgccattcaaccaggattcatgacgggcaaatacctgattaatctcgacagcgaggatgagggtgaaatctttataggatgtgcaggtggtgtgaatactgagattgagttcgaatactatgcagaaagcattcctgagggctatacggcagtcaagattgtgatagacaaactgacaggaggtcactccggcgatgatatcaacaagaaccgagcaaatgcaaataagctattggctcgcttcctatatcagatgaacaacaagtacgacatcttcctgtgctgtatcgatggtggaaacctccacaatgcgattcctcgtcatgctgaggctgtgattgcaattcctgaggcacagaaacatgaaatacgaagcgatttcaacatctttgctgctgaaattcaggatgagtatcacacaaccgaacccaatgctgaattcacaatggagagttgtgagttgccagaaaccgctattgacaacatcacagcaaccaatctcatcgcttcgctcaatgctgttcataatggtgtgtacgagtggagtcaggacattcctcacttcgtcgagacatcatccaatcttgctagcatcaagatgccagaagagggtaaaatcaagattgtgaccagtcagcgcagtagcaccaagagccagctcgattgtgtttgtaatgtggttgcatctgccttctcactcgctggtgctgatgtgctcatcaacgaaggttatccaggttggaaacccaatcccaactcaaagttgttgcagctgtctgttgagaagtataaggagttgttcgataaggaaccaaaggtacgtgccatccatgcaggcttggaatgcggactattctccgaaaaatatccaggacttgatatggtcagcttcggccctacccttcgcggcgtacactcgcccgacgagcgtctgctcatccctacggtcgaaatggtttggaaacaccttgtagccattatcgaaagcctgtaaaattggttattgtatagattacaggttattgagcgataaggaacgattattgagcgataaggaacgattattgtgtaataaggaatggttattaagcgataaggaacgattattgagcgataaggaacgattattgtgtaataaggaatggttattaagcgataaggaatggttattaagcgataagggatggttattggaaataaatcgtgggttattgttgctctcatgctcataagcatgggggcaactgctcagaccctgcgcagacagacaaacatcagccgcatgggaattcctccaggcaactatagtggtatcacacgcatcaacgataccctctatgcagttgtaaatgataaggagaaaaccgacggattccatctctttaccgtcaacatcaatctgaaaaacgggaaaatcaagcacgtttccgacaagatggttgggtcgcaaacacccgcgagtcacgatatggaaggtatctgctatcgatcatcatccaactcgctattcatttccgacgaaaccagtcagcgcatactcgaatattctttggatggcatccctacgggcaacgaattgaaaataccagagatctacggcataggtcaaatccaatcaaaccgaggtttcgaagcgctcacctacaacccgtcaaccggccatttctggacagcaacagaatctgctttgaagcgcgatgcagacagcgaacccctactggttcatctacaaagctttggcgacgatctccaacctgacggacactacctctatcgcctcgatcctccacgaaagaatcgaacggctcgcacaaaattctatgcacacggtcttccttcacttatcgcgatggacgacggtagtatcatcgtgatggaacgcagcctatatagtccgtcaaaactaatcggctcgttcgtcgagataaagctttatcgcatcactccccaagcattcgaagcggcaggtaaagatgccacaaaagtagtcgataagcaactcgtcaccagtttccgcacccacatccgcatcggaaaaatcaactatgccaactacgaaggaatgtgtatcggtccgaaactcaatgatgggcgaacaaccattatcctcatcaatgactcccaaaaccgcatgggcaactggctttgtcgtctgaaagactacctcaaagtcatcatactttaatcatttctttctgtataaaactgaaaaaggctcaaggaacacccctgagccttttctatgaaacaagctatgcagttacacgtactcctgccaactcttgatttgcaggtcttcgagactcttctctgtgaaggcttcgatgaaggccttagcaagtcgggcgttggtcatcaatgggatattgtggtcaatagctgcacgacgaatcttgtagccgttggtcaactcgcgcttcgtctggttcttcggcacattgacgatgagttcgaagcgatgctgagcaatgaggtcgagcacattctcgccttcctcatcaggccaagcaactgctattgcaggcactccgttctcattgagatacttagcggttccgtgagtaccatagatgtcataacccttcgtatgaagtgtcttacatgcatctaggaggtccatcttgccgcgtgcgccacctgaagagatgaggatagacttcttaggcagacggtagcctgttgcgatgagggcgttgaggagcgcttcgttcatatcgtcgcccagacagcccacttctcctgtactgctcatatctacacccagcacagggtcggcattctgcagacgtgcgaatgagaactggctggctttcacaccgatacggtcaatatcaaactcgctcttgtcgggcttcgtgtaaggagcgtcgagcatgatgcgtgtagctgtctcgatgaggttgtgcttcagaatctttgaaacaaatgggaacgaacgcgaagctctcaggttacactcgataaccttgacggtctgtccctttgccagatactgaatgttgaacggtccggagatgttcagttccttagctatctgacggctgatcttcttcaactgacggatggtcgagtagtagatttgctgagcagggaataccagcgttgcatcgcctgagtgtacgcctgcaaactcgatatgttcagatattgcatattctacgatttcgccttgttgagccacagcgtcgaactcaatctccttggtgtcttgcatgaattggctgacaactaccggatagtctttgctgacctctgttgccatattgaggaagcggtcgagctcttcatcgctatagcagacgttcatagctgctcctgagagcacgtatgatggacgaacgaggacaggatagcctacttccttcgtaaactccttgatgtcctcatggctggtgagcgcacgccaagcaggttggtcgataccaagtttgtcgagcatcgctgagaacttatcgcggttttcagcacggtcgatattgactggcgaagtacccagaatcggcacatcctgacggtagagcttcatagcgaggttgtttggaatctgtccacccacgctgacgatgactccacgaggctgttcgaggtcgatgacatcaagtacgcgctcaaacgacaattcgtcgaaatagaggcggtcgcacatatcgtagtcggtcgatacggtctctgggttgtagttaatcatgatgctcttgtagccaagcttacgagcagtattaatggcgtttacagaacaccagtcgaactcaactgatgaaccgatgcggtatgcacccgaacccagcacaacaaccgacttctcgttgtggtagtagtttacatcgtagccttgagtgcagtaagtcatgtagaggtagttggtcaattcaggatgctcaccacccactgtttcgatacgtttcacagctggcagtacacccaatgacttacggtatctgcgtacttcgaggtttgcctgctccatgttgccctttggtttgaggacgaagcgtgcaatctggaagtcgctgaagccacacgacttcacttcgcgcatgaattcatcgctgatttcgttcagcgaattgagttgctgcaactgatgcttcaagtcaacgatatgtttcagacgagagatgaaccaagcgtcaatcttcgtcaggttttcaattttctcaacgctgtatccttcttccaaagcctgtgcgatagcaaagatacggaggtcggttgggttagcaagttcctcttcgaggttgtcgaacttcacgtgatcgttacctacgaatccgtgcataccctgccctatcatacgcaaacccttctgaatcatctcctcgaacgtacgaccgattgacatgatttcgcctactgacttcatcgaagaacctatctgtcggcttacacctgtgaacttcgtgaggtcccagcgaggaatcttgcaaatcatatagtcgagcgaaggagctacgtatgcggagttaggcgtacccatctcgccaatctggtcgagcgtgtaaccaagtgcaatcttagcagccacgaatgcgagcggataacctgttgcctttgaagcaagcgcagaagaacggctgagacgtgcattgatttcgatgacacgatagtcgttggtttgggcgttgaacgcaaactggatgttacattcgcccacgatgttcagatgacgaacagtcttgatggtcaggtcttgcaagagtttcacttgctcatctgtcaaagaacaagtaggtgcaacaacgatagactcacctgtatggatgcccagaggatcgaagttttccatcgaagcaacagtgaagcaatggtcgttcttgtcgcggatacactcgaactctatctccttccaacccttcaacgattcctcaaccagaatctgaggagcaaatgtgaaggcactctctgcaatcgtcttgaatgtctgctcgtctggacagataccactaccgagaccgcccagcgcgtatgccgaacgaatcatgattgggaaaccgatctcgtgcgctgccttcagggcatcttccatattttctacggcatgacttacaggagtcttgatggcgatcttgtcaagttctttcacgaagaggtcacggtcttctgtattcataatcgcctcgaccgaagtaccaagcacctgaacaccatattctttcaacgttccgttggtgaagagttcggtaccacagttcaaagcagtctgtcctccgaaggccagcaagatgccgtcggggcgttccttcttgataatttcagttacaaaaaaaggtgtcactgggaggaaataaaccttgtcagcaataccttcacttgtctggatagtagcgatgtttggattaaccaaaacagaactgatgccctcttcccgtaaagccttaagtgcttgagagcctgagtaatcgaattctcctgcttggccgatcttcaatgcgccagagccgagaaccagaactttcttgagttgcttgtccataagaataatgtaatatctttaatatcttttacttctctaatgataagtggcaatcgagcataaaaaacccgaaaaccaaatcaccttcttttagttttcgggttgcaaatttaagcattttctcggagtctcacaatttttatgcactttaatttgtaatatgcaaaaaaaatacaaaaaaaaataggagtttgattttttacaaacccctattccgatttttctaacgtttcaccacgatgacaaatcctccgcgaggctgacacttttgaaccgtctcgaccgtattgccgcgagtgatgtcccaaggattgttcttgtcgccactatcctggaactgagtgacatacttgcccaatcccttcagacgtttcgtactgaacgtgagggtctgctcctgatctgttccgttgatgcctgcaatataccaagtcgtaccgctcttgcgagcaatgatggcactttctgccggataacctccgaggaatacggtctcgtcccatgctgcaggcaattcgcctaagtagttcttcacctcctgaggctgagccaggaaactctccggacggtcagccagatgttgcaaaccactttcgaacaaggctgtgagtgccagctcatgagcatgactcgtgatgtgtggatgttgcgaatcgctgaaggcacaaggcgtatagtccattgagccgatgacgttacgagtaaatggtaacgtagcattatgagcagctgcacgattggtgaaggtcggtacgttgttgtaccactcggctccatacacagcctcagtcgtcagcaggttcggataggtacgcatccatccacgagggaatgtagctccgtggaagttgatgagcaaatgatgcttggcagcactctccatcaggtcgatgctgtaagccatattcatgttgttatctccgctgaagaagtccaccttcactcctgctactcccagactctcacaccatgcgaattccttctcacgatcttctggcttgttcagacgatacttcggagttggagcaccgttcacccaccctactgatgagttgtaccatatcatcggtttcacgcccttctcttttgcatagttcacagcatcctcgatgctctttccgtccttcatcgcgtcccactctgcatcaatcagcacgtaaggcagacggagtgttgcagccaggtcaacatacttcttgatgatgttcaggtcgttcgagccgtgattgtcaccaatgtcgattctaccacatcgctcatctgaccgattatcatcaccttccacgaactctgcttagcgttctgctcgtttttgtcgtgtacaatgttaaacttgttctttccatcaaggctgtagaacgacgaagcagcctggtcgtgatggatgtcggcttctgtgagcaatccgaatacattgttggggaactcaaacaaagcaggataagagagatgatcgccttgcttgaacgagcggttctttgggtagaaactctctgcaccatccgtccagttcatcatccagttattaatataataaggtatagtgataggcacatcgatctccgacttgtcgttcatgctctcgcgtcccacttttcggaaagccactccgtcgttatacactctcaccaacagcacaccgccgctctggagcgaatacgccgattccttacccttgttcacacaatgccgacgtttgcccgacagcatcatgtagtcgtccttgatgttgcgcgtatcgccaccattgatacctttgaactctgcagtatagattttctgccacttcccgttctgcttatagcttacggtgatatggtcgtcaaacttctctgcctttaatttcccattaggagatgtctgtgcagacatactgatgccccaagcggcacagataaatgctaatacgattcgtttcatgcttctattcataatttattgttattgtcttgcaaaaatgtctttcaaggtatgcatccgctacatcggtttattgaccagcatattgaacaccttcatgtagttgctgaattgctgcttgtcgtccacacccgagtcgcccgtatcctctacgtccacactcttcaccttcgtctcgatacatttgccgttctcgtcatagtagtagcgccactcgtaagtctcgccctcctcctgcgtctgggtgaacgagaaaatcagcttgtgactgtccggagcaagcaagaactcgctatactccttgaaatacatgctgtgattctgctttgagatgaagtagcaatgattgttgaaaacctcatcgtttccgttcggttcaaagaagaacttcaaatcgacagtcacaggaggatagtcttcagccaactggtcgtgaatcacgatacgcatatcacgaggcagttccgacttgtcgttcttctctattttgttcttcgcagtcgtgtatgtgctgcgaatcatcttcaggcggtctgccttcggagtggtcctgacgttcgttgtcgtcggttccacatccttatggttaatcatcatctcaaagatgtcgagacactccttcgcaaactgttggtccaacgatccatcatccccatcctcgctatcctcatctacatcctcaagatcttcacgacccatctttcgtttatgttcaatcagacgaccctcagcatcgaagtagttgttgtcctcaatcataaagccggaatccgtcacactacgcgtgaaggcatagagcagatgcccgtcttcagggtcgaacagcagctcagttttcgactcatgtccgtgagccgtaaagtaatccgtcaaaaaatagcagcgcgacgtagggtcgatgatataactcgtaggctctttcttcgtgaagtagaacgtcatttccgtctcctcattgatgatgaattcatcgtccacctgcgttccgtcgttcacggtaatcgtcatatcccgaggaccgatgctccccgtcccattggcagcaaccatctccttcgctttggcatacacctcacgaatacgccttatctgaccttccttcgactcactccccttcttgaagtaactgctcagtcgagtcaggatgacatgataagtctgctcagccagttccgacggctgatgcgaatgccaggtagcattgattttcgtaccgtcagcatactccatatacacccgatacgaatgcccgccttctatgacatcatccttattataatccttcagtttccccacattgaggtcatacaacacctcctgcatccgtttcacatcctcggcagtcacgtcatactcactcttctgctcatgatcggtacccgcatccacacatctcaccaccttcggcgtcttacccacgtcggcaatcagttcgtaatagtccttcccatcgtcaggaatcccatgaggagtctcagcacaactacaataaatcaactgcgacttcggagtcgtctgggcataatcagtcatataactcaacaagagcgacataaatacaaaaagtttcagtttcatatctggtttgataaagcattacctgtcaagttgcaaagttacgtttttttctcgacacaccaatagaaataacccaaaacctccattattttgaattcttttagccccttcatgtaaaaaaatgtcatcaatcaccaataataacacccaagttaatttaccattgaccattgacgattgacgattgaacagatgatttgatttatttgaccacggattaaccacccattgctcctcccctaagctaggggagggggaccgcttgcggtggaggagtatgtcttgatctctaacctctaacccttaaccatgaaccatgaaaacatgaaacatgaaatcgcaaataaccttggttccggtgaaagtcaccgattggggttggtaggtaaacgaatgaacatcgctttttcccgaaaaaatttggagatataaatattaaggtgtatatttgcaggtgaaattaataaaaaaatacctaaacagaaacaagaactgattggctgaaataaaaaaaagagcgagttgccccgctctaaatgttttcacaacggaataatccttattgtgatttgctaaaaattagtgctgcaaaggtaatatatttatttgaattgacaaaatattttctaaaaaattatcgatatgaagcatattttaggtttagatttgggaaccaacagtattggttgggctaaaatctctatagatgagaataatgtcgttgttccagaaatcaagttgggaagtcgcattattcctatgagtcaggatgtccttggcaaatttgacagtggtgttacagaatcgcaaactgcggtacgtacaggttatagaggtgtgagaagattacgtgaacgatgtttgcttagaagggaacgattattcagggtacttcatataatgaactatttgccaaagcattttgacaaatcgataggatgggataagaccaattcaaaaacttatgctaagttcgttgatgataatgagcccaagatagcttggtttgaaaacaaagatggtaaaaagcaattcctctttatggatgcttttaatgaaatgcttgcagatttcaaacacaataatccagaattagtaggaaatggtcgtttagtgccccttgattggacgattttctatttgaggaacaaagcccttcaccaaccgatttccaaacaagagctagcttggattattctcaatttcaatcaaaaacgaggatactatcaattacgaggagaggaagaagaaaacgacaattccaaggttgaagagtattatgaattaaaagttgtggacgttgaagctacagaagagaaaagaggcaataacatttggtataacctatatcttgaaaatggatggatatatcgtcgccaaagcaaacaacctttggatgattggaagggaaaagttaaagaatttatcgttacaacagagtataatccagacggcactctaaaaattgataaagaaggacagcctaagcgctcattcagagcacccaaagaagacgattgggcattacagaaaaaaagaatagaaaaatcgatcagcgattcaggcgaaactgtaggttcgtttatctaccgacatctattaagctctccttttgacaagattagaggtaggttggtacgaacgattgaacgtgatttctataaaactgaattagaagcaatattaacaaaacaagcagaatttcaccaagagcttactgataaagattacctcaacagatgtgtaaaagagctatacgccaaaaacacttctcatcagcaaagtttgatgaagaaaaacatgctctatttattgataaatgacattattttctatcagcgccctttaaagagcaagaaatcgttaattagtgattgtccttatgaagcctattcttacgtagataagacaactggtgaaatcaagacacaacacataaaatgtgttgcaaagtcaaatccgtatttccaagagttccgcttatggcagtttattcaaaacctacgtctttttgattgttcatccattgaggaaaaagaggtaactagcgaatatcttaaaaaagaagaggattatgtgcaactgttcctttttttaaacgataaggaaaaaatcactcaagatactcttctaaaagaattctttaatatcaaaaagtcaaaaggaagaaatgcaaagttgcctgtgcgatggaactatgtggttgataagtcatatccgtgtaactccacaagattcattctcctttctgctttgaaaaaagcaaacatacctttttcgttcctcaatgataagcggatagaatatcgtctttggcatttattgtattccgttgaagatagaaaagaactggcgcaagcactggtagcttttgccaagcaatataatttggaagaatcatttgttgatgaatttaaaaagatcgcaccttttaaaaaagaatatggtgcatactctgaaaaagcgattaagaaattgctatcagtcatgcgtactgggtcgatgtgggatgaatctcaaataccagactccgtttcacaaatcatacggggcaatatagatgagaacacaaaaaatcggatgagtcatcaaggctactctttcacagacaagaatagttttaagttccttcctgtttggttggcgtgttatgccatatacggtcgacattccgaatcgcaagagattacaaaatgggaaaaacctgaagcacttcaaagttacattaatagctttaaacaatattctctccgcaatccaatagttgagcaagttattatggaaaccctgcgtactgttcacgatatttgggaagaatgtggccatattgacgaaatacatgttgagttggggagaagcatgaaaagtacagctgatcagcgcaaatggatgacagaacgtaatatggagaatgagaggaccaatatgagaataaaactcatgcttctcgaattgaagaacgatccatctatttctgatgttcgtccatattctcccattcaacaggagattcttaagatctatgaggaaggggcattgcaagaattatctaaagaagacaaggattatactgatatttcctatatttctcatttggcgaccccaacaccagctgaaataactaggtataaactttggctagaacaaaaatattgctcaccctatactggccgcccaatatctttgtcaaaattattcacaccagcttatcaaatagaacatgttatccctcaaggccgtttttttgatgattctctttcaaacaaagtaatttgcgaagctgaagttaatcaaagaaaaacgaatatgttgggattggaatttattaagaaatgcggtggagaaattattcattgttctacaattggagatgtgagagtctttaaagaagaagaatacaaacaatttattgaagaccattattctttgaataaagtcaaagcacaaaaactattaatggacgacattcctgaggactttatacagcgacagatgaacgacagtagatatatcagcaaagtcattattggacttctgtctaatgttgttagggaagaaggtgaaattgatgctatctcaaagaatgtcattccttgtacgggaggcatcactacacgtctgaaaaaagattggggactgatagacaaatggaacgacatcatcacacctcgtttccaacgcatgaaccaacttacacaaagtgacgcgtttggccattgggagaataaagatgggaaacgagtgttccagacaactttaccattagaactacggattgacaaaaagcgtattgaccatcgtcatcatgcaatggatgcattagctatcgcacttgcctctcgaaatatcattagctatctaaacaacgaaaccgcacgtgacacacaacgtcgagaagatttacgtctgcttctttgtgacaaaaaccgtcatattaaaaagccttggaatacgttcacagaagatgcgcatatggcattacagaatatcgttgttagtttcaaacattatattcgtgtgattaataaagcaagcaattattacgaacactataatgaagaaggaaagaaggtcttcattccgcaacatggagaatcacattgggccgtaagaaaacctctccacaaagaaactatatttggacaagtgaacttaaggagaaagaaaactgttccattagccaaagcaatagagtgtgtggatagtattgttgataagacgctcaaaaaacaaattcagacactgcagaatgatgattggaacaacaaacagattattggataccttaagaagtctggaatcattaaggcggaagtctacttcttcacaaacgatgaagaaccaatggttgccgttcgcaagccattagacgatagttttgacaagaaacatatagagagcatcacagataccgatatccaaaagatactgctcaattacttggaatccaaaggaaatgatcccaaattagcgttctctccagaaggaatcatggagatgaatcagcatatagcaaactataataataacaaaccgcatcaacctatcatccgagtacgagttagtgagccaaagggtgagaaatattctattggtgaatctggtatcaatcggaagaagtttgtggaagcacaaagcggaaccaatctttattttgcaatttacgaagacaaacagggtaaacgatcttatcaaaccattcctctaaacatagtggtagaacgattaaaaatgggatggtcacctgtaccagaatataaagaagataatgaacaattaaagttctatttgtctccaaatgatttggtgtatgtgccaacagaagaagagcttattaataataatgtttcaatcacaaatctcaatcatagccaaatatataaaatggtttcagcgacagggtcatcactatactttgttcagaatacaatagcgactgtaatcgctaacaaggtggagttatattcattaaataaaatggaaagaacaatggatgggcaaatgattaagtcagtttgctggaaactagaagtagaccgtcttgggaatattataaatatcataagataaaacgatgattaagaaaacactttattttggcaatcctgcatatttgcgacttagaaatgctcagttgttgatacagttccctgaaatcgttaataacgatacgcttccaaccgatttcaagaaacttgaagaacgaactgttccgattgaggatattggtgtggtagtactcgataacaagcaaattacgataacccaaggactaatagaagcattgcttgacaacaattgtgctgtcatatcatgtgatagtcgaagtatgcctgtcggacttatgctccctttatatgggaatacaacgcaaaatgagagattccgaacgcaattagatgcctcgctaccattaaagaaacaattatggcaacaaaccgtcaaacaaaagattctgaaccaagcacgagtacttgacaggtattcggggaagaagtatccctgtatgacaatttggtcgaacgaagtccgtagtggggacccagataacctcgaaggaagagcagctgctttctattggaaaaatttgtttcctcagcaccctggttttgtacgcgatagagttggtgaagcaccaaacaatctgctaaactatggttatgctattcttcgtgctgtcattgcgcgttctcttgtgagtagcgggttgctccccacattgggaattcatcatcacaaccgatacaatgcctattgccttgcagatgacatcatggagccatatcgaccttatgtagatgaatgtgtgatcctgataatgcaagaaatggaagattgctctgacttgaataagacgataaaagccaaacttctgcaaattccagcgatggatgttgtcattgatggcaagcgtagtcctttgatggtagcagcaacccagacgacagcatcgctatacaaatgtttcacgggcgaacttcgccgtattacctacccagagtatccagacaaatgaatctatcatcacgactaagtgaatacagggttatgtggatattggtattcttcgaccttcctacagaaacaaagagagatcgcaaggagtatgccaagttccgaaaacgcttggtttgcgatggtttcacaatgtttcagttttccatttatgtacgtcattgtgctagcagtgaaaatgcagaagtacatatcaaaagagtgaaatctttcatgcctccttttgggaaaataggaattttaaatattactgacaaacaattcggaaatattcaaatttttgcgaattgcaaacccgagttagcaacgtcgcctggtcaacagctggaattattctagaaaatagaaacaataattccattcctaaaggatggaattattgtttcatgtgactctttttttattttctaatttctcttgcaactggctaatttacagcgagttacaatggttgaggtgtacctactgggtacaaagttactaattttcaagcaaatcacaacactgcctgcggatggaaagacgaaatcatggtgtacctactgggtacaaagttactaattttcaagcaaatcacaactagcggttcgtactgaataggggtatttagggtgtacctactgggtacaaagttactaattttcaagcaaatcacaacttgatgattttgtcttctgccatagttcctggtgtacctactgggtacaaagttactaattttcaagcaaatcacaacatagatgaattcagaattctctacataaaggtgtacctactgggtacaaagttactaattttcaagcaaatcacaacactcctgaagaagatggtttaaaacaagatggtgtacctactgggtacaaagttactaattttcaagcaaatcacaacgctgagtgtcggaaatgagtgcagtgtagaggtgtacctactgggtacaaagttactaattttcaagcaaatcacaacagatagtcttgttcagccttataagatgacggtgtacctactgggtacaaagttactaattttcaagcaaatcacaacattgtacgaatatgattgcatgatggtgtgggtgtacctactgggtacaaagttactaattttcaagcaaatcacaacaggtcttaatcgtgaaatgatgttggtacaggtgtacctactgggtacaaagttactaattttcaagcaaatcacaacagcttatgagcatcgactttgaatcgatgcggtgtacctactgggtacaaagttactaattttcaagtaaatcacaacatacgtcacatggctgacgtgtatccattggtgtacctactgggtacaaagttactaattttcaagcaaatcacaacaaaaaacagaaaaatctttttaaaactcgaagtgattactaattgtcaacttacctatcccctctttgacatctcgggttgcctccaagggggcactgaatcagggcgtccttttcaccctcctcatatacatatttagctgagagaacgaagctcaactagctgaataataagcctgttgatgatggtggtgtttcgtcgattcgatagggttcacaccctatcatcatattataatatttcgcccctacagggcgatgtgggtgggtgtttaaacgagatagggcttgcgccctatcctgtattatatcgccccgttggggctaagaacagtaaaccgtaaacggtaaacggtcaaaggtttcatacgcccccgcactaaaggccccccctctatcttagagggggaatttttatagtggaggaatttgtaaatatatgcaatatatacaatacattgatgtaacgtatttgccacattattatgtaataattcttgtgtatttccgttattttcccccatttcatcgacgaaatacacaacatttccacgaaactacaaaacaattagtgatttttttgtgaagtgttccatatcgttagtcatcctattttcgttgttataatctttgaataaccattttttattgaacttttttgtgggtaaccacagtttttgtctgtaaatttaccactttctacgaaaccaccaaacaaaatgcgttttttttcattgtttgaaatgcgtgattttgggtgaaaagccaactttttcaggggaaaagtggccaaaaacaagggttcgtaacatcatccattcaatcttttttttgacggagcaccctccacaataccctgtagggcactttaattttaaaaagtaaaaaaagtaacttggtaactcgagataagagaaggttgttgaattttatatataatatacatattatatataaaatttttcgtttaaaagggtatgccaagttaccaagttaccaagttactttttttacttttttcactaaattcatcgttccattttttgcaatctccacatagcaaattcggggatatgaaaggcaaagattggaaattttacgaaattatattaaaaatactttgtattttataattatttcgtaactttgcatcgcctaagagaaaaacaggcaagtgagcctgcatctgcacactcctcgaggcgacacatgcacaatcccgggcagcgcacgtgcatcctccagagtctgcaaaaacgaggcaaaaaaataaccgatttattaacaacaactcatctaaagaaacaacaattatgattcagatcaaagctaaacaacagaacgtatcgttcgaaaagaatgtcgagaaactcgcattcgtgctctcagcacatctttac

SEQ ID NO: 634 - DNA, 17882 bp, synthetic construct
  source 1..17882: mol_type = other DNA
  misc_feature 1..17882: note = Synthetic
agaaccaatagactaagtaattaacaagaaagtaacaaagtatagataacaattttacttacaattaattcataacgattatgaaaaagattatgttagtagcagccctgatgttttcatcagtagctacattcgcacaacacgcagtaggttcttttaacatccagccaaaggttggtttgaacattgcaaatctaactggtgacggcaaaccagacgctcgcgtaggtcttgttgcaggtgctgaaggtgagtaccaagcaaccgacatcgtttcagttagcgctggtttactctactccatgcaaggtgcaaaggcaaagactccacttgctactattacacaaaagctcgattacatcaacgttccaataactgctaacgtttatgttgttaagggtcttgcagtgaagttaggtctccaaccaggcttcaaggttagtgataaggcttctgtagatgcaacacatggaggtcagatacccgttcctggcaaggcaaagtcatttgacctttctgtcccagtaggtctttcttatgagtataacaacttccagttggatgctcgttacaactggggtctaacaaaggtgtacgaaggtagcaaggcaaagaacagtgtattccagattacactgggctataaattcgacttgtaaacccttatttacaaatgaaataacaaagaggaagcccaaaggtttcctctttttcgtacctactccagcctatctggtaccgagaggataggttttgttacaaaaagaaaaaggttcatccaaaccccaaaaagcaacggaaggaaaacttacagtattcaattagatgagagaagattattataaaagcgcataacaatacgttttaatttcgtacctttgcaccattaatcatataaaagcaggatataacagtatgtcatatcagttttcaagatacgaaacacactatcgcaaccttacttatttaggtgtacctatcatcatcgggcagttaggtaacctcattcttaacttcgccgacaccctgatgattgggcatcatagcaccaaggagttggctgctgcggcatttgtcaacaatatgtttacgttggtaatcatctttgctgtgggcttcacttacgctatcacggctcttgtcggtacgctttacggacaggaaaagacgcaccgtattggcgaactcatgaagagtgcggtggcagctaacacctgtatggctgtgttcctatcggctatcatggggttattatacgccaatctcgatcacttgcaacagcccaaagagcttcttcctcttatacgtccttacttcatcatacagcttgtttcacttcctttcgtatgttggtttaacaccttccgacagttcacggatggcattacagacacccgcgtggctatgtggatactgatcagtggcaacgttatgaatatattcggtaactgggttctcatatatggtcaccttggaatgagtgagttaggtctgatcggtgcagggctttctacgatgatttctcgtatagcgatggcaatcgtgatggtgggtatcttcttctttagtaagaagtacaaagaatacagaaagggctggagtcaaggcaacacgaaccgctctgacttcagaaaaatcactgttctcggattgccattagccttacaaatgggtatggaaaccgccgctttcagcttatcgagtatcatggttggatggttcggaacaaccgccttagctgcacatcaggtcatgttgaccatctcccaactgggttatatgatttattatgggcttgcggcagcagtagcggtacgcatcagtaacttcatgggacagcgtgattacaccgcagttaggcatacggcgacagctggcatacaccttgttttccttcttgcgatgacgacctctatcccagtcttcctcttccgccatagcattggaggcttatttactgacaatacagatgttatctcaatggtatccatgactattgtcccctttatgatctaccagtttggcgacggaatgcagagtaattacgccaatgccatgcgtggaatcgctgttgtaaaaccactgatttggattgcattcatcgcctttttcatcgtgtcattgccattgggttacctcttcggagtggttatgaattatcaacttctgggtatttggtatgccttcccatttggtttaacgaccgcaggaatactttattacatttattaccagaagggtttgaagcgcatagaagagtctgcagaataggaagatactattattagtaaacaaagggggcgttcctttgattaaaaagcatatcacaaagtagggacagatgccctcgtctgtccgccaaatcacggcaaataaaagcctccccaagcccctccaaaggaggggatgttgcctaacgggatgccatataagggtaaatgggcggacagacgagggcgtctgtccctactttggtgtattattttaattggaaataaccatctaatacacctcactccttataatgtatcgcctccataaaacgcttgattacctcaggcttacccgtatgcttgcccttatcctccgatatcttgcaggtgtcattatagtatggccacgactcagttatcttaacagcaacgagcttaataacgatgttcatgggctttacatgtgggaagtcattggtgaagtgagtgcctatcccgaatgcaggttttacctttccttcggcgtagctttgtaactctatcgcacgatcagtatcgagtgcattggagaaaagaatctgtttgtcacgggcatcgataccgaacgatttatacttagcaataatcttatccaactgctcatgattgtcgcctgaatcaatgcgaagtcccttgaactgattagcaaagtcttccgagaagttgtaagagaagatgtcccaaccgaaagaatcgtacaaataagtaccaagagcacccctgtatgttttgcgccaagcctccattgccatgtaattagccatctgcggaccaaacataccacctattgcacagatgaattcatgcgccattgtacccactggcatgaggtcatacttcatcgcaaggtgtatattgctagtacccacaaacttgcccttccacaccttactttcataacagtctttcatcgcgcgaacggctatctcttctgctttcaagctggcacgacgacgcgtaccgaagtcggagaagacgcaaccagcctctaataagcgttccgccttatggtaagtcttatcgtagaggagctgataatcaaagctttgtgcttgctcattaaacatatagaaaagctctgatacgatggcaagaaccttcacttcaagcaagatagtgtctgcccataagccttcaaactctatgtgtaagtgcccttccgaggtctgccacaccttcacccaatcgcgtgagaagcggaaaccacgtaggtaagttaagaaccattcaggcaagtaattgcacttacgacgtaggaagtctatctcctcctgagtgatgataaccgactctaaaagctctatctgatgttccacttcacgcgcaaatccatcgggataaaccgtgtcatcacgatcaacaaactggtaacaaacatgcgcacgagggaagttatcgatgactgcacagcacattgtcagcttataaaggtcatcgtcagtgaaatgattgatgatttgtctcatttatcttgtaagtctttttctgtcgtcaaaagtataaaaaagaaaccgaaaaacaaagtattttacaggaaaacatacacatcaaatattgcagttggtaccatagtagggacagacgcctttcgtctgggcactcctcccagcctctctcaaggggaaagaaggagcctcccccccgcccctctccgaatggagaggggagtagatagcattgtttgcaaacaaagagggcgtttcttcgatgtgaagagacgcccttttcatggcaaggaaacgccctcttcgattgaaagaaggcgtttctttcattttaaaatactattacctctgtatctgtcaggtattggcgtacatgtaaatggtactattcacgcccctctccattcggagaggggaaagggggtgaggcttcaaagtagggacagacgccctcatctgtcctcccagttacccctatgtatcatcctgtcaggcaacatcttctccttttgaggggcttggggaggctttcgctggttgtgttctggcggacagacgagggcgtctgtccctacaggttggcattatctttaattaaagaaacgccttcttcaatatgaagagggcgtttccttgcaatgaaaagggcgtctcttcatatcgaagaaacgccctctttgtttgcaaataatactatctactcccctctccattcggagaggggctgggggtgaggcttccttttctccccttgggggaggttaggtggagtctaaaaattacttgcgatcgcctaacttgctatcgatgtgtgcaatagcatggcttgacaagtgagagaaggaatcgagtatgtcttgtacattacgctcttcttcaacctgctcatcgatgtattttgcgatgaagttctgcgatgcgcgatccttttcctcatctgctacatcagccaagcgattgatagattcggttactttctgctcatgtgccaatgtgtcaacgaatacttctttaggatcagaccagcttgtcttgactgcatctatcgctgtcaacacaacctcaccaccacgatgtagaacgaactgagccatgtccatggcatgtgaacgctcctcttctgcctgcttgtacatccaactggagaagcctttccagccctctttacggaaccagcaagccatctggagataaagattagatgaatagagttctgctatgatctgcgtgttgaacgcatcttgcatcttacttgtaatactcattgtaatgcctttctttattataaataaactttgtttgtgtcagtctttacaataattccatctgcaaaagtaccactttatcaccacaacaccaaatattttatatactaaatgttgcttacgatggatcctatcaatagactgattatattctaaaaaacgccctcttgcttactcaataacgacggttgtccatccatgtttgtcttcgatcgtaccatattgtatgccacgaagggtctcatagagctttgttgaccatggtccgggcttatctccaaagttgtaaaccttacctgtctctaagtcatcaaggtgtgaaataggtgagataacagctgcagtaccacatgcgccagcctcttcgaagctgtctaactcatcctccgcaacaggtcggcgttcgactttcatgcccaagtcttcggctatctgcatgagactcttattagtgattgaaggtaagatagacgttgacttcggcgtaacgtaggtgttattcttgattccgaagaagttagctgcaccgcactcatcaacatatttcttctctttagcgtccagatagaactccgaagcataccctttttcatgcgccatcttattggctctcaatgaagcggcatagtttcctcccaccttaaacatacctgttcccagtggagcagcacgatccacgtcacgcacaatgacgtatggattggaagagaaaccacctttgaagtaaggacctactggtgtggcaaagatcaagaaacaatattctgttgccggacgaacgcccacgcctgctgtaataccaaatagtaacgggcgcagatagagcgttgctccactctcataaggtgggatgtactcttgattgaggcgtaccaccttcttcaccatatcaacgaatagctcggtcggaacctctggcatgacaataccacgggctgtgctctgtaatcgagcggcgttctcttctgctcggaagacgcgtaccttgccatcaggacagcggtaagccttcagtccctcgaatgcttcttgaccatagtggaggcatgttgcagccatgtgtaacttcaagtactcatccgaacagacctctacttcgccccacttaccgtctcggtaataacaacgaacattgtagtcggtgcgtagataaccgaatgtcaaactcttccaatctatatctttcatatcatataagtatttaattgcatcctgccatagcctaatgcaaaagtaaacaaatttatctttccctgcaacccatcgttcgctttattgctactgattggctaacagcttctgaatctcatcatcggtgtgcttgagcttctgcttacatagcttcacaagtgcctgtgcttgcttcagttgagcagccattgaatcaacatcaagttcgcctcgttccatcttgtcaactatgctctcgagttgctgaacggcgtcttcatatttcatttctttcatcttcttgattgtattaaagggtttaaagggttccttcgagctatttcttcaccacactctccacctctccttgctcaaagcgagtggtgataacgtctccagccttcagttgtgaggcattgcgaacagccttcccattgtgtaaggtaatgctatatcctcgacttaaaagcagcttcggatccatcagttgggcacgttgagcgagcatatctatacgacgttgctcgttagaaaggcgccctacaagggtgggaatagcatatcgcatcatcgaatcaaggtcgtaacgggctttagaaagcctttccttcatcctattcaccaacctttgtgcaagactgtcgagccgtgcatcctgttgagtacgcaccacggaaaagagcatggggatgtgagttgcaatgtgttgtatgtgcatcttctcccgttctaacctgcgttgaacagcctcaacaatgcttgcttgtgcgttctcaacccttgccagcgttgcagccaactgattgatgaggtaagcggcagctgctgttggggttttcacacgcatgaatgaaaccatatccagcacactctcgtcacgttcgtgaccaattcctgtgattatcgggagtgggaagttcgccacattctccgccagattcaaggtgtcgaaaccacttaaatcggctgtcgcaccgcctcctcggatgataacaacgcaatcgaaatcctcttcccgttcgttaattaggttcaaagcattgataatgctctgttcaacctggtctccttgcatcactgcggggaacagttctacatgaaaggtaagcccaaactcgttatgaagtaactgattgcaaaagtcgccataacctgctgctgtctcggaggagatgatggctatgcgttgagcaaacatcgacaagcacaattcgcgttgcaagtcatagacaccttctgcctttagctgtcggataatctcctgtcgtttgcgcatcatgtcgcccatggtaaactcgggattgatgtcatctacaatccaagaaaacccatattgaggatggaactgagcgtgcacaagtaacataactttcatacctgcatggatcgtctgtcccgttatcttgatgaaagaaggctgtatctccgcccacacgttatgccaacacttggcttgagcacgtgcaatgggaacattgccacgagcgtccttctcgatcagttccatataacagtgtccacggctctcacgtgcttcggacaattcagcctcaacccagtaagaacgcgacaaggtgctactgataacatccgataccaatgcgttcaattcatagagggtaagtgcttttgtcgtcatgtgtgcttctatatatataataaggtgtgaattacattacttaccattgggcaataccacttggcgatacgcctccatgaaatcgggaacaccataacccatgatgttattgggcttcagatgattatcagatgtctgccgaatcacctttatcaagtcctttgcacacgtgttaggagcggcttgccacaagcaagcaaccatccctgccaccaacggacaagcaaaggatgtacccgtatcgggcgtgatataacctctacccgataccacatttgttggacaaccatacgccataacgtctggtttcactcgattatctgccgttggaccaatcgatgagaaagctgcattaatgccgtctggtgcaatcgcacctaccgtgagtatgtcatgcgcatcggctggtacattgatcttcttccatggtcccatgccatcattccccgcactgttgacaaggataatgcctttggaagcaagcaaggaagccgcccttgagatgggtgccgtcagtccattgaggtcggaataatgatagtttagactcttatcatcgaagccgtgatagcctaaagacgaactaatgacatcgacaccgacggagtctgcaaactcagcagcggctatccagtagtcttcctccgccgaactctctgtaagataatcctccgaacgcaacaaccaaaagctcgctttcggtgcagaacctacgaaggtagagggctgattgactgctataacggataaagtcttcgttccgtgatccatttccttgtacacatcggcatcataaccagcaacgaaattatgcgttccaacgatgttgacattcttaaaagcagccatcttatccacgttcatgaagcctgcatcaagcacagcgatggtcatcccctgtccttgaaagcccatattgtgcaacttccgaccattgagattctccaactgtgcctttcccataccataataatcatgtatggtggagtcgagtacttgtaagtctggacgatagcgaacgcgctgtgacaacggacgaatagagtcgggagaggtgaaaacgagcttgctatctctcacaaaaggcaacaccttgagatcttctaacgtctgcctgttattgccacgcactaagacagagttgttccacttgcttattgcgaccacattcccaccctctttgcgtatcttctgaatgtatgttggcgacacggggaggtcagttgagtcaagttgaaggtgctgcctctcacgccgtttcagtgcagcttcggataagaaaagcctcggtttatccaaagaataaggcgattcagccttgtcgcgaagcgttactcgaaacatataacacttcccgccgggataactaatgaagcttttctcatcattactggctcctactactgccgtaataagggtgaataggcatataagatatatctttctgaggttctgtttcataacatgcaaacttacacaaaataattgaattatagattgcatgctgccctttttctataaattaatctctttctacattgtaggatggtattccctttaataccaaggaacgccctctttgacaccaagagatgccctctttctatcaaggaaacgccttctttgacaccaagaaacgccttctttctatcaaggaaacgccctctcaaatttaaaaggttttccctaacgatcttccgttaggctttcccatagtctgtcagactatgtttgaggaagcattcaaattatttctgctgtcattactgtcacaaattaactgagattaaacttctgataataaacgagttatggtaattgttaaaagtgacagcaagttgaattaaaaataaattaggtttttaaggggataaacggagatgattatgttgtaaaatcatacgacaaaacagatggaatcaaagtggatgtatataaaaagagtgtatggatataggaaataaaatatcctacaactctgtgataatatgaatagttaaagggaaattacatataaatactggacgtaataattcttaaaaaagagcgaggaaatagttgtaggtttgtgaaacaaatattacctttgtctctataaaacgaaagaaggtgagttgccccaccttgtttgttttcacaacggaataatccttattgtgacttgcttgaaaatatctgagtgcaaatataggaattaaataactaaaaaccaaacaaaacaagaagaaaatgaaaacaattcttggtttagacttgggaaccaatagtattggttgggctaaagtctgcgttgatgacaacggtaattacttgagaaacattaaacttggtagtcgtattatccctatgagccaagatgttcttggtaattttgataagggtgtgacggagtctcagacctcggtgcgtactgggtttcgtggagtacgaaggataagagaacgctctttgctacgccgtgagcgtttacatagggtcttgcatgtccttggatatctacctcctcactatgatagtgccataggttggaataagaatgagccttcgacttatggtaagtttttgaatcatggtgaaccaaagttggcttgggagcgcaaagaggatgggtctatgcgtttcctttttatggattctttccatgagatgatggcagactttgctaaaagtcaaccatcattggtttctgatgggaagaaaattccactcgactggactatttattatcttcgtaagaaagcccttagtcagccaattcggaaagaagaacttgcatggatactactaaatttcaatcagaaacgtggttattatcaattacgtggagaggaagatgacgataatcctacgaaatgcgaggagtattatgagttaaaagttgtaggtatcgaagctgatgaagaaggtaagaatgggaatacttggtacaatgttaagttagagaatggttggatctatcgtcgtcagagtaagattccgttggatgattgggttggtaaggtcagagagtttattgtcacgactgaatatgaaaaagatggaataactctcaaaaaggataagaatggagatgtcaaacgatctttccgctctccaagtgaggacgattggggacttcgaaaaaaacgaacggaaaagctgttggattcttctaaaatgacagtgggggcttttgtatatgatcatctcttggcagaaccatctgataagattcgtggaaagtttattcgtacgatagagcgtaaatattataagaaagaactatatgcgattctttgtgagcaaagtaaatatcatgaagaattacgtagcggagattatttgaataaatgtgctcaagaattatataagaataatcaacctcatcgcaatagtctgttgacaaaggatctttcctatctacttctggaagatctcatcttctatcagagaccattaaagacaaagaaatcattgatagcagaatgtccatacgaagcctataaatatgtagataaagagacaggggagataaaacgacagggaattaagtgtattgcgaagtcgaatccttattatcaagaattccgtttgtggcagtttatatccaatctccgtctctttaacaaagctgatgacaaggaagtcacagctgattatcttcctactcaggatgattatgtgcgtttgtttgcctatcttaatgaccgaaaggaaataaatcaagaaacattactgaaagagttcttcaagttgaagaagataacagttaattcggagaaagttttccctattcgttggaactatatagaagacaaagagaagaaatatccttgtaatgaaacacggcatgaattactgcttgctcttgatagagcaggaatcgatcattcttggttagagaagcctgggcaagaatatcggttatggcatttactttattcagttgagtcgaaagaggagacaaaggaggcattgcgcaagctaaaagatgatgatgcgtttgttgaatccttcttgaaagttaagcctttcaagagagagtatggtgcttactcagaaaaggcaataaagaaactcttagctgttatgcgaatgggaagcctttggcgagaaacagatatttgtgatacaacaaaggggaatatcactaagatactgcaaggagatatagatgagaaacttaaagagaagataagtgcttctgtttcttcatataatcaattgtcagatttccaagggttgccagtatggttggcttgttacgtagtttatgggcggcattcagaggctgcagaaatacaacattgggaaactcctgaaagtcttttggcatatatcaatggctttaaacagcattctcttcgtaatccgatagttgaacagtgtattttagagacgcttcgaacagtacacgatatttggaaagaagcaggacatatagatgagattcatgtggaattaggtcgaaatatgaagagcactgccgaccaacgtgcccgtatctctgagaatgttctgcgtaatgagaatacgaatcttcgaattaaaagtctactattggagttgaaaaatgatcctaatattaaagatgtgcgtccttattccccaatgcaacaggagaagttgcgtatctatgaagagggagttttacaggaattgaccaaggatgataaggactttacagagataacaaagatatcaaccatggctcaaccttctgcgaaggaacttcaacgatataagttatggcttgaacagaagtatcgttcgccttatacaggtaagtcgatttctcttacaaagctttttacttcagcatatcaaatagaacatgttattccacaaagtcgttattttgatgactcctttagcaataaagttatttgtgaatcagaggtaaatagtctgaaagataacatgttaggatatgaattcataaagaatcatggtggagagatcattcattgtacaatgttgggtgatgtaaaggttctcagtgaaagtgaatataaggcttttgtaaacgaccattatgcgcacaataaacgtaaaagagagaatcttctactggaggatataccacaagaattccttaatcgccagatgaatgacagtagatatataagtaaggtggtaaaggctttgctctctaatattgttcgcgcagaaggagaagaagaagcaacatcaaagtttgtcgtgtcttgttcgggaggtattacagatagattgaagaaagactggggattaaatgatgtttggaacaaaatagtatatcctcgttttgagcgtttaaatagacttacgggtacggaggcttttggacaatgggagaataaggatggtaaaagagtcttccaaacagctgttccattagagctacaacgtgggtttaataagaaacgtatcgatcatcgtcatcatgcaatggatgcgcttgtgattgcgtgtacctctcgcaacataataaactatctaaataatgagtctgcaaacaatcctaagaagcgtgaggacttgcggcgaaaactttgtgataagaatagaactattcgtaaaccttgggaaacattcacacaagatgctactgcagcattagaagatgtgatagttagtttcaagaattatgttcgtattattaataaagcaacgaattattatgagcgatatggtgtagaaggaaagaaggttatagcagaacagagaggcgatgatatgtgggcaataaggaagcctatgcataaagagacagtctttggacatgtcaatcttcgtcgtaaagttactgtgaagttgaaagatgctttagagaatattcctgctatttgtgataaggatctgcgtgactatattaataaattggtaaagaaaaattttaatactcggcaattgcttgctcactttaagagtatcaattaccgattgaataggcagaagatagaaaaagttgaagtatggcagtttagtgatgaaaaggaacaattagttgcgacaaggaaatctttagatacgtcatttgatagcaaacatattgatagcattaccgatacaggcattcaaaagatattgaaaaactatcttcaggcaaaaggtggagatcctaacgttgcttttacaccagaaggtataatggagatgaatcagaacatttctctttataatgatgggaagcagcatcagccaattctgaaagtacgattgtttgagccgatgggtgcgaagtatcctgtcggacaaagtggtaataagtctgttaaatatgttgaggctcaaaagggaacgaatctttatttcgcaatctatgaagatgaagaaggaaaacgtagttatagaacgatacctctaaatgaagttgttgaacgcttgaagcaagggcttagtcctgttccagagaagaatgacaaggatgtagatcttaagttttacctttcaccgaatgaccttgtatacgtgccaatagaagacgagcatgagagcttagctaaggatcatatatataaatttgttgattctagtggcacaacagccaactttattcctcacagatccgcgaatgtcatttttgaactgaataaaaaagatgctgaaaggttttgtagtggctctattattcaaaatgagtatggtgtagggagtcctcagtctaagaatcaaaaagcaataacaggtgagataatcaaggctgtctgctggaaacttgaggtagatcgcttagggaacgtcatcaaagatttttagtaataatcttatttgcttatgataaagaaaacgctttgtttcagtaaccctatctatctgagtctccgtaatgagcagttagtattgcatctaccagaagtagaagttaacggaaatgtgcccgaagttatgaagaaggaagctgagcgcaccatcccgatagaagatattggggtggtgatacttgataatcggcgtataacagttacctctggtgtacttgatgctctcttggagaataattgtgctgtaataacatgtgactcaaaaagtatgcctgttggattactacttcctttatgtggtcataaaactcaaaatgaacgatttcgttcccaacttgattcttcacttccattgcgtaaacagttatggcaacagactgtgaagcagaagatctttaatcaagaatgtgtcttaaggtctaataccgaaaaagagacacgttgcatgtgtgtatggtcaaatgatgtacgtagtggtgatcccgacaatcttgaagcaagagcagccgcttattactggcgtaatcttttccttgactttcctgattttgtacgtgatagagaggggactccacccaacaacctcttgaattacgggtatgccattctacgggctgttattgcaaggtctttagttgggagtggattattaccgactctgggtatacaccatcataatcgttacaatgcctattgtcttgctgatgatattatggagccctaccgtccttatgttgatcaactggttattgatattcttcatcgatttgacaatgtctcttctctttcaaaagagttaaagatggagttattgagtatcccaatgatagatgttgtcgtgaatggtaaacgtagcccattgatgatagcagctcagcaaactacagcttcgcttgctaaatgcttttctggggagactcgtcgtattagttatccagagatgtaacatttatttattatggtcagcttttaccgctttagtgaatatcgaattatgtggattctcgtattcttcgatttaccaacagaaacaaagaaagaaaagaaagcatatattgacttccgtaaatcattgatgaaagatggttttacaatgtttcagttctccatttatgtccgtcattgtgcaagtgtggagaatgcagaggtgcatataaagcgtgtgaaagcttgcctccctaaacacggaaaagtcggaatattgtgtattactgataagcaatttgctaatatccaacttttctatggtgagaagcctaaaccacccaatgctccaggacaacagctagaactattctaatacagaatttatagaaaacgaaaatcccactctacacgagtgggattttgttttgtggtattacttttattttcttctaacaactaacgatcttattgatattctgaaacttatgaatagtctgttgttgttgctaccacaaaggtacatattttcaagcaaatcacaacacaatgtttaactctttcccctcttttgaggttgttgttgctaccacaaaggtacatattttcaagcaaatcacaaccttggcgcatctaagtaattattgcgcgcggttgttgttgctaccacaaaggtacatattttcaagcaaatcacaacgtactcttacaaggatgatttcttttctgcgttgttgttgctaccacaaaggtacatattttcaagcaaatcacaactataatatatcaattacaccgcgattgaatgttgttgttgctaccacaaaggtacatattttcaagcaaatcacaacaccgctgcgcttaacgacccatttaacgggttgttgttgctaccacaaaggtacatattttcaagcaaatcacaacccattacaaccgattctcctttcgaattgagttgttgttgctaccacaaaggtacatattttcaagcaaatcacaaccccgcgaatataccaaagtaatggtattgggttgttgttgctaccacaaaggtacatattttcaagcaaatcacaacgctcgttaaagcggtaatagtagcggtgtcgttgttgttgctaccacaaaggtacatattttcaagcaaatcacaactagtgtggttctatcgctaccaatgcaagagttgttgttgctaccacaaaggtacatattttcaagcaaatcacaacagcagaggaactcaatacatttatcgaaagttgttgttgctaccacaaaggtacatattttcaagcaaatcacaacagagtggtgcgaagcaaagggctacgagcagttgttgttgctaccacaaaggtacatattttcaagcaaatcacaaccacgagagggaatgttatgccgccgttaccgttgttgttgctaccacaaaggtacatattttcaagcaaatcacaactcaagttttagctgcctttcctgctcgctggttgttgttgctaccacaaaggtacatattttcaagcaaatcacaactgcgaggacgtcagggtgaaattccaactcgttgttgttgctaccacaaaggtacatattttcaagcaaatcacaacaccacagcctttgatgctttaaaccgctgggttgttgttgctaccacaaaggtacatattttcaagcaaatcacaaccaaaagtatgcaataaagttatacgatgaagttgttgttgctaccacaaaggtacatattttcaagcaaatcacaactgtgcacatggtgatatttttgtcgttgatgttgttgttgctaccacaaaggtacatattttcaagcaaatcacaaccacaaatgacacctattgatatatcagcctgttgttgttgctaccacaaaggtacatattttcaagcaaatcacaactaaagaattattgtactattttctgcgaaagttgttgttgctaccacaaaggtacatattttcaagcaaatcacaactgggtacaagagaagttccaagaggagactgttgttgttgctaccacaaaggtacatattttcaagcaaatcacaacctgataaagctactggtgctgacggtaaacgttgttgttgctaccacaaaggtacatattttcaagcaaatcacaactaagaacggtacgtatgcgtctgattccgtgttgttgttgctaccacaaaggtacatattttcaagcaaatcacaacgatatgtagaaaatgataaacgtgtagtgagttgttgttgctaccacaaaggtacatattttcaagcaaatcacaacaagtagacccttgaaagactttgtattattgttgttgttgctaccacaaaggtacatattttcaagcaaatcacaacaaagagcgacaccggcaaatacatcctctagttgttgttgctaccacaaaggtacatattttcaagcaaa

SEQ ID NO: 635 - DNA, 17253 bp, synthetic construct
  source 1..17253: mol_type = other DNA
  misc_feature 1..17253: note = Synthetic
ggaacgcataaaggacgcttcaaagcgtttttggcacattgcggaatctttaacatggagtttatgtattcgacgacagaagagatgttttttgaagattgggagcagggaggtgcaccttgggataaggagaataaagtggcacagaactcattcgctcattcacctcatctccttgtgaagaattgggacactccgatcatggtagttcacggcgaacgtgactttcgcgtgccttattcgcaaggaatggcagcgttcaataccgcccagatgcttggaatcgagagccgtttgcttatcttcccgaccgaaaatcactgggtgcttagtccgcagaacggaatcgtttggcagcgtgaattcttccaatggtttgataagcatttgaaggcaaaatagatcgagtgaagaaaaagaaaattattctgtagcgaacaggtatgaaaacagatattcgtatagtttttgcattgttggggggaatcctcttgtgtgcttgcggtcagtcgcgagaaagcgcggaagcatacggaagggaagccctttctgaagaagtgacgtccggcaatgcctccacgtctaccgccgatgagacgtctgaccttacagtttccgcttcgtatgaaaggaagctgacgaaaaagggaaccattcgtttcgaaacatcggatgcgaagaaaactcacgcagcgattcagcaggcagtggttgaaacgaaaggatacatatcgagcgataatctgaatcaatacggcaatcggatcatccatgccgttacgattcgtgttcctgcaagccaatttgatgcgttgctcgaccggatttcgttgaatacggacaagatcgaggacaaacatatcgaagtgctggatgtaacgcaggaatatatcgatctggatactcgtatcaaggccaagaaagaactcgaaaaccgttatcaggaactgctcaagcgcgcccatacgatcgatgaaatcttgaagatcgaagaacagatcggtattttaagagccgacattgaatcggccgaaggacgtttacgttatttgaacaatcaagtgacgttcagtacccttactgtcgaattttatgagatgtcatccgtcatagccaccggattcgggtatgaattgaaagaggctttccgaaacggatggaattacttgtcgcggctcattcttgtcgtggtgaatctttgggcgatactcttgttcatcatcgttatatgggtgcttgtcgtaaaactcagaaagtggcggaaaagaacctccaagaacaatgtataaccctcgtgtgatccgggaaaagtgtttgggtttatgaattattcaaattctgcgatatatatgaaaagaaaatggaattatcaatggttgcttgtcgtaacctttttattagctattacatcgtgtaaccatgtgaaaaaagaaggagttgagattttgaaacaatctgattttcccgcacctcctgttgcggaagtgatgcctgatacgtttacgaatttcgggcaacagcgtatcgatgattatttttggttgaaagacaaaaataatcctaaagtgatagactatctgaacgccgaaaatgcgtacaccgatacggtaatggcatcgacgaaaggcctccagcagaccatttacgacgagattctcggcaggatgaaggaagacgatgagagttacccgtcattcaaaaacggttattactactacagtcgtaccgaaaaaggcaagcaataccgtacgcattgtcgccggaaaggctccatggatgcaccggaagaaattatcttcgacatcaacaagatggcggaaggcaaaccggcttttatcttcagcggttactccgtcagtccggataacagcaaggccgcgtatttctataacgaaaccggttcgtatgccgaatttacgatgaagatcaaagacctcgcttcgggcgagacggtcggtttcgaagtcaccggagcagcttcgatggcgtgggcgaacgataacaaaacgttattctacagtgtgattgataaaacattacgctcatcgaaaatctatcgtcggatgctcgacgcctccgaaggcgagttgatttatgaagaaacggacgcacgtttcagaacatacgtttcgggtagtaagacgagagagcagatctttattttgtccggaagttcgacgacctccgaaacgcgctatgtctcggctgatcatccgaccgatgcgtttaaaatattcatgcctcgggtgcaggatgtggaatacagtgtgtatccgcacaaagacaagttctttgtacgttacaaggataaagaaaatctgaacggtatgatttacgaagtgccgcttacgggctacgaagaccgtacaacgtggaaggtgtttgttccgcatgataaggatgtacgtattgaagacattgatattctgaaagactacgtggcgctggagttgcgcaagaacggattggctgaaattcatatcaagccgatcgacggcggcgaaacgaaaacgatcgctttccccgaaccggtctattcggcatggctgggcggaaatcccgaatacgatgccacgacgattcgttatacgtacacttcgctcaaccgtccgactacattatatgaatatacgattacaaacggcgagacggctaaacttaaagagcaggagatcccttccggcttcaatcccggcgattatacggtagagcgcctctgggctacggcgcccgatggcgtaaaagtgccgatggccatcgtttataagaaaggattgaagaaagacgggtcgaatcccgcgttgctttattcgtatggcagttatggcagcagttccgacgtgtatttcagcacgagctattacagtctgatcgaccggggctttgtgttcggtatcgcgcagatacgtggcggaagcgatctgggcgaacagtggtacgaagacggcaagctgctgaaaaagaaaaatacgtttaccgatttcattgcgtgcagcgaaatgctgattaacgaaaagtatacttcacccgacaagttggcgattatgggcggaagcgccggaggactgctgatgggagccgttgcgaatatgcgtcccgacttgtatcggacggttgtggcgcaagtaccgttcgtcgatgtgatcaatacgatgctcgacgaatcgttgccgctcactacgggcgagtacgaagagtgggggaatccgaacgaggaagagtattaccggtatatgctttcttattcgccttacgacaatatcaaggcgcagaattatcccaatatgcttgtgacgggaggaatcaacgactcacaggtgctgttccacgagccggcgaagtatgtagctaaacttcgttcgatgaagacggacgataacatcctgattttgcacatgaacatggattcgggacatggaggcgccaccggtcgttacgacggcatcaaagatacggctttcgaatttgcctttatcctgaacagggtaggaatcagcaaataaagccggaacggtaaccaatcgaagataagaaaagggggggatgtctttcagtggcatctcccctttttttgtgtccggacacgtacacattgagcgagcaatatatcttatgtctttaaggaagttattcaatgtgtccgctcggggttttccgtattttccataaatatcgtacctttgcacgatttaattgcagccggaatgaataagaagaataaagagacattgtatttgcgggaagctttcagcgagatagacgattcggtgggaatcgtgatgcccatcctgatggaatgcgataaggatgaagatttttccgaagggatcgataaagtcggtgaaagtttgccgattctctcgttgcggaacatggtgctgtttccgggcgtggccatgcctgtcatcgtcgggcgggccaagtccatgcgcctgattcgggaagcctcgcataaaaagatgatgatcggggtgctgtgtcaaaaggagacggaggtcgaagatccggggttcgatgacttgtatacgatcggtgtcgtggctgaaatactgcgggtactggaaatgccggacggttcgacaacggctattctgcaaggccgcaaacgttttcagttgcatgaactgacggaaacggagccttatctgaccgggcgcatctctctgttggaagatacgcatccgaaaaagagcgatcgcgagtttgaggcgcttatctcaaccatcaaggaccttacggtaaagatgctgacagcatccggtgagcctccccgcgacctgatctactccatccgcaacaatcagaatgcaatgtatctgatcagttttgcatgctgcaatatcctttcgcattcgcccgaaaaacaggagcttttggccatcaacgacctgaaagaccgtgcatatcgactgctgtttattctcaaccgcgagtatcaattgatcgaactgaaagcatcgattcagatgaagactcacgaagacatcaacaaacagcaaaaagaatatttccttcaacagcagatcaaagccattcaggaagagttgggtggaaatatgaacgacatcgagatcaaggagctgcgcgagaaggcgaagagcaaaaaatggccgaaggaagtcggcgagatcttcgagaaagaagtcgccaagctcgaacgtgttcatccgcaatcgcccgattattcgatacagtcgcaatatgtgcagaccatcatcagtctgccgtggggggaatacagcaaggataatttcaacctgtcgcatgcacagcgggtcttagaccgagaccattacggcatggagaaagtcaaggagcgtattatcgagcatctggccgtgctgaagcttaagaaagatttgcgttcgcccattctgtgtctctacgggcctccgggagtcggtaaaacgtcgctcggtaaatcggtggccgaagcgctggggcggaaatatgtccgcatttcgttaggcggcctgcacgatgaagccgaaattcgcggacatcgccgtacctatatcggcgcgatggtggggcggatcattcagaatctgcaaaaggcagggacatcgaatccggtgtttgtgctcgacgagatcgataaggtcggtaacgacttcaaaggcgatcctgcttcggcgctgctcgaagtgttagacccggagcagaacacgacgttccacgacaattatctcgatatcgattacgacctgagtaaggttctgttcgttgcaacggccaataatctgaatacgatttcacagccgctgctcgaccggatggaactgatcgaggtgagcggatatattctggaagaaaagatcgagattgccgtgcgtcatctgattccgaaacagatggagctgcacgggattcctaagcataccgtcaaatttcaccgtcatgccgtgcgggcggtgatcgagtcgtacacgcgcgagagcggcgtgcgtgagctggagaagaaaatcgccaagatcatgcgacgcatcgcacgcaaaatcgcttcggacgaagaagtacgtccgatgatcaaggcggaagacctcaaagaatatctcggcgccgtggaatatacgcgcgacaagtatcagggcaacgagtacgccggtgtggtgacggggctggcgtggacggctgtgggcggagagattctttttgtagagtcgagcctgagtcgcggcaaagggtcgaagctgaccatcacgggcaatctgggcgatgtgatgaaggagtctgccatgcttgcgctcgaatatgcgcattcgcatgccggacagtttggcattgacgaagagctgtttgaaaactggaatgtgcatatccatgtgcctgaaggagccatccctaaagacggcccgagcgccggcattacgatggtgacatcgcttgtctccatctttacgcaacgaaaggtgaaacgtaatttggccatgacgggcgagatcacgctgcgtggcaaggtgcttcccgtgggcggcatcaaggagaaaatcctcgcggccaaacgtgccggcatcaaggagatcatcctttgtgccgagaaccggaaagatgtggaagaaatcaatgcgatgtatttggaggggctgacctttcattatgtcgacgacatcacgcaggtgctcgacctcgctttgttgtgcgagaaagtgaaacatccgctcttcgggtaagcgtgtttccggaacaggcaagcgttccggaaacggaagagcggaacgcgccgaacgccgtcagtcaaacatcaaattaaattcgtcttttaacttcgacagcagcggattgatttcgttcagcagctcgaacttttctgccgacgtataggccagcctcttttcgttcgcttcgtcgatgcgtatctttaattgaatcttcccgttcttcaactgcgtgcggagtgcttgcaggatagaggcattatgattgagcagctcttcctgctgtccggggttgtgtacgacgacctcgaacagaaactcctctttcagtacgggctgacagttgatcatcgtatttttcagatgtactttcttctctatcgttgcggcatacgcattccagcagccgatcagctcctcttcggtgaacggattcgtttcctgtaaagcctctccggcatgatgcgtaacctgtgttttttgggtggtctccaaaagaccggtcagagacgtgttcgtaggacgtcggttaatcggtttccgcggcgtttgggttgcgcttggcgtactcgttgcggcgagcgtcggcgtctgtgtggcaggcggtatggaggggcttgcgctacgatgcgtatcggatgcgggcaaaccttcaaccgcccgaagcagtcgcagcctcagtcgcttttttttttagcctcggcgatcgtagcagggccggcttcctggagttgacacagctgaacgaacgtcagctcgagcaagagtcgcttgttccggctctcgcgataatgcagatcgcattcattggccaactcaatagcctgatacagcagccagtcgggacactgccgggctgtttcgcggtatcggtcgcggatcgatgcgccgatttcaaaaagcacgatcgtgctttcatctttgcagaccaacagatcgcggaagtgcgaggccagccccgtgatgatatgctgtccgtcgaaccctttctctataatctcgttcaggatgagcaggcttgtccgtatgtctccttccagaacagtgtccgtaatgcggaaataatattcgtagtccagcacattgaggttctcgatcacggccttgtaggtaacgtttccgcccgtgtagctgactacctgatcgaagatagacaaagcgtcgcgcatccccccgtcggctttttgtgcgatgacgttcagcgcttcgggttcggccttcaccccttcctcgccggctacatattgcagatgttctacggcgtcgacgaccgagatgcgtgagaaatcgtatacctgacagcgtgacagaatggtcggcagaattttatgcttctccgtcgtagccagaataaagatcgcataatgaggcggctcttcgagtgttttgagaaaagcgttgaaagcggcctgactgagcatgtgtacttcgtcgatgatatagaccttgtatttccccacttgcggcgggatacgtacctgctcgatcagcgagcgaatgtcatcgactgaattgttcgatgccgcgtccagctcatggatattcaacgaccgttgctcgttaaacgaccggcacgactcgcacgcattgcatgcctcgcccgcgggcgtcagattcatgcagttgattgtcttggcaaagatacgcgcgcacgatgtctttcccaccccgcgagggccgcagaacagataagcatgtgccaacttattgctcaggatagcattccgcagcgtagtggtcagagatttttgcccgaccacgctgttgaacgtcgacggacggtattttctggctgaaacgatataattttccattttcttgtgttgccggacagcgatggggcgagtatgtatgcacaccccctgacggtgttttgtatctgccgtgaaatccggtttgttttcttgcaaaggtatggaatatttttcatacttttgcacaaacttctcaacagatatgtccgaaaaagaaaatttctatacgaaatatctctccaagttgaatctctacgtggtcgtgatcgccgtattcatgatcattacgtttgtggtgggcgacagcaacctctatgtacgctatacgtacgatgataaaatccgcagccttgaacgtgagattaagcattaccggaaagaaatcgagacgaatcgccggaagctcgaagacctgcatacgagcaaggagggattggaacggtatgctcgcgaagagttttacatgaaacgggaaaacgaagatatttttattatccaagactgatggatttacgcatacgcacatggatttatatgttttcgggggcgctcgtgctcgtcggggcattgctgtatatcactcaatggaggtatgccccctggctcttcgcggtgggagcggccggcgtatcggtcagttacttgaccgcaccgcagaacgaaacggattttcgcttgcgacggttgcaccggctgaatatgtttgccggaatcgcgatgatcgtcgcgtcggtgtttatgttcaaacagcgtatggagtgggtgccttgccttttgattgccgcgctgattcaactgtatacctctttcgtcgcgaaagaccggaaataagtaacccgtttttagcaatctttgccaaagcatccaaaacgatcaaacattgaagtcatcttgactttttcttaccattcacttttttgaatagaattagtataaacgcaggtatagttccatgtttactaacttgccagtttggtgtcaaacctgtttaatacgcttctgtatgagtccatccacgcattgattttttcgatgctatatctctccatgtaaagaagttcatcaaggaaatcctcatcccattgtcttcctctccgcttatcgaaggccacgtttataaaaaccttgtgttttcggctttgttttctttgtcttcttattatcagtatattatagggtttgagccatgagaatagttctcggagtatctttgagatgtcatagagatcgttgtgcgagcctgaaacctaagagggcatggtaatcggtattctctgatggtcagtaatatgtatggtgtttgtggtctttcgtttcttacgctcttgataaccgcagcactccctaccgcgaagggtggtgatgtgactgccatccaagtccatgctggacatgtccaaagaagacttgtaacattccaagattatgctccatacatttttctattcactgttcctaggccacttgcgaaaatggccatatacggttttgtaatgcaacaccgtccttgtgaagctggaggagacaggacgcatgtgccactggcagtctggctttagcttatagaggtatgacctccagcaaatcacttaaggtcacgagtgaaaatgctacacttgaataggaatttctcctcatttttattgttaatacgcataaaaacgttatttttgcgaacatcgaacttacagacagttctctacgacatgggtggaagttggaatccatcagctgtgatggaacgtgaactatacattacacggccagtaaataatatgaattaggcacactgttccaataagaaaatttggatgcagtctctattttttattcaacaggcatgaaatcagggaaatttatgtaagccgtagaattaaaatagtaagataggatcaataccaaaaacatatttaatatgatagaagtggcgtgggcacagagtacataacctgtagtaatataacgaaaaaaggcgagttgccccgccttgtttgttttcacaacggaataatccttattgtgacttgcttgaaaactgtggcaaatataaagaattaataacaaacaatcaaataaaacaacaagaaaatgaaaacaattcttggattagacttgggaaccaatagtattggttgggctaaaatttctattgacgacaatggaaattatttacgtgacatccagctgggtagtcggattattcccatgagtcaagatgtattaggcaagtttgacaatggtgtgacggaatcgcagacagccgttcgcactggttttcgcggtctacggaggataagggaacgttctttgctgcggcgggagcgcctgcacagggtattgcacgtaatgggattcttgcctcctcactatgattccgctattgggtggaacaaagaagaaccctctacttatggcaaattcctcaatcacggcgaaccgaaacttgcttgggaacgtcagggagatggctcaatgcgctttcttttcatggattcattccacaagatgatggaagacttcgcccctcatcagccggcattggtcgcagacgggaggaagattcctcttgattggacgctctattacctgcggaagaaagcacttacgcaacctatcaagaaagaggagttggcttggatattgcttaatttcaaccaaaaacgaggctattatcaattgcgtggagaagaggaggaagagaatccaacgaagcgtgaggaataccatgaactgaaagttgtcagcgtggaagctgcggaagaaggaaaaggaggcaacacgtggtataacgtaaagttggaaaacggatggatatatcatcgtcccagcaagattgatttgagcgattgggtagggaagacaaagcagtttattgtcacaatggaatatgaggcggacggaataacactcaagaaaaataaagaaggagaagtaaaacgttcgttccgtgtaccggacgaggatgattggggattgcggaaaaagcgtacggagagccaactggaagcatcgggcaagactgtcggtgcttttatctacgaccatctgctggcagaaccggcagacaagattcgtggaaattttattcgtaccatcgaacgcaaatattataaacaggagttagcggatatcttacgcgagcaaagcaagtatcacgaggagttgcaaagcaagaagatactggcagattgtgcagaggaactttacagaagtaatcaacctcatcgggacagcttgctgaaaaaagatatggtttacctgcttctgacagatcttatcttctatcagcgtccgctgaaaagcaagaaatcactaatagccaactgcccctacgagtattatgaatatgtggataaagaaacgggggagataaagcgtcagggaatcaagtgtgtagcaaaatcgaatccttattatcaggagtttcgtttgtggcagtttgttcttaatctccgactgtatgacagaacagaagacaaggaagtgactgcggagtatctgccctcaaaggaagattatgcccgattattcgtctatctgaacgatcgaaaggaaattaatcaagagactttgttgaaagatttcttcaaattgaagaaagtaaagcagagaagcgagaaggaattccctgtccgctggaactatattgaggacaaagagaaaaaatatccttgcaatgaaacacgccatgaactgcttatggcacttgacagggctggtatggaacgtagctggctcgacgatacagcacgtcaatatcgcctttggcacttgctctactcgatagaagtaaaggacgaggccgagagagcgttgcgtaaactaaaggacgacgatgagtttgtcagcgctttcttaaaggtgaaaccattcaaaaaagattatggagcctactctgagaaggcagtaaagaagctgttggctgtcatgcgcatgggtagtcactggtgcgaagatgatatctgtaaagaaacaaaggagcggatagagcatatactacaaggggatgtagaagagaaaatcaaagaacggatgaaccatacagcttattcgttaggtgaactgtccgatttccaaggtttacccgaatggttggcatgctatgtggtatatggtcgtcattcggaggctacagatataaagcattggaaaactccggaaagccttatggcatatatcaatggctttaaacagcattcgcttcgcaatcctatcgtggagcagtgcatcctcgaaacactccgaacggttcatgatatatggaaggaagccggacatatagatgagattcatgtagaacttgggcgtagtatgaagagtacatccgatcagcgtgcccgtatgacagagaatattcttagaaacgagaatactaatctgcgcatcaagagtctgttgatggaattgaagaatgacgcagacatcaaggatgtgcgcccttattcgcctatgcaacaggaaatattgcgtatctacgaagaaggggcattgcaggaattgaccaaggaagataatgattatgaggagattttcaagatatcgaagattccgcaaccttcggcaaaggagcttttgaagtataaactctggctggaacagaaatatcgttcgccttatacgggaaagcctatctctctgtctaaactctttacttcggcttatcagatagaacatattattccacagagtcggtactttgacgattctttcaataataaagtgatttgtgagtcggaggtgaatgcgttgaaaagcaatatgttaggctatgagtttatcaagaatcatggtggggagattgttcactgcacgctgttgggggatgtgaaggtgcagaatgaaagtgaatataaggctttcgtaacagagcattatgccaataataagtataaaaaggagaaactcttgatggaagatattccacaagactttctgaaccgtcatctgaatgacagccgatatataagtaaggtggtgaaaactttgctttcaaatatcgtacgcacggaggatgagatggaaacaacatcaaagtttgttgtttcttgtacaggcggcattactgacagattgaagaaagactggggattgaatgatgtttggaatagtattgtttattctcgctttgaacgactcaacgagttgacaaagtcggatgctttcggtcgttgggagaataaggagggtaaacgagtctttcaaacttctgttccgctggaattgcaacgtggcttcaacaagaaacgtattgatcaccggcatcatgccatggatgcattggtgatagcatgtgcttctcgcaatattatcaattatcttaataacgagtcggccaatagtccgaagaagcgagaagacctgcgacagcagctttgtgataagaatcgaattatccgcaagccatgggagagtttcacgcaggatgctcgggcggcattggaggacgtggtagtcagctttaaaaactatgttcgcgttatcaataaaaccaccaattactatgaacggtatggtgctgacggtgagaagactatagcaaaacagaagaatagcgagatgtgggcggtaagaaagccgatgcacgaagctaaatattatggccgtgttaatctacaaaggaaaacggaggtcagactaaaggcagccttagaggatattccttctatttgtaataaggaactgcgtgactatattaacaggttggtaaaaagcggtttaaatgctagacagttgcttgctcatttcaagagtactgattattgttggaacaagcagaatgtggataaggtggaagtatggcgattcagtgatgagaaggaaccgctggtggcaataagagaatcactcgacacatcatttgatgctaaacgtattgacactattaccgatacgggtattcagaaaatactactcaactaccttgaagcgaaaggaggagatcctgctatagcctttacgccagaggggattgccgagatgaaccagaatatggcattatacaataatggtaagatgcatcagcctattttaagagtaaggttgtctaaaaagcgtggaaaaaagtaccaagttgggcaaacaggttgtaaggctaaacagtttgtaatttcagagtctggtaccaacctctactttgcaatctatgaagatgaagacagaaaccgaacttataacaccattcctttgaatgaggtggcagagaggctgaaacaaggattatctcctgtaccggagaagaatgaaaaggaagttccattgaagttctatctctcacctaatgacttagtatatgtgccaacagaagaagaaatactgatgaaagagtgtaagttgaataagaataggatttataaatttatagactccagtggtacaacggctaatttcgttcctcataggtctgctagtcttatttataatgtagataagaaattggcagaagctttctgtaatgatgaaataatccaaaacgagtatggtgttggaagtccacagtcgaagaatcagaaagctttgacaggtgaaatgataaaggctgtctgttggaagcttgaggtagaccgtttgggaaacattattagggttattaagtaattctttcttaccaatgattaagaaaaccctttgcttcagcaatcctatctatctaagcctgcgtaatgcacaattggttttgcatttgcccgaagtagaaagtaacaatacattacctgaagcgatgaaaaaagaagccgagcgcaccatcccgatagaagatatcggggtggttgtgctcgataaccggcgcatcacgataaccttcggtactttggaagcattattggaaaacaactgtgccgtcataacttgcgacagtaagagtatgcccgtaggtttgcttcttcctttgtgtggtaatactacacaaaatgagagattccgttggcagttggaagcttctcagccattgcgtaaacaactttggcaacaaaccataaagcagaaaattcttaaaagaacatgtcctacgaatcaatactaacaaagagaccaactgtatgcgggtatgggcaaacgaagtgcggagtggtgatccggataatctggaagcaagggctgcagcctactactggcgtaatctttttacagatctccctgattttgttcgtgatcgggagggtgcaccacccaacaatcttttgaattatggttatgccatcttacgtgcagtgattgcccgggcgctggtggggagtggcctgctccctactttgggaattcatcatcacaaccgttacaacgcttattgccttgcagatgatattatggaaccctatcgcccatatatagaccaacttgttatagacattattcgccgcaatgatgatgttgctgagattacgaaagaactgaaaatgcaacttctggggattcctatgttggatgtggttgtgaatggtaagcgtagtccgttgatgatagctgcccaacagacgaccgcctctcttgcgaaatgctttgcaggagaagttcgtcgcatcagttacccagaaatgtagcttttcatgtccagcttcgaccgcttaagtgagtatcggattatgtggattcttgtattcttcgacctgcctacggaaaccaagatggagaagaaagcctatattgatttccgaaaatctctgatgaaggacggattcaccatgttccagttttctatttacgttcgtcattgtgcaagcatggagaatgcggaagtccacatgaagcgtgttcgtgcgtttctgccaaagcagggagaagtaggcattttgtgtattaccgataagcagtttgccaacatccggcttttctatggagagaagtcgaagtctcccaaagctcctggtcaacaattggagctgttctaatcttcatagatataataaaacataatgaatgtccgcatatatgcctaaaattgattatatatttctgatatacagaaatttatttcttgcgccgatccatacatccaaattattgttattaaatagtttgatggagcttttaggtacaaacacggatattcatttaaaacatacttgtttttaatataccacgaaggactttttccgttccaaatatttgtcataactccgttttttttcaggaggttcgcacaaggcctgtcttgtttcctgtgtttgttgcacgtttaattccgggagtcggccgcttcttggcttggtgcacagcgagtttaaatctcctgtctcatctacctttttgacccaatttgatatggttctcggaggattcccaaacatcaaaccgagactgtcacaagacttttttcatccattaaaataatagccaccgtgaaggtgatgaataaaatcggtttcttcgttgtttttaaataagacagaattactgattttatcttgtccgcattttgaatgactaatctttgcattgtttttttgtttacaaagatacaaactcaatatgatcaattaatttgtgcgtttattatagaaaacgaaaatcccacccttgatgagtgggattttcgttttgtagtatcattttttattttttgtaatatctatatatggttttgatgttcagtattatatagatattctactgttgttgatactacaaaggtagtagttttcaagcaaatcacaacgaatgcctgatcctggcttcaggaggcaaaactgttgttgatactacaaaggtagtagttttcaagcaaatcacaactattaccgatttgatgtagttttgaatgcactgttgttgatactacaaaggtagtagttttcaagcaaatcacaacttacggcgttatatccttctgcgagtgatgactgttgttgatactacaaaggtagtagttttcaagcaaatcacaacattgtctacatattcctttaaaccgtatgtactgttgttgatactacaaaggtagtagttttcaagcaaatcacaacgtagaagcaatatccctgcttactttctttactgttgttgatactacaaatttagataaaatcctcgagattttacaccgggcagataaaaacacaaggccgacgctctgttttctgtcccctcctctgcgtgttcttagccacaattttactatcttggaggaaaaaaaattaaaaaaataattatgaacagaactcgaacagttgccggccttgatgtgcacaaagatagcatttatctctgtattatgggatatgaccaggccattatttgggaaaatacttatggagtgcttactcccgacttgcgtcagatgcatcatgacatgagagcccatggtgtcaccgaagcagctatggagagcacggccgtctattggg

SEQ ID NO: 636 - DNA, 15891 bp, synthetic construct
  source 1..15891: mol_type = other DNA
  misc_feature 1..15891: note = Synthetic
agcctttcggtaattcattttgtatagatactttatgcgcactccatacatctgtgcaatagaatacatcgattcgcccggttggatacgatgccaatagtccttcggatacttgtctcggtctgcatgtttcaatttcttctgaaggaaaataggagtaccagccgatgggaagaagtattttgacggagcctcattgtatttacgcagttttcgtgcagaaagtcgtattccgcgttctttcagttctcttgaaagactttcccatgtatcaccttcgcgagctatgatgcaatcgagattatttatgagataaagaggatgttgagcaccaattgccacatacgatttgctttttttgcccccacccttcttgtcgtaacgatagagttcgtaaagttctataataccaatcaaacgattagcataagtaggcaaagtcgcatatccgcatgctttcagaccatgagcccatcctttgtagtcttgttgatctaatttaaaaagacgagcatagcgtggacgaagcaaaaatttcgaatggtcttcataactgtcacgcacagatgaatatactcggaaacagtcgtcacggcgatcatcatcatgatatgtacgttttcccgtccattcgtcatgacacttgataccaaaatgattgttcgacctacgagccaattcactctgtcctgcaccactttccaaaagtccctgtgccaaggtgatacttgcaggaatatggtgtttctccatctgctcgatggcaatgtctttatatttttcaatataattctcgtatgccgcattgcgtcgttgtgcactcaatgcaagagaactgattgtgaatatgacaagaagtaggtaacgcatttatttaaaggtataaattattatagttgaaaggcaagcggcaataactgctgtgcagaagatatgatgtatatttcatctatgccatagagcactactttaattggagacttctgacgacattctgattccaagagtgcctgacggcaaccgccacagggagtgactggaagagtggtaaaagaaccgtccgtgccacgagcagcaatgcaaagagccaaaattttcttatccgggtagcgagaaccagcataaaatatcgctgtacgttcagcacatataccctgcggataggaactattttcctgattactgccctctactattgtgccgtcatcgagcaacacagcagcccccacactaaaaccggagtaaggtgagtaactgcgataggtagcctttctggctgcatcaagcagcgatttctctacaggtgtcagttcttgttcttcaaccttgtcgtacgatatgcttacgtctattttcttcataacacgcctttgcttgacggaagttgatatttgtatatatcacgtttaacagccatctttatgcttcgagccaaagccttgaagataccctctatcttgtggtgctcattctcaccctcagccttgatgttcaagttgatacgggcagcatcactaaaggacttaaagaaatgcaagaacatttcagtaggcatatcgccaatacgttcacgatggaactcagcatcccatacaagccaagcacgaccaccaaaatcaagacaaacggaacagagacaatcgtccataggcaatgtgtagccatatcgttctatgccgcgtttgtcgcctatagctttggcaatacattcgccaagagctatacctgtatcctctatagtgtgatgttcatctacgttaaggtcgccctttacatgtatcttcaggtctatatttccgtgtttgccaatctgttcaagcatatgatcaaagaaacctaaaccagtattgatatcacactgtccggttccatccagatttagccatatatctatgtccgtttcctttgtagtgcgtcttacggaagcagtacgttcaccagcaaacagaagttctgtgatttcatcccacgactgcacattatcgcccagaatcaggtatttacagcccagattctgtgccagttgcttatctgtctgacgatcgcctattacataactattcgccaagtcgtagtcgccctgcatatattttgtgagcatagcggtaccaggcttgcgagttggcagattatccttagggaatgagcggtctatgcactggtcatcaaactctacattttcgcttttcagtatgtcaagcatcagattgtgtgtaggccagaaatcttcctccggataactatcagtaccaagtccgtcctgattgctgacaagcacaaactcaaaatccaatttcttacggatgaaatttaagttacggattacccctggcagaaaatggaacttctcaaacgaatcaatctgttcgtcggcaggttctacgagtatcgtgccgtcacgatctataaataaagcccttttcatacgtatcttcttaaagcagctaagagagctgtgttttcttcttttagaccaaccgtaatgcgcagacaattgccacacaatgccacacgactacggtttcttactataattccctgtttcacaagataattgtatatgccatcagcatcagtcatcttggcaaggaagaagtttgcatcagtaggatacaccttcttgcatataggaaggatagaaaatgcatccatcaacgtgccacgctcatctgtaatctgagacagatgacgctgatatattgtcagttctttcagcacatccaatgccttctgttgagtaaggatattcacgttataaggatatttcaccttattcatcagagcgatgatatctgtgctggcaaaagccattccaagacggataccagcacatcccatagccttactgaaggtgttgagcacaatcatattggggaacttatccaaatcaaggcgcaaaggacgttgcttgctgaaatcggagtaagcctcatctacaatcactataccctgaaattcacgcaacaccttctcaatcttctcgcgttcgaaagcatttcctgtcggattatttggcgaacagataaaaatcagcttcgtattctcatcagttgcagcaagaagtgcttctggagagaaatcgtagttttggtcaagaggcactttacgatactccacatcgttcacatcggcacatacctcatacattccgtatgtagggtcgatagcaaccacattgtccactcccggacgacagaatatgcggaaaggcaaatcgatagcctcgtccgatccgtttccaaggaaaatattctctgcaggcacacccttgaacggagctatctgatgcttcaactcctcctgaagagggtcgggataacgattaataccattagggaacgggttctcgttggcatcgagaaacacatcagctttcattcccttaaattcatcacgagcacagctatacggtttcaaagcccatatattcggacgtgtgagttcttgtagtgatttcatatctgttgaagcatttatatttattattgaattgctttaagacgtacagtcatagcacgcttgtgagcatcgagttgttcggcaccagccatcagttccacagccctaccgatactgcgtacgccctcagcagtaagttcctggaaggttatcttacgacagaaagaatcgagattcactccgctgtaagcttttgcataaccagaagtcggcaaagtgtgattggtaccagaggcatagtcaccagctgattcacaagaataattacctaagaacacagaacctgcattcactaccctgtcagccaccttcatataatccttcatggcaagaatcaggtgttccggagcatattcgtttgttatgtctataacttcctcaagattattaaccacaatgatgcggctatactgcaacgactgagcagctatatcttttcttggcagcagtgccaactgacgttccacttcgttattaacatcttctgccaacttcttactgtctgtaaacataactacctgactgtccacaccatgttctgcctgcgacagcaagtctgctgccacgaactcggcatttgcagagtcatcagccataacagccacttcgctcggaccggcaggcatatctattgccacatcgtgcaggcttacttcctgttttgcagccgtcacaaactgattaccaggtccgaatatcttgcttaccttcggaacactctctgttccgtaagccatagcacctattgcttgaacaccaccaatcttatagatgcggtttacaccggcaatgcgggctgcaacgagtatggcagggtgcaacttaccctctttgtttggcggactgcacagtactatattcttacatccggcaatcttggcaggggttgcaagcatcaggacagtagagaagagcggagccgttccaccgggaatgtagagtcctacattctctatggcaaccgacttctgccagcagacaactccaggctgagtctccactttctttccgtggaaaacctgttcacggtggaatttctcaatattatcatgtgccaactgaatagcacctttgagttcttcaccaacaagttgttctgcctcatccatctcagcttccgaaacagcgagattagacaaagccaccttgtcaaatttcagttcgtattctttcacagcctcatcaccacgctctctgatatcggaaagcacaccatgcacggtgtctctcagttcagaggcatctcgatgtggtcgctgcagatacgagccccattcgcttttatcaggatatagaattatttgcattataaaatcatcttttcaataggagtaacaagaataccttctgcaccaagtgctttcaactgacctacaatttcccagaattgtttttcatcgagcacagaatggactgagcaccagtcttcgtctgcaagaggtataatcgtaggactcttcaatccgggaagaaccttagtaatagcagccaactgagattttggtgcattcatgcgcacatatttctttccgtcagcaataaggacagactcgatgcggaacaggagctgttccaagataccacgtttctcatcgtcaagatttggatttccgataagaagagcctcactctgcatcactacttcaacctccttcaggttgttgcttaccaaagtagaacctgaactgacgatatcaaaaatgccatcagcaagaccaatacctggagcaatttctaccgaaccctgaatcacgtggatattgatgtcgatacctttttccttcatgaacttacgcaggatgccaggataggaagttgctatcttcttaccattaaaccactgaactccggggtactctattgcctttggaatagccaaagagatacggcatttgctgaagcctaaacgtttcactacatcagcctcgaaaccgcgttccacgaactcattctcaccaacaatacctatgtcagccacgccgtcagcaactgtctgaggaatatcgtcgtcgcgaaggaatagtacttcgagaggaaaatttgacgactgtaccaacagggtgcgttttgtactacttacttttattcccgcctctttgagcagattcattgtatcttcataaagacggccttttgattgtactgcaattcttaacatatatcttttgttttactaataccttaattttacttgaactgaattatgctattacctgtcagaatggtctgactgatactgatgtatgtgccaatatgcggagtcttctgttgcggattgtcatgtttaaaccaatctaatatctcagcaaacgaataggcatccgtatcaaacacaatataatcggcagtaggatctagttttttgggtaagccgttcgaaacggaatgatacagattatgctcctccatcagccgcttcatctgttgtaaattatatcccttaccaacaagcataaacttcttctgtcgcataacctccataatattctcctccttctcatccttctttgagaactgattcttcagatatgtcaggaaagcctttccgtaaatagctaaagaaactaccataagcagcagaaaattatagctgaaatgctttttgaagaaaatgaacattgccttgtggaacacgatagcatatctgtacgaacttttctgtgtactctctcccttataatggagtatggtagcaggatagaacacattcttatatccagccttcagtatgcggtacgacatatcgacatcctcaccatacataaagaaggtttcatcgagcaaaccgcacttcccgaacacttcagcacgaataaacatacaggcaccggaaataacctcaatatatgatggtttgtcgataggcagatactgcatgtaatagcgtccgaacagagttgactgcggaaacttgctacccagtcccgacatcttacagaaggcagtccatggagtaggaacgccgcgacgcgactccggagccatactaccatccacacgctgctgtcttacgcctagtccacctacctcgctatgtgcatccataaatgcaacacattgcttcagagtatcctcccccactatagtatccggattgagcagcagcacatactcaccacgagccttgcgtattgccatattattggcaaccgagaaaccatagttctcggtattctcaatataataaacccaagggaactttctcctcaaataatctatcgaaccgtctgagctggcattgtcaaccacatacacctccccctgcatgccttgcaaagcacgctccacggagtataagcactgttccagatagtactttacattgtagttgactatgacaactgtcagtttcatccgttattcgttttttactacaaaatcatcttcaacaatcttcataaactcctcaatcctcttgtgggtaggcagacaatacacagtcactgccagtcccattaacgcacatagtattccagtagtattgagagtcatgaaatatgcaataatattatacgcaatacaaagtgaaaccaacataagacgaatcatactccacatatggtagaagtcaagtgcctcatccttattcatgcgacgcagtccctttgtagtattcaacagaaaaagttgcagagctaaaggcaggataagcaatgtagaaagaatacaagcacagttcaatttgaactccacatctgaaccagtctccacagagccattaattataactcctagtttacctattacaaccacaattatcagcagcccccatgccacacaactctcaatgcgcaacatcaacagtaatgaattaatccttttttccataataactatcttcgtttaagctacaaacggcacacggttcacaagcgaacgtcccaaagtagcctcatcagtatattgtaactcatcattaatactcaatccgcgtgccagaaccgacagtttcagaccgcgcttctcgtcagcaagcacattcgacagcctcttcgaaataaagaaattcgtcgtatcaccctccatcgtactgctaagagccaggataacctccttcacatcactctgctccaccctgtcaacaagactttgaatctgcaagtcgcctggtcctattccgtccatcggagagataactccacccagcacatggtacagacctctgtactgcatagttgcttcgatagccatcacatcctgcacattctccaccacacagataaggctcttatcgcgctgcggactggcacacacgccacacacctccgagtcgcttatgttatggcacaccttacagtacctcacctcatgacgaagtttactgatggcactacaaaacccgtcaacagcatcttcctccatacgtaaagtatgcagaacaagcctcatggcggtcttccgaccgataccaggaagcttagcaaattcgtcgacagcacgccctaaaagcgcagaagtatattgctgatccataaatcagctgcaaagatacggaaagtcgagcgcaaaataaagaaatgctatcgttttcttttgaagaaattagaaatctttctaaaagtaacataagtcttatatgcagtaatagcataacctatatatcgcatataagaaaagtcggaagagaagaacatgttattagaaggtaaaaccatatctactgcatccctcttcagagcctttgtctgctgatggagtctcttagcaaccttgagtttatcgttacgcaactcctccaacgaggaatatactgttttattcttctgtgccatcttcttcatcctcctttaaaattgactgtgaaatacttctgacaataggtccttcgaccagagtcttacgcatcatacagaatactacaataacaagaagcaaaatgcctcctaccaagtaatatgcggcggtttcgttacctatccacgcacttagcgtcttcaccagaccggtaccgagaaagaataaagcaccgatgccaaagataatgacgatacctccgacaacaaggaaagtggtagcgactgacactttgtcaatcgcttccaactttagatactgttgcaccaaggtgattatttcctcagtttcctgaggcaccttttttgcatcgccttcgttattcagcgtcataatcttcagcaggattagcctccttcttcttaccgatagacttgatttcagtaagaatcttgttcatctcctccttgttcagctttgcagcatacttgtcaataacatccttgattttcttacgctgatcctcacccttttcaggagctaacagaagaccacaagcagcgccagcaatagcgcctcctacaaaagcagcgataatagctgcaccattcttacatgccatagttttagagttttaaaggttaaaaaattaaaaatgcacccaaatctacaactttatccttaataaaccacaaaaaattataccttttaacattttttgcaataaaaacactatttaccacaaaaattagcactaaatttgtgcaagatttttcaacccactaaaagtattataaaaaatgaagaaattttcttttggcattgcacttcttgctgcaattgcacttgttggatgtaaatcatctgaaagcagctacaagaaagcttacgaaaaagctaaggcacaggaaatgggacagactacaactcagcctgtaacagtaactccagtacagacagtaactccagtacagcagaacgtcactccagttgacaactcagacctgcgtacagaacgtctgaacgttatgaacaacggcactctgaagtcatacaacgttgtttgtggttcattcaagagtcttgacaatgcaaacaaccttcgcaacacacttgcaagcaagggatacagcgcacaggtagcacagaacccagacacaggcatgtatcgtgtaatcgcatcttcattcgaagacagaggctcagcagttagctcacgcgatgctctccgcgctacatatccagacgcttggattctcctccgcgcatattaatacatatattcaacatataaagaaaagactacttctcagcgaggtagtctttttgtttttttaggactgtattgtaaataccgtccttggactattcagaatcgtttgcagaagatttatctgtgaactcataatcctatttttttgtactttcagttcacaaaagtgcaaacatttttcgatacttccaaagatttttgcaattatttttcattctttattccctaactaaccactaaactattatctattaactattatctatcaactattaactattttcctcttacatcccttcccatgcctctaccatgttgcatctttatatatttacagaaaaagatctcaaaaaaatttgaaaactctgaagatacacatatatttgcatggtaaacaatctaatacgaaaaaaaggcgagttgccccgccttgaatgttttcacaacggaataatccttattgtgatttgcttattagtatctgctgcaaagataaatataaataatataattgaccaaataaaataaagaaaaatgaaaaacattttaggacttgacctgggaaccaatagtatcggttgggctttcgtatctacaaatgacgaagggaatactatacaaaacttaaaattaggtagcagaataataccaatgagccaagatgtactgagtaattttgacagtggtgttaccaaatcacaaacagcagagagaactggttatcgtggaaccagacgtttacgtgagagatgcctgcttcgaagagagcgtttgctacgtgtactccatattcttggatttctccctaaacactttgacaattctatcggctggaacaaagatgataataagtcttatgggaaattcatagatgacagtgaaccgaaaattgcatggagtaaaaatgcagaaggcaaaatgcaaattgtgtttactgaagccttcaatgaaatgttagacgatttcaagagccacaatcctaatcttataaatggcggtcacaaagttccgtatgattggactatttattatctacgcgacaaagctttacgcaagcccatcagcaaacaggaactcgcatggattcttttaaatttcaatcagaagcgtggttattatcagttacgcggagaggaagaatatgaagaagaaaatgaacaaagcaaacttaaaaaaatagagtatcacgaactgaaagttgacagagtcgagactacagaggaacgacgcggtgacgatatatggtacaatatttatttggaaaacgggtggatatatcgacgtccaagtcgtattccacttgacgattggacaggtaagaaaaaggaatttatagttaccacagaatacaatgaggatggaagtattaaattagataaagagggcaacgagcgtcgttcattccgtgcgcccaaagaagatgattggggattacaaaagaaaaaaactgaatcacaacttgacagttctaatcagactgttggaagctatatttaccatcatttactatacaatccgaaggataaaatcaggggtaaatatgttcgaactattgaaagggcatactataaacaagaactaaaagaaatcctgaaaaaacaatccgaattcattacagaactcacgaattcgactttactcgaacaatgtatatgtgagttatattcaacgaacaaggcacatcaggaaagcttaagaaaaaaagacatatcttacttattagttgacgatcttttgttctatcagcgccctcttaaaagcaaaaaatctttgatttctgattgtccttttgaacaatatgaatatgctgataagacaactggagagataaaagttcaacatattaagtgtgttgccaaatctaatccttattatcaagaattccgtttgtggcaatttatccagaatctgcgtttgtatagtaatagtgtcgaagaacaagaagttacaaacgattatctcaaaacagaagaagattatgtacacctttttaaatacctgaatgacaaaaaggtaatttcgcaggaaaggcttctgaaagacttctttggtttaaataaaccaagaggcaaagacacggtattccctatacgttggaactatattgcagataaaacatatccatgcaatgagacacgaagcaaaatgctatcagctctggacaaagcaaatatttcgacagacattctgaatgacaaatatacagaataccgtctatggcatttgttatattccgttgaagatattaatgaaataactggagcattaaccacctttgcagaacaatacgacttgccagtcggtttcgtagatgctttcaaaaagatttcgttcaagaaggaatatggagcatattcagaaaaggctgttaagaaacttctatcagttatgcgaatgggaagtatgtggtctgcagatgcaattcctgacaatatacagaaaatcatcaatggttcaattgacgagaaagttaaagaaagaatgagtcatcaaaacattattcttgatgacatcagcaaattcaaaggcttacccgtttggttggcttgttatgccatatatggtcgtcacagcgaatcaaaagatattaccaaatgggataccccccaagatcttgcaaactttataaaaaatttcaagcaacactccatgcgcaatccaatcgtagaacaatgcatacttgaaactctacgcactgtatatgatatttgggttaaatatggacatatagatgaaatacatgtggaattgggtcggagcatgaagagtactgcagaccaacgcaaacggatgacagatacaaatactaagaacgaaaacaccaatctacgtatcaaagcattgcttatggaacttaagaacgatccgacaatatcggatgtgcgtcctcaatcacccatgcagcaagatattctaaaactatatgaagaaggagcactactaaatcttgataagaatgacatcgatttcaaagaaatatcaagcatttcacaaaaatcatcgccaacacaaagtgaactgacaaaatacaaactatggcttgaacagaaataccactctccatacacaggcaaagccatctcactgagcaaattgttttctcctgcatatcaaatagagcacgttatacctcagggacgttactttgacgactcatttaccaataaagtaatatgtgaagcagaagtaaatcaacggaaatccaatatgcttggcatggagtttataaaaaagtgcggtggagaaataatccattgcccgaccattggtgacgtaaaagtgttgacaacagatgaatataaggcatttatagctgaccattatgcgagcaatcctatcaaagctaagaaattgatgatggacgacattccagaagagtttattcagcgccaaatgaacgatagccgttatataagtaaggtcatcaaaggattgctttcaaatgtagttagagaagaggatgaagtggatgccatttcaaaaaatgtaattccatgtactggtggcatcacagatcgtttgaaagatgactggggattaaaacatgtatggaacagtattgtttacccacgcttcgagcgcatgaaccgtctcacaaattccgaggatttcggacactgggaaaacaaagatggcaagcgagtattccaaacaaaagtaccatttgaattatccaaaggttttagtaaaaaacgtattgaccatcgccatcatgcaatggatgcactcgtcatcgcattagcaacacgaaatatagtaagctatctaaacaacgaatctgcacgcgacactaaacgcagagagaaccttcgtcagcttctttgtgacaagaatcgtattattcgaaaaccatggccaacatttacccaagatgtgtatgaagcattacaaaacattgtggttagtttcaaaaattatgttcgtgtcataaacaaggcaagcaactattatgaacactatgacgaaaacggagtaaagacaaccatatctcagaatagttcagaacaatgggcaatacgcaaaccgatgcataaagaaacggtcttcggattggttaatctccaaagaaaaaaagaagttccattcaacaaagcaatagagcgaatttcatctattgttgacaaagaacttcgctcgacaattagagcgatgataacagcaggaatggatgtgaacaaaataaaaaaatactttaaggatcaaaattaccaatttgcaggcaagccagttagcaaggttttagtctattattatacagatgagaatgaaaggatggttgcaacacgcaaaccacttgatgacagtttcgacgaaaagaaaattcatagtattaccgatactggcatccagaagatacttttgaattatctcgcatccaaaggaaatgatccaaaacttgctttttcacctgaaggtatcatggaaatgaacgaacacataactgactataattccggaaagaaccatcaacccatagtccgtgtacgacttgcagaaccgaaaggcgaaaaatacaatattggcacaacaaagaataaaaataaaaagttcgttgaagctcaaagtggcacaaacctattttttgcaatctacgaaaaagaagatggtactcgttcattccaaaccattcctttaaaccaagttgtagaacgaatgaagatggggtggacaccagcaccagaacaaaacgaaaatggcgacaaactcaaattctatctctctcctaacgatctcgtttatgttccttctgaagaagagcgaatgtccgactcagaattaataaacagagagcgtatatacaagatggtatcagcaacaggaggaagagcattttttattccagtgactgttgcatctgttatagcaaatggcattgaatttcaatctacaaataaaattgaaaatataaacaatgtttccatcaaatctatatgttggaaacttgaagttgatcgtcttggaaacattacaaagattgttcgatgattaaaaaaactctatatttcagcaatcctgcatatctatcacttcgtaatgcacaacttgtggtaaaatcaccacaagttgaagaacggaacgatctgactgatgccacgaaaaaggatttagagcgcaccattccaatagaggatattggagtggttgtgcttgacaataagcggataactataacatctggtgttatcgaagcccttgtagcaaacaatgcagccgttattacatgcgacagcaaaaatatgccgacaggacttatgttgccgttaatagggaatacactacagaatgaacgcttcagggcacagttagacgcatccgttcctttacgtaaacaactgtggcaacaaaccataaagcagaaaatcatcaaccaagaacatatactgcatttatattctaaagccaaaactggttgtatgaaaacatggagtacagaagtgcgcagcggagaccctgacaatgttgaagccaaggccgcagcatattattggaaaaatgtctttgaagattattctgatttcgttcgaggacgagaaggagagccacctaacaacattctaaactatggatatgctattctgcgtgcagtcatagcacgtgcacttgttggtagcggactcctccccacccttggcattcatcatcacaacagatacaacgcatattgtttggcagatgacattatggagccctatcgcccatatgttgatgaactggtacttgacattgttaagactgaaagaaacatttcagaacttactttaaatataaaagccagattactaaatatacctgtcattgatgtcatgattgacggaaaacgcagtccactaatgatagcagccggtcaaactacatcatccctttacaaatgctttagtggcgaattgcgtcaaataagttatccatctatggtttaaaagcaactatgtttagagccctctctcggttaagcgaatatagagttatgtggatattagttttcttcgacttgccaactgaaacgaagaaagataaaaaagcttacgttgattttcgtaagaatctgcaacgcgacggcttcaccatgtttcagttttctatttatgttcgtcattgtgccagtaaagaaaacatggaagttcatactaaacgagtccgttcattcctgccagagtatggaaaagtcggaattctcagcataaccgataagcagtttggcgacatggaaattttttatggcaaaaaagcacaaatacctatagctccaggtcaacagttagaactattttaaaataaaaatcctgccacgaagcaggattttcttagtcataaacttcattttttattttagtcacatccattcttattatctgataattaatcatatataaagaatgagttgtctatgactatgcaaagatactaatttgtaagcaaatcacaac

SEQ ID NO: 637 - DNA, 15349 bp, synthetic construct
  source 1..15349: mol_type = other DNA
  misc_feature 1..15349: note = Synthetic
tccgaacatcatgtgggcggtgcggcgtggcaggcggaacaatgcggcagaggcgtatgcggcaacggccttgcccagcgtgccgaagaaaacgatggcaaagacaacccagagtatgcggactccctcgaagagcagcctgacattaatcagcattcccacaccgatgaggaagtagggaatgaagagtgcgttgcccgtgaactcgatacggctcatcagcggtgatactttcggtatgaagcggttcagtatcagcccgagtagaaggctccgaagatgccttccacgcctatggcagcagacagggcagccgagagaaacatcgtggcaaggatgaaaatgaactgcatgacggcatcggaataacgccggaggaaccaacgcgtcatccgggggatgaccatgaccagaccgatgctgtaggctgcgagcttcaggatgaagaatagccagaacaggccgcctccgtcgccctgcgccgagttcactacggtggccatgatgacgagtgccagcagcagcgaaagcatcgacgaacctacgctgagagtggagctcggatgccgcgtcagtccgtatcgcccaacgatggggtaggctatgagcgtattggaggccatgatacagcctaaaaggagtgccgccgccggtgtataatccaaaagaaccgtgccggtgaagtaggtcagcaggaagggaatggagaatgtaagcagcccgaaagtgataatctgcgccttgttcttcttcattccctccatgtccatttcaagtccggcaaggaacatgatgtaatagagtcctacctttccgaaaagctcgaacgaagcgtcgcgctccagtatgtccagaccgtattttccgaccaatactcctgccagtaccatcccgatgatgtgcggaatacgcagtctgcccatgatgatgggggagatgagaatcatcagcaggacgacgaagaagattagtgtcggatccgtgatgggaaaatattgtgagaggtgcagcatcgggttgtgaatgtaaataagtgcaaaggtagcaaaaagttgcgtgttgtgggttgagagttgcgagttttttgtaattttgcaatggaaatatttttataataaacaaataggcttatgagagtagcaattgttggtgccagcggcgcagtgggacaggagttcctccgtatcttggcggagagaaactttccattggatgacttggtgttgtttggttctgcccgttcggctggtacgaaatatatatttaagggaaaagagtatgaggtaaggctccttcagcataacgacgatttcaaggatgtagacatagccttcacgagtgccggaggcagcacgtcggcagaatttgccgacaccatcaccaagcatggtgcggtgatgatagacaactccagccagttccgaatggaagacgacgtacctctggtcgtgccggaaatcaatcccgaggatgcgctgaaccgtccgcggaacatcattgccaaccctaactgcacgacgattatgatggtggtcgtactggctccgatagacagggtcagccgtatcaggaagatacacgtcagcagctatcagagtgcgtcgggtgccggagccgttgccatgaaggaactggagcagcagtacagggagatcataaacgacggtgaggtaaagaccatcagcaagtttccccatcagctggcctacaatgtcattccgcagattgacaagatgacgccgaacgactatacaaaggaagaaatgaagatgttctacgagacgcggaaaatcatgcactccgaggtgcgcacctcggctacctgtgtccgcgtgtcgtccctgcgtagccactctgagtcggtctggttcgagacggagcggcctgtttcggttgaagctgtccgcggggctctcaaggccgccccgggagttacgctggtagacgacccccaaaactatgtctacccgatgccgctggaaagtgccgggcacgacgacatctatgtgggccgaatccgcaaagaccttgccgacgacaacggcaacacgctgtggctgacgggcgaccagatacggaaaggagccgccctgaacgctgttcagatagccgaatacctcatcaaggtgggcagcgtgaagtaggcagacttgcgcctgttagttccgataggggagtctttccccggccggcaggttgggagacgatgatatggcgattcgccggactcgggagaccgcgttccggcgaattttctctttgtcctgtaacagccctccaaggacgtgccgtcttccgaattccaagaaaaggggaatttatcttttttgagaaaaagtctgacgattatttggtggaacaataaaatattcatacctttgcaccgccttagaagataagggcgtttagctcagctggtttagagcatctgccttacaagcagagggtcggcggttcgaatccgtcaacgcccacaggggtggttccctgtgacctttcggggttgcagggatatttttagggcgtttagctcagctggtttagagcatctgccttacaagcagagggtcggcggttcgaatccgtcaacgcccacacaacttcaggaagccttacagcattagctgtgaggcttctttcgtcttgccattcttttgtttcccttgcccgtgtagggcactcttcatggattttctcttagtgccggattttcgttaagccttggcggcaaagcgaaagtaccgttttcgcagtgcgaaacgggcactttgaccatgtgaaaacggcactttcgtctggtaggtaggaaacagccgcatagtcataaaatgttaggggggaatccgataaattctataaaaaatcataactaatgagtattgcagcgttttttcggaatgattaactttgcagccagattaatatctattaaacataaaggagacaaaatgatgaaatctatttttcgggcaatcgcactaacgttgctgaccacggcggccagtgtgtcggctcttgctgctgactatgtgaaggtgagcggcaaagacgggaaggcgacctacttcgcactttcggcccagcccaaggttacgtttgaaggaagcgaactcgtcctgaccgccgggcaggagacggtcaactatccgctgaccgacgtgctgaccttcgagtttgccgacgagacggcaggtataggctcagcctctgccaatggcggaaacgtcgttttcaggcttggcagttccgtcaggggcgagggcctgcagccgggcagccgtgtggttgtctatggcgtcaacggccagaccatcggcgcggccgtcgcggatgccaacggctctgtggagatttccctcagcggacaaaccggagtatttatcgtgaaatcattaaccaagacattcaaatttatcaggaagtaaatgaaaaagttttttaccttagccattgctgccctcttgggcacagcctgcatgcaggcacagaccgtaaccatcaacaagaaggacggtacgaccgttacatataatgccagcgaagtagcgaatatccagttctcgcctaccgcccccgatacggtggtactccgcgaggttacgggctacctgacggtcagcaccaaatacttcaccgatatgtattatggcgatgctgcccagattaaggtgatgcaggcaggcggcaagaatcttgcccgcttcagcgatgcccagtggggcaacgggcttttcgagataacgatggacaaggggcagattgccggttcgggcaagatttccattcccagtcagcatggtggcgacgtgaaggagtacgacgcgaccatgagcggcaagatgaccgaaatcgccatttccgttcccgacctgatgggtggggcgaccatcaactggcattacggcccggctccggctgcgctgaaggtttccggcagttatacgggcatcaactcgctgaccgtcggcacccagttcggcccttattcctcccccagcgttacctaccagattaccgccaacggagacggcaccatcaacgtaacgattcctgaagagaactatacgggcgttgccgtgatgggcgacatgaccctcagcagctatatggtgaagaacctcgcttacgacgaaacgaccaacagctactcgcgcgactacagcaacgacggaatcacggtacatctcaaggcggtcaacggtggcacaacgacgatggacaaggactacgagttcaaggcgacgagcaaaatcgtcgttactccgggcgagaatggtgcactgaccgttaccaataactaccagataggcaacatgccattccccatttcggccacttatacaggtacaaagagtaaataagacaagcaatgcgcaaagcatttcactccataaagttcgttgcaggctgtgccgtcgctctgatggctacagcctgcaatggcattttcgacgacgtttacgatgaacgcccttcggcaccggccatcacgggagggcagttgtacgtgaacgccaccagttggagagactggtactacatcgacttcgactcgctccggcagtatgccgaacggaaagacacggcaggactgataaaggcgcagacagaattcagagcttatcccatccccatgggacgggcggcagcccccaccgacgggcagacggggctgtatggctattggttcgacgtcttcgggaagggggtatccaactacgagaagcgcagctttacgcctaccgaccggcagcccgagccaccatcgtggagcatagccgtccaccgcaacaacgtgaggacgaacggcggtgcggtgctcgaaacccactacagctcgatgggcgagctgcccgagagcagttcggccttcacgggagcgactttccatagcgacgaatggacggagaccgaggtttgggcagaccagtcgcagatgcttcagagtctggtaggttgtcagggcatctccgtcaacaaggtgctgtcgtcttggctgaagctggagatcccccccatgcccccgacgttcgcgcagaacagccacgttttcatcatcaggctgaagaacggcaactgtgccgccgtgcagctggctaactatatggatgctgagggaacgaaatgctggctgaccatcaattataaatacccgtactaaaatctccttgccgccccacggcccattctcttattatgaaacggacatctgtcatcatattagcgttagcctgtctgctacccttggctgtgcgggcagacgtgttgcccgactccatcttcggttctgtcgagatggagcaggtggtagtaacgggcacgcgcacgcccaagctccttgccagtacgcccgtgctgacgaaggttatcacggccgacgacatccgtaaggccgatgccaccaatctgtgcgacctcctgcaacaggtcgttccgggcgttgagttctcgtatgcgatgaatcagcaggttcacatcaacctgtcgggcttcggcggacagggcatcctgatacttatagacggcgaacggctggccggcgagacgatggacgacgtggacttcacgcgtatagcgatggacaacgtagaccatatagagattgtgaagggtgcagcctcggcactctacgggtcgaatgctgccggcggtgtcatcaatatcatcaccaagaaggccgtcctgccgttcgccctcaacctgaatgccggattgcgcgccacaacgagcaacgttacgggttgtcgtggcagctcggcaggggcaggtggagcaacctgctgaccgtcaaccgcacttccgtagataactacaacgtgcacaatggtgaccatcccgttacgcgaatcgtctctaccatctatggcgatgcgacgtggaacttcaaggagcagctcacttacatgccgaacgagagcctccgcctgatggcgcgtgcaggctatttctaccgtcagctggtcagaacggctgaggtgcccgaacgctaccgcgacttctcgggcggagtacgtggtacgtggaagcctactgcacacgacgacatcgaccttgcctacgccttcgacgagtacgacaagtcggactaccagcgcatcgcacggctcgacatacgcgactactccaacgtgcagaactgcttccggctgctctacagccataccttcgggagcggcgacgtgctctcggcaggggcagactacatgcacgattacctcttcaacgtcaatctggaggggcgcacgcgccaacaggactctttcgacgcctttgcgcagtacgactggagcgtggacagccactgggaggtggtgagcgcgctccgctacgactacttttcggacgggcacgtctcacgtctgaccccgaaggtgagcctccgctatcagcccgtccgaaacctcaacgtccgtctgggctacggaatgggcttccgctctccgacactgaaggagaagtactacaactttgacatggcaggaatatggatagtggagggcaacccgggcctgcgcccggaggtgagccataacctcaacgtatcggccgactataccaaaggacgctacaacattaccgtcagcggatactgcaatgccatcgaaaacaagattgccacgggtgcgcccttctataaggaagcttccgacatcatgccccacctgcctacctgaaccttgacggctattcggttgtcggaggcgaggcaactgtgcaggcacggtggacgaacggcatcacggcgcggctggcttatgcctacaccgacgagcatctgccgaaggacaagggcaacaatccggtgaacagccagtacattccggcccgcaagcactccctgacggggcacatagactgggaccgtcaggtctcgcacaactacgggctgaacatcgggctagatggccgcttcctctcggcggtcgatacgcaggagtttgccgactactacgacctctcgaaaggtttcaacagcatccactatcctgcctacgcgctctgcaagctatcgcttgtgcaacggttgggaaaggcggtgaaggtgaaccttgccctcgacaatctcttcaactacaagcccgaatactattacctgaactgccccctgacggacggcatcaacctgatgataggcctttcggtggatgtagacaaactgttttagacaatatagggaaaccaaagaagaacgacgaaatatggaaaagaagaaaatctactggtggcggaccatcgcctcgtttgtactcgtattgttcaccatgcctctggggcatgcgatgatgatactgatggagaagttcatgcagcccgaagcggtgcactatgcaggctttgcgttaggattcgtcgggttggccatggtcatagtgggcgtattcgtaaagggcgacacccggcagaccctctgggggctgataggcggactgctcttctggacgggatgggtggagttcctcttcctctactatgcccgtcgctacggagtgcaacccgagatagagaacggcgagattgtaaccaagccggaatacctcattatgccagcctcgttcggcatgtggatgatggtgatgacgatgtacacgttcagcaccaagaacggctgcgatttcatcacgtggatacagaaacgactcttcggaagccgtcgcaaggagatagcctttcagcccatgacgcgccacacctccatcgtaacctttatggagctgaacatgatgctctgggctttgtatctgctgctgatgttctgctacgacaagaacttcctcggcgaccatcatcccgtaacctatctggtcggagcaggctgcttcatcggctcgctcttcatgttcggcaggcagctccgcatagccgcatggggagccaatatccgcatggccatagccacggtgataatattctggacgcccgttgagatactgggtcgcatcaacttcttccgcgagttttgggtcgagccggagaagtacactacgctcatgctctgtattcttgctgccttcctcctattgttggtctacctttgggcaaggggtgcaaagcggaagcggagcagctgatgcttgcaggtaggactgtcttccccgaccctttccgatatatttctcagcatagtcatccgtctgccgttaggctgtcatccccttcagcgtattatcctttgataatccgatattcggatgggggctggcagcctgacggtaaacagcataaaaccagtacataattcgctttcctgtctccattgtgccattccgtttcgcagcgtcgcttatgtcagctcttggcagacgctctccctctctccctcgttcttcggctttctgccgcaaatatgccttgctgcatcgttttgggtatagtgtataaaccgatgtggggcggtctgcaattctcgtctgccaatctccataagtttttcaatacgttggaaaagttatagtatgaggctctcgatgattgccgatataccgtcagtacgactatatccgcaggctatgtccacatatctcccagctatgttcgtatatctgcaaactatgctcatcgtgaagccctgccatcccgttcctcccttcccctgtgtttctgctatctgctttcctctgttcatcagccgtttggaacgggctgtacgaaattattttgtagattatttcttgttactatggataataattagtaactttgacactatataaaacaaacagagcgagttgccccgctctatttgttttcacaacggaataatccttattgtgacttgcttgaaaaatctgttgcaaatatagtaatttaataattaataaccaaataaatctatcaaaaagatgaagacaatcttagggttagacttgggaaccaatagcattggttgggctaaagtctctatggacgataatggtaactatctgcacgacattaggttaggtagccgtatcattcccatgagtcaggacacgcttggcaatttcgacaaaggagtaacagaatcacagactgctgtccgcacgagctttcgaggcgttcggaggctaagggaacgcgtcttgcaacgacgcgagcgattgcttagggtgttgcacgtgatgggattcctgccacctcattacgattcggccatcggatgggatcggaggacagctgccacttacggcaagttccttgaccacggagagccgaaactggcttgggaacggtgtgaagatgggacgatgcgctttctctttatggactcgttccacgagatgatggcggactttgcacggcatcagccaaccttggttgctgacggaaaacggattccacttgactggacgctctattatttgcggaagaaagccctcacgcaagctgtcgggaaagaggaactggcgtggatactgctcagtttcaatcagaaacgaggctactatcagctgcgtggagaagaggaagaggagactcctacgaaatgcgaggaataccatgagctgaaggtggtcagtgtggaagcagctgaagagggaaaagacggtagcagatggtatgacgttcatttggagaacggatggatttatcggcgcagtagtaagattccactcgatgactgggtaggaaagacgaagcagtttatcgttacgacagaatacgagaaggatggaacgacaccgaagaagggcaaggacggagaggtgaaacggtcgttccgtgcaccgaaggaagatgattggggactgcggaagaaacgcacggagagccaactggaggaatcgggcaagaccgtgggcgcatttatctacgaccatctactggaagagcctgccgacaaaattcgcgggaacttcgttcgtactatagaacggaaatactataaaaaagagctggaagccatcttgcgcaagcaatgtgagttccatgacgaactgcgcagcaaggagatgctggagcttgtgccgaagagctttatcggagcaatcagccccatcgtaccagtctgctgaaaaaggatatggtctatctgcttctgacagacctcatcttttatcagcgtccgctgaaaagcaagaaatcgctgatagccgactgtccatacgaatactatcaatacgtagacaagaaaacgggagagataaagcagcagggcataaagtgcatagcaaagtcgaacccctactatcaggagttccgcttgtggcagttcgttctcaatctccggctctatgaccggacagatgataaggatgttactgcagagtatctgccttcgcccgaagactatgtccgcctgttcaggtttctgaatgatagaaaggaaatcaatcaggagacattgctgaaagatttcttctgtctgaagaaaacaaaattgggtacggagaagagttttcctatccgatggaattatattgaggataaagagaagaaatatccctgcaacgagacgaggtacgagatgcttgcggcactcaaccgggcaggcatagaacgcagttggctggacgatactgaacggcagtaccgcctgtggcatctgctctactccgtggaagccaaggttgaggcagaaggagcgttgcggaagctgtgcacagctgcaaataaaaaagaaaaggaaaaagagactgaaaaacaggtctttatcaatgatgaagaagcctttgtcaatgctttcctgaaagtgaagccattcaagaaagattatggtgcttactcggaaaaagccgtaaagaaattgttggctgtcatgcgcaagggcagcctgtggcacgaggaagacatctgtgaggagacaaaggacagaataggacatatcctgcgaggtgatattgacgagaagataagagaacggatagaatctgccgtttcttctttcagccagcttgctgacttccaagggctgcccgaatggctggcgtgctatgtagtgtatggtcgccattctgaggcaacggatataaaatgttggaatacccctgaagacctgatggcatacatcaacggcttcaagcagcactcgctccgtaatccaattgtggagcagtgtgttcttgagacccttcggacggttcacgatatttggaaggaagcaggacggattgacgagattcatgtggagttgggacgaagcatgaagagcacggctgaccagcgtgcccgtatgacgcagaatatattgaagaacgagaataccaatctgcgcatcaagagtttgctgatggagctgaaaaacgacacggacattagggatgttcgtccttactcgcccatgcagcaggaaatattgcgtatctatgaggaaggagcattgcaggaactgactaaggatgatgaggattatacggagatctccagaatatcgaagctggcacagccctcggcaaaggaactactaaggtataagctgtggctggaacagaaataccgctcaccttatacaggcaagcctatttcgctgtcgaagctctttaccccggcttatcagatagagcatgtcataccgcagagacgttactttgacgattctttcaataataaagttatctgtgaggcggaggtgaacgcgctgaagagtagtatgttaggctatgagtttatcaagaatcatggcggggagattgtacactgcacccagttgggagatgtgaaggtcttgagcgagagcgagtacaaggcttttgttacggagcattatgctgataaccgggcgaagaaggacagactgctgatggaagacataccacaggaattcctgaacaggcagatgaatgacagccggtacataagtaaggttgtgaaaggcctgctctctaatattgtcaggactgaggaagagaaggaagctacgtcgaagttcgttattccctgtacgggtggtatcactgacagactgaagaaggactggggccttaacgatgtatggaacagcatagtctatccacgctttgaacggctcaataagttgacagaatccgaagccttcggtcattgggagaacaaggaggggaaacgggtcttccagacttcccttccattggatctacagcggggattcagcaagaaacgcattgaccaccggcatcatgccatggatgcgttggtgatagcgtgtgcatctcgcaatatcatcaattaccttaataatgagtctgccgatagtccgagaaaacgggaagacctgcggcaacagctctgcgctaagaatcgcattatccgcaagccgtgggaaacctttacgcaggatgcccgtgcagcattggaggacgtggtggtcagcttcaaaaactatgtccgtgtcatcaacaaagctactaattattatgagcggtatgatgccgatggcaagaaaactatggcagaacagaaaggttgtgaaatgtgggcagtaagaaagccaatgcatgaagcgaaatattacggacatgtaaatttgagacgtaaaataacagttaaactggaggatgctttggagaacattccttcaatttgtaataaagatttgcgtggctacattaacggattaatggcggaaaattctgataccaaacagctacttgcccatttcaaaagcataggctatcgctggaacaaacagtatgtagacagggttgagatatggcagttcagcgatgtgaaggagaagatggtggcgataagaaagccgttggatacatctttcaataaagatagtatcttaaccattactgatacaggtatacaaaaaattctcctatgctatcttgaagcgaagggtggagaccctacggtagcgtttacaccagaaggtattgccgagatgaacaaatatataacattatataataatggcaagaggcaccagccgatttttaaagtaagagtatcctcaaaacttggaaaaaaattctcggtaggatctatagggtgtaaggcaaagcaatttgtaatagctgaggctggtaccaatctttattttgctatctatgaagatatggttggaaagcgtgcttactctaccatgccattgaatgaagttgcagaacggttgaagcaaggattatctcctgttccggagaaaaatgaaaaggacatcccactgaagttttatctctcacccaatgatttagtatatgttccaacaaaggataaagaagagaagttgagtaaggcaaggatctacaaattcgtagactccagcggtacaaccgcaaattttgtccctcataggtctgctaatcttatttataatgtggacaagaagtttgctggattgttttgtaatgggttaactatccaaaatgaatatggagtaggtagtccacaatctaagaatcaaaaggccttgacaggtgaaatgataaaagctgtctgttggaaacttgaagtagaccgtttgggaaatattattagaatcattaagtaaaaccttgtttccatgataaagaagaccttatgcttcagcaatcccatctatctgagtttacgcaatgcccagttggtactgcacttgccagaggtggaaagcaacgaaacgttgcctgaagcgatgaagaaagaagcagagcgcaccatcccgatagaagatatcggggtggtcatacttgataaccggcgtattacagtaacttcgggagtattagaagcattgttggataataattgcgctgtcattacctgcgaccaaaagagtatgcctgtaggtctgcttctccctttgtgcggcaacaatacccagaacgaacggtttcgttcgcaactggatgcgtctttgccgttacgtaagcaactttggcaacagaccgtgaaacagaaaatactcaatcaagagtatgttcttcggactaatactgacaaagagaccaattgcatgaaggtatgggcaaatgatgtgcgtagcggtgaccctgacaatcttgaggcaagggcagccgcctattactggcgcaatctttttacggattatcctgattttgtccgtgaccgcgaaggtacacctcctaataatcttctaaattatgggtatgccatcttgcgtgcggtcattgcgcgggcactggtaggcagcggcttgttaccaactttgggtatccatcaccacaaccgttacaatgcctattgtttggctgatgatattatggagccttatcggccgtatgtagatcagcttgtcgttgatattattcactgtagcgatgacgtttctgtgattaccaaagaactaaagatgcagctcttgggtattccaatgttggatgttgtggtgaacggtaagcgcagtccgctgatgatagctgctcaacagacgactgcttctcttgcaaaatgttttgcaggagaggttcggcgtattagttacccggaaatgtagattattatgtccagtttcgaccgtttcagtgaatatcggattatgtggattcttgtattcttcgacctgcccacggaaaccaagaaggaaaagaaagcctatattgatttccgtaaatccttgatgaaggacgggttcaccatgttccagttctccatctatgtgcgtcattgtgcaagcatggataatgccgaagttcacatgaagcgtgtacgtgcagcgttgcctaaggttggtaaagttggtatcttgtgcataacagataaacagtttgccaacattcagctcttttatggtgagaagccgaaaccgcccaatgcccccggacagcagttggagttattctaagcaacaactaatagaaaacgaaaatcccactcttttggagtaggattttgttttgcggtatcattttatttttctctcaacaatcttgtattgtcttgataatcaattccttgtccatgttgagttgttgttgctaccgcaaaggtacgaattttcaagcaaatcacaacgaaatggcttaggaaacgcccggcagtgcgttgttgttgctaccgcaaaggtacgaattttcaagcaaatcacaactcataatgatgataaaaaatttcaataaagttgttgttgctaccgcaaaggtacgaattttcaagcaaatcacaacgtcgtgtgccaaccacctgctttcgtgtacgttgttgttgctaccgcaaaggtacgaattttcaagcaaatcacaacggcatggtgatggtctcgccgttgattccggttgttgttgctaccgcaaaggtacgaattttcaagcaaatcacaaccaattggcttgtatgcgttttcggcaacgggttgttgttgctaccgcaaaggtacgaattttcaagcaaatcacaactaagcctctgtctgaatcgttcgatacgtgttgttgttgctaccgcaaaggtacgaattttcaagcaaatcacaacagcaaagcaaggtcagacacgtatgcacgtgttgttg

SEQ ID NO: 638 - DNA, 14508 bp, synthetic construct
  misc_feature 1..14508: note = Synthetic
  source 1..14508: mol_type = other DNA
cttttagggttattccacgaggagaacgacatcttcctattatctttgcagcataacaactaagataacaaccaataaaaagaatgattatgaaaaccaattacttctatcgccaactatgtttaagttgcatagtcctcatggctaccttcgcactcggtgcttctgcacagtcttcacgtcagatacgtccttactcattcaataagaaaggggtgttttatggtcgtcaacctgtgatgggaatagacccacgcaccttcgttgatcttggttatgggtatgcgaaagataggtataacgtctattttgaagggcagattttaccttttgtcgacccactgacgttccgcctaaaagtacctggtagagtctacccaggcgactatcccgttaatcctaacgacgattacgacccctactacaccgaaggctacattgtaacttctaatgctgtcctctacaatggggagaagattagcgacagcccaagcagcttcaaggacttaggatggggttatggaaaggacgccttcgatgtctattatatgggtaaaaaggtgaatggcgccagcagtaccagcttcagagtactcaaagatggctatgctgaggacgctttcgacacctattatcgtggaagagtagtaaaataaatatacttatgatagaacagatacttgcttataacaaaaggtttgtggccgtaaaaggctacgaaccttttattacatctggtcaaccagacatgaagttggccattgttagttgcatggatacccgccttaccaagctactccccaatgcgctcggtctgaggaatggtgatgcaaagattatcaaggttgctggtggaaccattcttacgccatacgacgctgttattcgttcgctccttgttgctatctatgagttgggttgccaggagataatgattatccatcactctggctgtggtgcttgccacatggatgcggcccatttcctccatctgatgcacgaccgtggcataacagacgaggctattcaagaagcaaacaagcatgttaatctcaacgaatacttagacggcttccatgatacggaggcgagtgtgcgacgtacggtagctactgttcagcagcatcctctcatcccgaaagatattgtcgtacgtggtttcatcatcgactcacgtacaggagagctgacacctgtcgattagctcgttgcccagatggcgtggtgttgtggggtgacggtcgttgggtgcgttcgtcccgcttatggatagctaccctacccaccctattccgttcatgctctgacaacatacagcctctttacacacgcctctctgctgtactgctaagcctgacacaggtataagaacagggtaagtaataggcttcaactgacgttccaaaggatgtttcaaacatcccacttcattcgttgggtcaatcagtagacttgcgaaaaatcattacatcgcatcaagctaaacaccttcaaaataggagtataacatctcatacctccaagcttataacccacaacatatcaacgcattacagacagcgttgaagaagacgcccttcttgcctcaagaagggcgttttctatgtacgagaagggcatgttcttgaagcaagaaaggcattttcttgaacgtagaagggcatgtgtttggttcgagaggagcgaaaaatgttgacatgaaaggtgaaaaaagacccctcccccagccccagtgacccctcccccagcccctccccgaaagggagaggagcgcctaacgggacaaagtttgccgtgattttatcggttatgagtaaaggaaaacagacttgtcacagcctttaacgctcacaacacaaaccatcaacacctaacactcatcacctaacacccaacacttaacacctaacacccaccaacatgctccttcttacttactaagcttaaatttgattggtagcgtgtaatagacagctactggtctaccatcttgcttaccaggattccatttaggcataatagagacgatgcgcatggcctctttatcaagagatggggaagcaccgcgtataatctcagcctgtctaaccctaccatcaggcccaacaacgaaccttatcataactgttccttgctgatgcttctggcttgcttctgccggatacttgatattctgcgccaaccactggaagagattaccattaaaccttggcatctcttctaccacagtatagactttctgatcgttatctggggtcttttgcttctgtaaaacacttactggagcaaccttattgtccacagtaacgttcgttacactgcgtgcaatagagtcaatattacttacaataagtaacatgacaatcattggtacgtaaagtacatacttaacacgcatactgttgtttgttttcttcttgttcatcattttaattctttttttaataggtaaaacattgaaattatttgaaatcgtagctacattcttcctatatgttagtccgagcagatggtactgatactccttattatccacaccattgtctaacacgctcctatcagcaaggtattcgagatttaatcgcacctcacgtttcagcaaccagacgaaaggattaaaccaaaagagcatacaaaacagttctgcacagagtatgtctatggaatgaaactgcctgcaatgggtcagttcgtgcgtcataatctcgtctgtctcagcctttgagtgccgttcaagatggatgaatatccaattaaagaaggagaatggaccctcatcattgcgtaacaagtaaacctcaacaccatcaatataaatagttttacacctgttcttcaaccttataatagacgcaatctgccataaaagacgcaagaacaaaacgcacacaactatgccatagacatcccaagcaaactgttcccaattgaagaagccaccaccctctgatgtgactgacacaactggcagaacaacagtagcgtattcgttagtgatggaaaccatcttgtcattgccacttagccatgaagagaaatctatcagaggcagacataacgctataagaaagctgctattaaggacatgtctgcgccatgaaagaaaggtgtcagtcgagaacatcaacttataaaacgcataaaacagcgcaagagccatgttgacttttaataaatagattgccataattgtcaatattttaggtgattgctatacaaggataaggggttctacggtcttaaactattcttccttccctctttctatctcatcgataatatccttcaagtcgtcaggagaaatcttatcctcctttgcaaagaatgaaaccatctctcgaaaggaattcttaaaatacttatcaacaaaactgtgcatgaagtcagacttataatccgactgttttatcttcgctataaaatggtaggtcagcccctgttgttcggcacccacatatcctttacgcttcagattgttcatgatggaagccacagtagtatagggaggcttcggctcttgcagctgtgtcaacacctctttgattgtgcaacaacccaaccgccatacctgcaacatcacgtcttcttcttgtttagttagtttctccatattcactcaacgcttgttttatatcgcaaagctacgaaacattcgtaaaaaacacaacttattagcgttaagaaaacctaatacttgcattttattaattgtttatcaatctaatacgaatagttagtaacaagacaaagacaaatatctcacctttattaaggtgcttttcacctacaaaactgatatttttcaggcttcgaaaagagacatgcatgaatagctggttgcgtctgtcttttcagtagaatgacaataaggtaatttcataaaaaccaaatttgctgtcactactgtcacacattatgactatctaacatactcacctataataagttgcacgaagtgttaaatatgacagcaacgtaaaataaaaaataattagtaataatgtaccatctattccaccgtattttcgttggtttatcatccacgactttcgcaagaaccatgcccttaaagtacggacgtagtgttgcactatcacgctaaacaagtgtttttattcataatcttttgcccgtatgcacgtaaaagcgtacttttgtagttacgaacaaagaaccaaacggaaatgacaaaatatctatacacattcttagcactaaccgtcttgatgcttgcaggatgtaacaaagcaaaagaagagcctcaaaaagaggtttatcacaacgtaaggacgattcctaccgagatagttgacaaaggcaaccaagccgtacaaaatgccaacaaaagggatgcaggcttcattagtaaccgtgtgaacgaggtgactctcaccagctcttgcttcggagcagtcaatgcgaacaacctcgacatactccctcgtcctaatgagacaagccgcaaagactcaactgtcatcgaccaactaaatcaaggagaggtgttcctcttacaacctggtaccaagggtattatgctgaccgatgctggttcaaaactattagtacgcttccagatgggcgaattatggatatggaagtcggctgtaaaataagttcagcagtgttagctactatcaacatagttcccttaacactttgcatcattaagaaaatcatactaataaatttacttttagcctaaaatatcaataacaaatcacattatcaaaatatgagaagaaacctttttcttgtttttcttttactgacattcgtcgttaatgggcatgctttcattgtgcaaaaccctgtcgactacgtaaatcctttagttggatcggcctcaaagtcagagctttcaacaggcaacacctatcctgccatcgccttaccatggggtatgaacttctggacaccacagacaggaaagatgggagatgggtggacttacacctacggagccgataagatacgtggtatcaagcagactcaccaacccagcccatggattaatgactacggacagttcgctgtcatgcccgttgtgggtaagaaggtgtttgacgaggaaggacgtgcaagctggttctcacacaaggctgagaccgcaacaccctattattataaggtatatctggctgaccatgatatcacagcagagattagtcctaccagtcgggctgcttctatgcgcatcacctacccacagacagaagcggcctactttgttgttgacgcctttgacaagggttcttctgtgacgattatgcctgataagcgtacgatcgtgggctatacaacgaagaatagcggaggtgtaccagatggtttcaagaactatttcgtacttcgtttcgaccatgacttcacctacatgggttgtgttgaagatgggaaactgtctgatggaaagaccgtctctacctgcaatcacgctatggccgtagtggggttccacacgaaacgaggcgaacaagtgaatgtacaggtagcctcatcgtttattagtaacgaacaagcactgcgtaatctcaaggaagttgagggcaagacattcgacgaggtgaaggcagaaggtaggaaggaatggaacaacatattaggacgtatcgaagtggaagacaacaatatcgaccatcttcgcacgttttatagttgcctctatcgctccgtattattcccacgcacgttctatgaactcgacgaacagggtaatcctgtccactacagtccttataacggcaaagtactaccgggttatctctttactgacacaggcttctgggataccttccgttcgctcttcccattgcttaacctcgtctacccgtcaatgaatgagaagatgcaagcaggcttagtcaatgcttacaaggagagtggcttcctacctgaatgggcgagtccaggccatcgtgactgcatggtgggcaacaactcggcctcggtcgtagctgatgcttacatcaaaggactgcgaggttatgacatagagaccctttggaaagctgttactcatggggcgaatgccgtacatccaagcgttagttcgactggacgcaaaggctttgactattacaaccgcttaggttatgtaccttataacgtgggaattaacgagagcgttgcccgtactttagagtatgcttacgacgattggtgcatctatcagttaggtttaaaactcggaaagagcgcaaaggagctcaaaccctacaaacttcgtgcaatgaactatcagaaggttttcgacaaggagacaggactgatgcgtggacgtaacgaggatggcagttttcaaacgccatttaatcctttcaaatggggcgatgccttcacggagggaaatagctggcattacacatggagtgtgtttcatgaccctgcaggactggcacggctgatgggaggatacgacaagtttaatgcaatgttggatagtgtcttccaacttccacctgtctttgacgatagctattatggcttcacaattcacgaaatacgtgagatgcaaatcatgaatatgggcaattacgcacatggaaaccaacctatccaacacatgatttacctctatgactacagcggacagccatggaaggcacaatattgggtgcgtgaggtgatggaccgactctattcttcacagccagatggctattgtggcgatgaagataacggtcagacgtcggcttggtatgtcttctctgccctcggcttctaccctgtttgccccggtagcacacaatacatgattggttcgccttacttccacatggctaaggtacaccttgagaacggcaagactatcactatccgagcagataagaacgacaaagacaaccgtttcatacagcatataacaatgaacggacagccttatccacattattatcttgaacatgaacaactgataacaggtcctgaaatagacttcactatgggcgataaacctgtgaaatagaaagttatcttattcctttagcatccaactaacagatttcatacctatttgaataaatctgttaattggatgtcattatgtcaactaatcctataaaatcacttaaaagagtaaggtctcatcaacaatattataatttgtttgcgtatatttgtgtcatattaatccaaaaatgagtatataacaatgagaaaaatcttttcttctaaacacgctttgtgcgctggtttagtattaggtggactgtttacattttccagttcatacgcaacaaacaacgacgcaaataatgacaatcagcaagtagcagccacaccaaccaacaacacacggattgttggaacgtgggaactgaccaataaggatagttatgctatcgtgcgtaatccaagaacacacaaggaatataaggtggggttcataatcgacagatatgatgactataagttcctcccagtagacttcaagactggtgagcgtgttgaccttcgctcgctcgttggacatgatgatgacgacctcgatgatgagttgcatcgcttcgacttctaccgtaatggaaccatgagtgttatagagagagaggacaatggcaggtggaaacgtgacgacgacgcaggagtgtatggttttcgccgtgatggattctttatgaagatagatggtaagacacgcaagaaccttcaagtcagatttattaacaacaatgagttcgaactgacccagaccaagtttaatgacaacgaccttcggagaataatcgttaagaaggtgatgagatatgttcgtgtgacgagaaaataaggcaaaataagccctgcctataaaacatatcccccagttaacagttgcttaaccttgtgtgaagccctgttgattggggtttttatttatatattgaggcaagatttcttaccttaaaccaccctatcaaagacggaaaagacaaagaggaagaaagcagcaaactattacaaccaaatgagaagaccgtctccaaggaattatttccatgaacataaatatttcttttcacgacaataaatattttttttcatgaaaagaaattaggcaaactgatagggtttatattcaattgatacgtaagctaaatacttctggtaagttataacactcatttacacgcccctctgtagacatgtaaacaaagaaatgtgatcgagaaaggcttaaattacaatatttttatgtaagtttgtatctcgttatagaactgagtaaaaaaacaatatatcacgaacaacaaaatatgaaacgtaaaacatggcgcaaacaccataaatgggttggaattgtcgttacatttttcttggtaatgttctgcctttctggtattgtactcaaccatcgtcaactctttgcagatatcaatgtaagccgtgggatattacccggtcaatacgaattcagccaatggaacaacggattactacgtggaacattacgttacaaagataataaaaaccatgaaaaggtgttcatatatggtgctgcaggcatcatccagactgacacaacggctacaaactttacagaatacaacaaaggactacctactggagcagactatcgccagatgcgaggaatggctaagactccaaagaatgacctctttgcggttagcgtcatgaacctatataaactgggaaagaacgcatcttggcaaacagtcgacctccccaagcaagaagatgacgaacttctgaccgacataaccacacatggtgacacgctcatcgtactttcgcgctctcatctctactatgctacagctccttataagaaatttacttgcgtcacactacaggccgctgagggaaatgaagggaaggtatcactgttccgtcaaatatggcttttgcatagcggtgcactgtttgggacaataggaaaactcatcgtcgatgggattggacttgtcttaatcatcctttgcgtaacgggtatatggtattggattcgccataaagcaacgtcaatggccgtctggcatacaaagatagggcattacaccttcgccctgacactgtttatcgcaataacaggatgggccttacgtcccccactgatgattctccttgccacaaacagtaccaaaccattgcctgggacaaccttagacaatgataatccatggaatgacaaactgagaatgatacgttatgacgagcaagtccacgactggcttatctcaacgtcagaaggtttctattctcttaggaacctctcgtcaaaaccaacacctatcaccacagcgcccccagtgagtgttatgggacagaatgtctggcaatatgcaaataacaaagcatggattgtaggctccttcgatggcctattttattgggatagaaagagcaatgcagtgctttactacaacgattcaatggtgtctaccccccgcattccgggtacagccccagacaaacagacaatctctggctatagttctgatttcacgaacaaggaatgtatagcaacctatttccaaggttcttcatttgcaaaacagccagacgcactaaaaaacaagcccatgtcgctctggagtcttgccttagaggttcacaccggccgtatctatgcgggtgcattaggttccttcctcttcatcttcgtcatcggcatcctcatcatcttcacccttgtgtctggtaagaaggcgtaggtgagaataattatatgaggtttcattgcattgtaattaagaataattgcaatgcaatgaatgtattatatcatttataaatagcactacaaatctccactgaacctcaataatactatctctatctgacaaagtttattctctttaccacaggtaataaaaaatgtaaaacatgcttgttttttagaaaaattaataataactttgtcactataaaacaaaaaagagcgagttgccccgccctgtttgttttcacaacggaataatccttattgtgacttgcttgaaaagctactgcaaatatataaagaatataattaagaaccaaacaaaacaagaaaaaaatgagaacaattcttggattagacttgggaaccaatagtattggttgggctaaagtctgcattaatgacgacgggaactacgtacgtgagattaaacttggtagtcgaatcatcccaatgagtcaggacacactcagtaactttgataaaggagtgaccgactctccaacagctgcgcgaacaggattccgaggtataagaaggattagagagcgtgtactacaaagacgcgaacgcttacacagagtactacacgtcatgggattcttaccttcacactatgaaaaggccattggatggaatcgagaggaagctacaacgtatggcaagttccttgataatggggaacctaagttggcatgggagagacaagaggatggttctatgcgtttcctctttatggattctttccatgaaatgatggctgattttgcaaaatgtcaaccaggattggttgctgacgggagaaagattccactggattggacactctattacttacgtaagaaagcacttacacaagctatcaaaaaagaagaattagcttggatactgctcaatttcaatcagaaacgtggatactatcagctacgtggagaggaagaggaagaggatccaactaaacgcgaggagtattacgaactgaaagttgttagtgttgaggctgccgaagaaggaaaaggaggtaacacttggtataatgttacattagagaacggctggatatatcgtcggcaaagcaagatagaactaaatgattggactgggaaaatcagacagtttatagttacaacagaatatgaaaaagatggtattactatcaaaaaggacaaaaatggagaagtaaaacgttccttccgagcaccaagtgaagatgattggggactacgtaagaaacgaactgaaagtcgcttagaggattcaggcaagacagttggagaatttatctatgatcatatactttctgaacctgctgataaaatcagaggtaattttatccgtaccattgaacgaaagttctacaagaaggaactggaagctattctgcgtgaacaatcaaaacatcataaggaactaaaggacctaaatacgcttgtaaactgtatcaaagagttatatccaaacaacaaggctcatcaagatagtttgatgaagaaggatatgatatatcttttaattacagacctgattttctatcaaagacccttaaaaagcaagaagtctctaatagcagactgcccatacgagtattacgaatatgttattaaggaaactggagaaattaagcgacaaggtatcaaatgtattgcaaagtcaaatccatattatcaggagttccgactatggcaattcatcatcaacctcagactctttgatagagctaatgataaagaagttacttctgagtatttgtcttctatggaagactacaccaaactgtttacatatctcaacgacagaaaagaaattaatcaagaaattctattgaaagatttcttcaaacaaaagaaagtcaagatgggtatggaaaaagaatttcctatccgctggaactatattgaagacaaagagaagaaatatccatgcaacgagacacgtcacgaactacttgctgcattagataaagcaggtatagatcatagttggttagatgataaagaacgattctaccgactctggcatcttctctattctgttgagtccaaggaagaagcagaaggcgctttaagaaagttgaatgataatgaagactttgtaaatgctttcttaaagataaagccatttaagaaggaatatggtgcttattcggagaaagctataaagaaactattggctgtaatgcgtataggaactcagtggaatgaggatgacatttgcgaacaaacaagaaatagaattcaaagcatcataaatggggatattgatgaaaaaattaaagaacgaatgggtcgcactttcagtcaattatccgattttcagggacttcctgaatggttagcttgctatgttgtatatggacgacactctgaaactacagatatacaacggtggacaaagccagaaaatctaatgtcgtatatcaaagggttcaaacagcattccctacgtaatcctatcgttgagcagtgtatccttgaaaccctcagaacagttcacgatatttggaaggaagctggacacatagatgagattcatatagagctgggaaggagtatgaagagtactgccgaccagcgtgcacgtatgtctaaaagtattctgcagaatgagaataccaacctgcgcattaagagtctcttaatggaactgaaggatgctaaagagtttgagaatgtacgcccttactcacctatgcagcaggaaatcctacgaatatacgaggaaggtgccttacaggaattaactaaagaggatgaccaatatcctgagatttctaagatttcgcaaatggcacaaccttcagcaaaagaactacttaaatatagactttggctggatcagaaatactgttccccttatacaggtaaacctatttctctttcaaaactattcacatcagcttaccaaatagaacatatcattccacaaagtcgatattttgatgattcattctcaaataaggtcatctgtgaggctgaggtaaatcagctcaagagtaatatgttaggctatgaattcatcaagaaacatagtggagagattgtgcattgtacgatggtaggcgatgtaaagatacttgatgctaaggaatattataactttgtaacagagcattatgccaacaacagacgtaagaaggaaaaactcttattagaggatataccacaggaattccttaatcgtcaaatgaatgacagtagatatatcagtaagaaggtgatggcactgctgtctaatattgtacgagaagaaggtgaacaagaagcaaaatctaagtttgttatcgcatgttcaggaggaataacagaccgactaaaacatgattggggactaaatgatgtatggaacagcatcgtttatcctcgttttgaacgccttaacaaactaaccaatacagagaacttggcggattcaacgtgcaaatgcactacgctgcaaagttataaaatcttttcgtaaaaacactcaaaaggagtacaaaaatttaatttttctcttggtcgaagattaattttgtcagtaattttcgcaacatattgatgagtaatgtcatcaaaacatgtcgactttggaatatactggcgtatcagaccatttatattttctatagatcctttttgccacgaagaatacggatctgtaaagtaaactgttactccaagcttttttgttatatacttatgattggcaaactccaatccattatctgttgttatggatttaatgaattttttatatggcatcaataaccttactactgttttagatacttctttagcatctttccctttcggtaactttctcatgaacaacatgcatgtactaagttctttaagagttagtatcgcacctttgtttcctttacctacaataatatccatttcaaagtctccaaatctaacaccatcaacttcagcaggacgctcacttatacttattctgtcagaaatagttgaacgacaatcacctacaggacgtgaacggtgctttaatttatgcctacagtgagtgtataaactcccaccttcttttttatctttacgtatcatcctgtatatagtttcgtgagaaataattatacctctttctcttaaaacagcactgatctgttttggagaccactgttctgtttctaataggcgtataacctcttcttttatttcttttgattttgcatgattccctggtttgcgtttctttttcaattcagcatttttctgtgctgtttcccaattgtatgatctatgtttcccactattacgattatattcacgtgtaatagtggaagtatcaacacctatgagcattgctatttgttttctactttctcctttgtcaagcaaagtatgaattgtatatcgttgttgagaagttaaatgtttgtacatatttttcaatatctaaaaattatctgataaatctataataatttgattaaattattttaacacgaccctttttatacctatgtttttgatattttaaggattatacaatatcactattataattcaattgtctattgcaattggattatagacacatacgcttatgctatcttcgggactttctctactttacttttcctttatctaagttttcattttgtctctgttctcggccactcacttctcttctccgcttgtagtcatctatcgacttttagatgcaaaggtagtactgccaggaaacacggcaaataccagtctcttattgacaataattttttcaagaccctccgaaatcagatagattgcggtttcctgaaaaatttatcgatcaattatttgccttactttccttttcaccagtactcttaccttgcacataaaaggttcgagatgacg

SEQ ID NO: 639 - DNA, 14397 bp, synthetic construct
  misc_feature 1..14397: note = Synthetic
  source 1..14397: mol_type = other DNA
tgccagaccctcttcttcgttgaacttctccagattgtcaacgtgcctgataggctccggctcgtggttgactgtgaatatcgtctggtccagaccgtcgtacatgcgttgcagcatggggtcgtagtcggcttccttgctgcttacagggaagtactcctctatacgcagaatgccgtcaaggctcatgttctgagtaatctcgacggcattcgtactccaaggagtaatcatctcacggcgtggccccacatagaagcccggcagcgcctgtgtatcctgcaggtagacggcatcgccgtagagccagcaaagttcgttgatttccgcatgggacagcgcatggttgacttctgtagcaatcacgctcttggactgagttctgaagaaaagaatcatagcctttatataaaaattggtgttactttgtttgcaaagatacgattttctttggagatagtatctttctgcactgtgttttttggaaaggtgttttaaaaccatgctcaaacctggctcatttgagggacatggaaaaaggcggttcttccgttaaatgcgtagattggagaataaaggcttatgcactggcagggtatgactgttcaaaaccagatggccttaaaaaggaggatgaactgaaagataagatgcaggaaaggcagattgatacgatgcctgaccatcagcctgtctttccgtcttccacagacaacttattcccatatcatcgctgtttgtaaactgttttcatgcaacccaagctgacacatgcctttctggctcctgaaggaggcctgattgacttgcaacaggtgctctattagcgtgttaccaacgcccttttgaagtccaatcaggcaccttttggggacggattgacaaccaattgattgactgctggttacagacctgctttttgcacgtttccttttacatctgcagatgatctgtttgaaattatgtaatgacttttcaaaatcttgtctgtatttcaacgtattaaaatgaaaaggcttttgtatcggaggatgataacaggacaggaagttggccgtcccggccatgtttttgtttcatgaatcacctcggttcttccgttaaagctatgcgaaaagcatctgcacattgaacggaagaagcgataaaatgccgttcaagatttgccaatctgcctttttattagtacttttgcacgtttaagacaaggaaaataacgaatttagaataacggaatgtcatcagttcagataaagagagtagagacgaagaaagacctcaaggatttcatcgagttccattatgatctctacgagggcaatccctacgatgtgcccagtctctacagtgacgagttgaacacgctgtcgaaagacaggaatgcggccttcgacttctgcgaagctgagtattaccttgccctgaaggacggcagagtagcggggcgcgtggctgccatcatcaaccacaaggccaatgagaagtggaagaagaaggacgtgcggttcggctggatcgacttcatcgatgacatggaggtgtcacgtgccctgttccaggccgtcgaagactacggcagacagaagggcatggaggccgccgtgggaccgctgggctttaccgacatggatccggagggaatgctgacgtggggctttgaccggctcggcacgatggcgaccagttacaactatgcgtattatccgcggcacatggagcagctgggcggctgggtgaaggacaatgactatgtggaatattaccttgaagtgcctgaaaaagctccggagaagtacacgaagattgccgagatggtggagaaacgctacaacctccatgtgcgcaagctgacgaagcgggacatcttcgagggaggctacggcaagaaactcttcgacctgatcaacctgacgtatgcggatctgtacggcttctcggaactgagcgaccggcagatagaccagtacatcaggatgtacttccccctggccgacctcaacctcgtcacggctgtcgaggacggcaacaaggacaaccagctggtgggcatcgccatcaccattccctcactgagccgggcactgcagaaatgccgccgcggacggcttctccccttcggatggtggcatctgctgcgcgccatcaagtggcacaagaccgaggccgtagacctgcttctgataggcgtgctgcctgaataccgggcaaagggtgccaacgcccttgtcttcgccgacctcatcccgcgctatgtggagtatggattcaaatggggggagacgcaggtggagatggagaccaacgagggcgtgcagagccagtggggaccgctggatcccatcaaccacaagaaacgcaggtgttacaggaagagcctgacggactgatagaggaccggaggctgacgatccgcctgcatatcggccgtgaagcgtcggaggcaggcggaagacagctgactccctgccgcacagcgggagacttttgaccatcaggttctctgcatcctgatacgacttgccggacgaggggaagcccggttacggtctgcttgtccggcaccggcggcacaccctgttcatgcacgatgccccccgccattcatccctcctgttcccccgaaaaactgacagcccccgaccactcaccattcattacccattatccgctatatgaacccatcatcatcaaccatcacccccgacgcatcaccggtagaatataccgacgacaacatccggcacctgtcggacatggagcatgtacgtacccggccggggatgtacatcggccggctgggcgacggcaagctgccggaagacggaatctatgtgctcctgaaggaagtaatcgacaactcgatcgatgagttcaagatgaatgccggcgaccggatcgaaatcgacgtggaagacaacctgcgtgtcagtgtccgcgactacggccgcgggattccgcagggcaagctcgtcgaggccgtctcggtgctgaacaccggcggaaaatacgattccaaggctttcaagaagagcgtcggactgaacggtgtaggtgtgaaagccgtcaatgcgctcagttcccatttcgaggtgaagagctaccgggacggcagggtacgtgaactcacgttcgagaaaggcaacatccaaaacgacagaacagcgaagtcttcggatgaaagcgggacatacatctactttgaaccggacaatacgctcttcaagaactacagtttccatgatgacatcgtggaggagatgctccgcaactacacttacctgaatacgggactgaccatcatgtacaacggacggcgtatcctcagccgccatggactgaaggacctcctgacggacaacatgaccgtagacccgctgtatcccatcgtccacatgaaaggagaggacattgaaatagccttcacacataccaaccagtacggagaggaatactattctttcgtgaacgggcagcataccacgcagggcggaacgcaccagacggccttcaaagagcatatcgcgaggacaatcaaggagttcttcggcaaatacgaatacggtgacatccgcaacggactggtggcggctatcgccgtgaacgtcgaggaaccggtcttcgagtcgcagacgaagatcaagctcggttccacccagatggcacccgacggcgaatctatcaacaagtacgtgggtgatttcatcaagacaaacgtcgacaattatctccatatacacaaggaagacttcacggacatccttgaaaacaagatcaaggagaccgaacgggaacgcaaggcgatggcgggcgtgacgaaactggcgcgtgaacgtgccaagaaagccaacctgcacaaccgcaagctgcgcgactgccgtgtgcattactgcgatgtgaagaacaaccggaaagaggaaagttccatcttcattaccgagggggattcggccagcggaagcatcaccaagagccgggatgtaaacacacaggcggtgttctcgctgcgcggcaagcccctcaactccttcggactgacgaagaaggtggtgtatgagaacgaggagttcaacctccttcaggctgcccttgacatcgaagacggcctcgactcgctgcgttataacaaggtgatcgtggcgacggatgctgatgtggacggcatgcacatccgtctgctcatcatcaccttcttcctgcagttcttccccgaactcatcaagaaaggccacgtctatgtccttcagacccccctcttccgtgtccgtaaccgccggacgaagataaaagacaagcaggtcattgccgatgcggatgcccaccgtgccaagaacgagaagaagaacgattttatcacacgttactgctactccgaggaggagcgtctggcggccatctccgacctcggtcccgagcctgaaataacccgattcaagggcctcggtgagatttcacctgatgaattcgcccatttcatcggtcctgacatgcgcctcgaacaggttaccttgcacaagaacgaccaggtttccaagctcctggaatactacatgggcaagaacacgatggagcgtcagaacttcatcatcgacaacctcgtcattgaggaggacctgccggaggaggaagagtaaaaagtaaaaaagtaaaacggtaataggcgaaagaaaaggaaaaagtgatatggtaaaaatcagaaaagtaaaataacagaagggtagaagatcgtaaataaaagggatgatacgtgagttggaagtaacagtaaatcatcaaataaagaaaattctcatgcctgatagtattgtttatgttttttctaaacgtttctctctacgtgtgataaaactttaccaattcctaagtggagagaagcatgaatacgtaatatcaaggcaaatccttcgttctgcaacaagtattggagcaaacatcgcagaaagcaagtttgcacaaagtcaagctgattatctgagcaaaatacgtattgcacttaaagaggcgaatgaaaccttatactggcttgaactgctttgtgagtctggttatagtttgatcctttaacaaatgatgttcgtatcattattggtacatcagtgaataatattaataaattaaaaagcgaaacagaagtctttaagaggacattttattgctttttcaagagtatgacaaaatgattaaattataaaattagtctatgagaagatatatctgtcttttacttttttaccttttcacctttttacctttgtattctcagcagcataacgcttctccattgcggaagctccagctggcggagatggcgataacgaacttctacgtggactccgtggacgaacagaagctggcggaggatgccatcagaggcatgctcgagaagctcgacccgcattccacctataccgacaccaaggaaaccaaggcgatgaacgaaccgctgcagggcgacttcgagggaatcggcgtacagttcaatatgatcaacgatacgctcgtcgtgatccagcctgtcgtcaacggcccttccgagaaagtgggaatccttgccggcgaccggatcgtgaacgtcaacgactcttccatagccggcgtcaagatggcacgcatcgacatcatgaagcggctgcgtggcaggaaagggacgaaggtgaagctgggcatcgtccgccggggcgtgaaaggcacgctgacctttgtcgtcacacgcgccaggattcccgtacataccctcaatgccgcctatatgatccggccgggcgtgggctatgtccgcctggaaagtttcggcatgaagacgcacggagagttcatgtcggcagtagactcactgaagaaaaaaggcatgaagacgctgctcctcgaccttcaggacaacggcggcggctatctccagtctgccgtgcagatcgccaatgagttcctgaggaacaatgacatgatcgtctataccgaaggacgccggtcccgccggcaggacttccgggcaatgggcaacggccgcctgcaggatatcaaggtctatgtactggtcaacgaactgtcggcatcggccgcagagattgtcaccggagccatccaggacaatgaccgggggacggtcgtcggtcgaaggactttcgggaaagggcttgtacagcggccgctcgacctccccgacggcagcatgatccggctgaccatcgcccattactacacgcccagcggccgctgcatccagaagccgtacaagaaaggcgacctgaaagactacgagatggatctcgagaaccggctcagacacggcgaactgatccatccggacagcatccatttctccgattcactgaagtattacaccctccggcggcatcgtgtcgtgtacggcggcggcggcatcatgcccgactgtttcgtcccgctcgatacgacccgtttcacccgtttccaccgtctcctggccgccaagaacatcatcatcaacgcctatctgaagtatgtggatgcaaaccggcaggcactgaagacccagtacaggtcgttcgacgcattcaacaagacgtatggcataccgcagtcgctgctcgatgcaatcgtgtcagagggaaagaaagagaagattgaaccgaaggatgccgccgagctcaagacgacgcttccttacctcagccaccagctgaaggcactcgtggctcgtgacctctgggacatgaacgagtacttccgggtatggaacgagcagagcgatatcgtcaacaaggccgtgcagctggcagccggcaagtagagggacagcgtacggcaaccgcttcagacggatttcagcaggccgccagaaggaagtgaaggagaatatacggcagatccagcgcattctcgccggtctccagcctcccggacagccacaccgagagggcaggtttcatggaacgcacatggcgacaggagcgtttccgcaatctcccggattcgacggaagagccaaaatatctccgtatttatttgtgtgttacatatataataggtaaatttgcacggattaaattttgtggaacgcgtgagaaggtaagcgtcatggcagcggagcttcgccagaggttacccccttttggttccctaagatgttggtcaaaacaataagtattttaaaattttagatgaacgtaattacgaaaacagttcaattgccagatggaagaaccatctcaattgaaaccggaaaggttgcaaagcaggctgacggcgcagcggtactccgcatgggaaacaccgtacttctcgccactgtttgtgcagccaaagaggcagttccgggcacagacttcatgcctttgcaagttgattatcgcgagcagtattctgccgcaggtcgttacccaggcggtttcaccaaacgcgaaggcaaagccaatgacgatgaaatccttacatcacgccttgtggaccgtgttctccgtccacttttcccatcagattaccactgcgaggtctatgtacaggtcatgctgctgtcggccgacagcgttgaccagcctgacgcccttgcagggtttgcagcatccgcagcactggctgcatcagacatccccatcgaacaccccacctcagaagtccgcgtagcccgtatcaacggcgaatacgtcatcgatcctaccttcgagcagatgaaggaggcagacatggacctcatggtcggtgccaccaaggacaacatcatgatggtcgagggcgagatggacgaggtttccgagcaggacctcatcggtgctctgaaggcagcgcacgaggccatcaagcctatgtgcgagatgcaggaagaactttcgaaggcctgcggtacggacgtgaagcgcgagtacgacgatgagatcaacgacgaagagctgcgcgaacaggtacgcaaggagacctacgacgcctgctatgccgaggcacagagcggcgacaacgacaagaagcaccgcgaggagacctacgagaagatcaaggcagacttcaccgaggcatacgatgcggcccacacagacctttcagaagacgacctcgaagaaaaacacgcagaaatcgaccgttactttgcagacgtgcagcgcgactccatgcgccgcagtgtcctcgacaccggcaagcgcatggacggccgtgcaacagacgagatacgtcctatctggtgcgaggtagacacgctgccgatgccccacggaagtgcgctcttccagcggggagaaaccatgtcgctctctacctgcaccctcggcacgaagatggacgagaagatgatcgacaacgtactggagaagagctaccagcgtttcctcctccactataacttcccgccgttctgcaccggtgaggccaaggcacagcgcggcgtaggccgccgtgagatcggccacggccatctggcatggcgtgcgctgaagggccagattccggccgacttcccttacaccgtccgtctggtaagccagatcctggagtccaacggctcctcttccatggcgaccgtatgcgccggcacgctggcgctgatggatgcaggtgtcccgatgaagaagccggtatcaggcatcgcaatgggtctgatcaagaacccgggcgaggacaagtacgccgtactgagcgacatcctcggcgatgaggatcacctgggcgacatggacttcaagacgaccggtacacgtgacggcctgaccgccacacagatggacatcaagtgcgacggtctgtcatttgagattcttgagaaggcgctcatgcaggcaaaggccggccgcgagcacatcctcaacctcctgaccgacacgatcgcagagccgcgtgcagagatgaagccgcaggttccacgcatcgtgcagctggaaatccccaaggagttcatcggtgccgtcatcggccccggcggcaagatcatccagcagatgcaggaagatacaggcgccgtcatcaccatcgacgagaccgacggtgtcggcaaggtgcaggtttccgctcccaacaaggagtcgattgatgccgctctcggcaagatcaaggcgattgtcgccgtaccggaaatcggcgaaatctacgagggaacggtacgctccatcatgccttacggctgcttcgtggagatcctgccgggcaaggacggtctgctccatatctccgagatcgactggaagcgtctcgagacagtagaggacgcaggcatcaaggagggcgacaagatcaaggtcaaactcctcgacatcgacccgaagaccggcaagtacaagctctcacgccgtgtactgctcgagaagccggaaggctatgtcgagccgcagcgccggccgcgcggagaccgtcgcccacgccgtgacggtgaacgccgccatgacgaccgccggccgcgccgcgagttcagcgacagcgagaacaacgattgatcgtccgttctccctataatagacttttaaaatcataagaggcttttaaaatccccccgcaggcggctttcaacctgcggggggatttgctttatacacacctgaaaacgtgcctctgtccagctgtcacatcaacttgtgacacaccctccgccggttttgaattagttttacagatagaaccagtgtcttcccctttgtctgcgactttccggccctgtaaacagggaggagcgactgcccggattccaatcagccgtcacctgcattccaaccgatgcccggttgcacatcaagtggtgctttcttgaaatccaagtaacgcccttttgcaagggaatcgggcatcttttccaatgggtctgctatgtatctgataataagatgcttgcaatccctccgacccggtttatatcggtcgtcttcacatacatcgcttaaatccatgggaaataggacgataccggttccggcatcgcatccatgagtaaattatctgaacaaaaacagcccctgacctgcatcaggaagcagcggaaaggattgattcctttctgcaatcagtggcggacctcccccattggggcagacttccttgctgccgcccggtgcagaaaagagggacaggatgcaaaataaacaggcagaccgttgggaatgtggaagttaatgtcctcaacctccggctgtatgacaggacggacgacagagaggtaactgccgggtatctgccgacaaaagaagactatgtcaggctgttcgtttatctgaacgaccggaaagagatcaaccaggatacattgctgaaggactatttcagactgaagaaagtgaaatgcgccaatgagaaggggttcgccatccggtggaattacattgaagacaaagaaaagaaatccccctgcaacgagacgagacatgagctgctggccgcactcgacagagccggcatggagcacggctggcttgacgacagcggccggcagtatcgactctggcacctgctctactcggtggaagccaaagatgaggccgagggagccttgcgcagactgaaggatgacgacaaattcgtcagtgaattcctgaaaataaagcctttcaggaaagaatacggagcctactcggagaaagcggtgaagaagctgctggccgtcatgcgcacgggcagcctgtggcgggaagacgagatatgcacggctacgaaagagagaatcagccgcatcatagaaggagacatcgaagaggaaatcaaagtcagaatgaggcatacggcatgtcccttcaggtctgttaccgacttccagggactgcccgagtggctggcctgctacgtggtgtacggcagacattccgaaacgacagacatacagcggtggaagaagccggaggacctgatggcttacatcaggaaattcaggcagcattcgctccgcaatccgatcgtggagcagtgcgtcctcgaaacgctccgcaccgtccacgacatctggaaggaagccggacagatagacgaaatccatgtggagttaggacggaacatgaagagcacggcggagcagcggaggaacatgacggaaaaagtactgcggaacgagaacaccaatctgcgcatcaggcgtctgttgatggaactgaagaatgaagccgacatcagggaggtacgcccgtattcgccgatgcagcaggagatactgcgcatctacgaggagggagctctgcaggaactgacgaaggaggacagcgaatatgcagagatcgccagaatatcaaagatggcacagccctcggcgaaggaactgctgaagtacaggctgtggctggatcagaagtactgttcgccctataccggcaagcccatatccctgtcaaagctctttactccggcttatcagatagaacatattatcccgcagagccgttactttgacgattctttcagcaacaaggtaatctgcgaatcggaggtaaacgcattgaaaagcaacagattaggatatgagttcatcaaggaacacggcggagagattgtcgcctgtacgatgctgggcaatgtatgcgtgctgaacgagcaggaatacaagacattcgtaacgggacattacgccaataaccggcgcaagagagagaacctcctgcgggaggatataccgatggagttcgccaaccggcagatgaacgacagccggtacatcagcaaggtggtgaaaggtctgctttccaacatcgtacggacggcaaaggagagagaggagacatcaaagttcgtcatatcctgtaccggcaggattaccgacaggctgaaacaggactggggactgaatgatgtctggaacagccttgtatatacccgtttcaaacgtctcaacgaactgacggagacagaagccttcgggcattggcaggacaaagacagacgggtgttccagacttccgtccccctggaactgcagcgcgggttcagcaagaagcggatagaccaccgacaccatgcaatggacgcactggtgattgcgtgtgcctcccgaaacatcatcggttatcttaataacgagtctgccgaaagtccggagaagcgggaagacctgcgccggaaactgtgcgacaaaaaccgcatcatccggaagccatgggaaagcttcacacaggatgcccgtgcagcgctggaagacatagtcgtcagcttcaagaactatgtccgcatcatcaataaagccacgaactactatgagcggtacgatgccgacggcaggaagacaaaggcagaacagaaaggaggggagatgtgggcagtccgaaagccgatgcacgaagcgacctattatggaaaggtcaatttaagaaggaaggaacgggtcagcctgaaggcggctttggaggatattccttccatctgcaacagggatctgcgcgactatattaacggattggtggaaaagcattacaacaagaaacaggtgctggctcatttcaggagcgtcggcaaccgagggaacaaacagcatatcgacaaggtggatgtctggcggttcagcgacggaaaggaagaaatggtagcaacaaggaaaccgcttgacacctcgtttgatgccaaacgcatcgaagctgtcaccgacacgggaatccaaaggattctctcaaactacctggaagcaaagggaggagatcctaagatagccttcacaccggagggaatagccgacatgaaccagcatataacggcttataacaacgggaagcagcacaagccgatattgaaggtgagagtctctacaaagctcggaaagaaataccccgtaggacagacgggctgcaaagccgggcagtttgtggttgcagaagccgggaccaacctctactttgcagtctatgaagatggggaaggcaaccggagctacgatacgattcctttaaatgaggcggtagaatgtctgaaacagggacttccaccggttcccgaaacgagagagaaaggagaccgtctgaagttttatctctcaccgaatgatcttgtgtatgtaccggcgggagacgaggagaatgaaatagacagagaacggatctacaagtttgttgattccagcggtacgacagcgaacttcatccctcacaggacagccggacttatttacaatgtggacaagaaactggccgaggcattgtgtaatggcagcatcattcagaatgaatatggcgtaggaagtccgcaatccaaaaatcagagggcactgacaggggaaatggtcaaggccgtctgctggaaactggaggtagaccggttggggaacattcttagaatcataaagtaaagaccgcacagaaccatgataaagaagaccctttgtttcagcagccctgcctatctgagcctgggcaatgcgcagctggtgatccggctgcctgaagtggagaacaatgagacgctgccgcagaggatgaaaaaagaagccgagcgcaccatcccgatagaagatattggggtggtgatgctcgacaaccggcgcatcacggttacgtcaggagtcctggaagcactgctggaaaacaactgtgccgtcatcacctgcgaccagaaggggatgccggtcgggctgctcctccctttgtgcgggaacacgacacagaacgagcggttccgcttacagctggacgcctctcttcctttgcgcaaacagctctggcagcagacggtaaagcagaagattctcaaccaggagcgtgtattgcatgcaaacacggacaagaacaccggctgtatgcgtgcgtgggcgaatgacgtacgcagcggcgacgccgacaatctcgaagggagagccgccgcatattattggaagaacctttttgcaggtcatcccggcttcgtccgtgacagggacggggcaccacccaaccatctgctcaattacggttatgccatcctgagggctgtcatagcccggtcattggtgggaagcggactgttgcccacactgggtattcatcatcataaccgttataatgcttattgtctggccgatgatgtgatggaaccataccgcccgtatgtcgaccagctggtcatcgacatcatccgtcgtaatgaggatatatcggttctgacgaaagaactgaagatgcagcttttgagcatccccatgctggatgtcgtcgtcaatggaaaacgaagtccgttgatgattgccgcacagcagacgacggcctctcttgtcaaatgtttctcgggagaaatccgacgtgtcagctatccggaaatgtaggttatcatgatgcggcttgatcgtttcagtgaatatcggattatgtggattctcgtgttcttcgacctgcctacggaaaccaagaaggagaagaaagcctatgctgacttccgtaagtccttgatgaaagatggattcactatgttccagttctctatttacgtacgccattgtgcgagtatggagaatgccgaagtccacatgagacgggttcgggcaatgctccctaggatcgggaaagttggcat

SEQ ID NO: 640 - DNA, 12544 bp, synthetic construct
  source 1..12544: mol_type = other DNA
  misc_feature 1..12544: note = Synthetic
tttctcttggcatggtataaataatttggatccaacgttttatttataccgtaaatataagaataatatttctaattatcaatattacattacactagtttcagggaatcccttcgggcttcctgtttcaacgcagcctgcggctgctggctcgatagcctttaaacaattaaggaattaggaactaggaattaggaattgccatccaatgaggatgaactccaaaatcctatccaattcccatctccaatcctctaaaaatcctctccaatcctctagaatcctctccaactccgaagattattggggtaaataacaaggatgggacgattattcggcccttcccctttgcgggaatcagaaaaaaatgtaattttgcagccgatttgtctgagacaatgggtaaagccccttgcggccgtccctgcgtgtgatggcgaattaagcaaaccacttaatttatagtaacacaaaattcaaaaaaacaatgagagaattttcaatcaatggtagcgttcgcgctaacctcggcaagaaggccaccaaggaagttcgcaagaacggcctcgtaccctgcgtgatgtacggagaaaagcgtgacgaaaacggtctgcccgttgcaactcatttcgtagtaaacgagaaggaaatcaacaagatttacttcacccctcacgtatatctcgtgaacatcaacatcgatggcgtagagcacaaggctatcgtgaaggaagtacagtgccaccccgtgaaggacaacgtgctccacgttgacttctatgaagtagttgccaaccgtcccatcgttgtcggtgtgcccatcgcacccaagggccttgcagaaggtgtacgcgccggtggtaagctcatggctatgattcgcaagatcaacgtgaaggctacctacgacctcatccccgaaaagctggacatcgacgtgaccaacctcggccttggcaagagcatcaaggtgggcgacctcagcttcgaaggtcttgagctcgttactcccaaggaggttatcgtatgcactgtcaagatgacccgtgccgctatgggtgctcttgctgctgccaacaagggataataaactgactgcatgagcggacgcggtagctatgagccacccccgcatacatattcaaaagagcaaacgagttaacaggcgtgatgaagcatcggcctcgttaactcgtttgctttatccttagcatatacttatgcactcactctttaattggctgaggaatatcggaaattcctcgtccgactcaaataagaataccatgaaccatctcatcgtaggcttgggcaatatcgggcccgagtatgccagaacgcgtcacaatatcggctttcgcgtgctggacgcaatggccgccgcggccgatgtgacctttcaggacaaacgctatggcttcatcagcgaactgcgcgtgaagaaccagaccctcttcctgctcaagccctccacctatatgaacctcagtggaaacgccgtgcgctactggatgaacgagaagaagatagaactcgaacgactcctcgtggtggttgacgacctcgccctccccttcggcagtctgcgcatgaagcccggcggcagcgaggcaggccacaatggtttgcgccacatcacacaggtgctcggcacgcagcaatacgcacgtctgcgcttcggtatcggcaacgacttcccccgcggcggacaagtcgactacgtgctcggcaacctgtcgcccgaggacgaggcagccctgcccgaacggctggatgtggctgccgaaatgataaagagtttcgcgctcagcggcattcagtttaccatgaaccatttcaacaaacgataggatggccaaccaagaagcacgcattgacaagtggctctgggccgcccgcatctacaagacacgtaccctggcagccgatgcctgcaaaaacggacgcatcaccatcaacggcgcgcagaccaaaccctcgcgcaccgtcaaggcaggcgacaaggtgggcgtgaagaaaccgcccattacctacaccttcctcgtcaaacagcccatcgagaagcgcgtgggtgcaaaactcctgcccgacatcttggagaatgtcaccacgcccgagcagtacgaactgctggaaatgagccgtatcagcggatttgtggaccgtgcacgcggcacaggacgtcccacgaaaaaagaccgccgcgccatcgacgacttccagactcccgaatttctggacggccttgacgatttcgactttgacgaagaggattaacgcattgacgaatcaggcaaccaggcccattacaaaagcgtcaaaggaaagaaaagcagcatcgccagtttccgccttcgcacaaaaggggaggggagaggtgcacctttctggcgcacgaatcatgccaccaaacgaaatttttcgtatatttgcagcaccatgacaaccgcacagatacaagccatcaagcaacgctatagcatcgtgggcaactgcgatgggttgaatcgtgcgattgagatggcgatgaaggtggcgccgatagacttctccgtactcgtcatgggcgagaacggcgtgggcaaagaggttttcccgcgcatcattcacgacgctagccagcgcagaaacaagaaataccttgccgtcaactgcggtgccattcccgaaggtacgatagattcggaactcttcggccatgtgaagggcgcatttactggtgcggtggacagccgcgaaggatatttttccgctgccaacggcggcaccctcttcctcgacgaagtgggcgaactccccttgcccacccaggcccgcctcttgcgcgtgctcgaaacgggcgagtttatccccgtaggttccagcgaggtcaaacgtacgaacgtgcgcatcgtagcggcgaccaacgtcaacatggaccaagccatcgccgaaggacgtttccgacaggacctctactatcgactcaactccgtgtccatccaaattcccgccctgcgcgaacgcggacaggatgccgtcttgctcttcaaaaagttcgccctcgagatgagcgaacaatacaagatgccgcccatccgattggatgccgaggccaccgctgtgctcctcgcctacgactggcccggcaatgtgcgacagctcaagaatatcgcggaaaatatgtccgtcacctgcgaggagcgcgaaatcaccgccgacatcttgcgcacctatctgccgcagcgcagcacgacgacaggacaggtggtaccccttcgccccgtggcgcgcactgccgaagtgcatgcctatgagcaggagcgcgaactcatcttccaaatgctcgttgacctgcgccgcgaagtcaacgaactgaagcgcatcctcggagttggagatacgggagccgcaacgggcgcgccgatgcccttgccccgccataccgacctgggctacgtagaaactccgtccgcccacccacatagccccgccgctccccacgccgtcaaggaggacgaacgcgcccagtacatggatgtggaggaggtgcgcgatgcagagccagctgcagagcccagcaagatgacggggacactcgaagacgtggaacgcgaaatgatacgcaccacccttgagaagaatggtggcaaccgccgcatcaccgccgctcgcctgcgcatcagcgagcgcacactctatcgaaaaatcaaggaatatggcctcgactaacaccacaaccgcacagcagcgcacgtcacgccgacatctgcccccgcgccgactatatatatatataggtatgctggcggccatcgtatgtctgagcctcaccgcctgcaccatcagctataagtttacgggaaccagtatcaactacgacctgataaagacgattcagatagacaaaatcgccaaccgcgcaccctatggttgggccccgatggaggctatcttcaacaacaaactccaagacctctacgccaaccagacgcgcctcaagatggttaaaagaggtggcgacctacatatcgcaggcgagattacaggctacgatcaattcaataaagccgtctcggccgacggattctcctcgcaggtgcagctccgcatgaccgtcaatatccgattccgcaacgcaaagacgggcgaaacatgggagaaacaattctccgccaccacccaatacgacgcttcgcaacaactggccgccgtgcaggaaaccctcgtcaacgaaatggtcaaggacctgaccgaccagatattcaacgccaccgtggccgactggtaaacttatttccgaatattcatcgtgtgcattcccgcacagcatcccttttacacagtaccgagaatatgcaacagcgcattcacgaactcattcaacaccctgagcgcctggacaaagatacgctctacggactgcgagaactcgtagcccgctatccctatttccaggcggcgcgcctgctgtttctccgcaaccttttcctcctccacgatgcctcgtttggcgaagaattgcgccgcgcagcaccgctcgtgtccgaccgccgcgccctcttcgagatgattgaagccgtcaactaccgcatccagcccgaaccgcttgagcgcgaatccgagcctgcgcccatccccgatggcgaccgcacagtcagcctcatcgatagcttcctcgacagtgccctggccgccgaatccaaacctaccaaaggaaatgcgcctgctgccgaccctgccaaggactacgtggcctatctcatgcaactggaagatgccaccccggcatccgcgcccgccgagagcggacgctcagaacgctcggccagcctcttagacgactatttggaccacggcgacgagcgcattgtcctccccgaacaagacacgccgggctccataactgccgccacagccgctgccgaaagcgagccagaagaggactatttcacagaaactttggccaaaatctatatcaaacaaggccgatatgagaaagcgatagaaattatacgcaagttaaacttgcaccatccaaaaaaaaatagttactttgcagaccaaattcgcttcctacagaaactgattatcaataataaatatcaaaaacaataaacaccatgtacgacgtatttgtaattctggccgtcatcactgctgtactcctcgcctgcatcgtcctgattcaggagtccaagggtggtggtctcgcctccgacttcgcctcctccaaccagattatgggcgtgcgcaagacaaccgacgtaattgagaagaccacatggacgctcgccgccctcctcgttatcttcagcgtggcatccgcattctgccttggcggtcccaagcagggctccgaaagcattgtcaaggatatgaagaccacagcacccgcacctgcagccaagaccacacctgctgcacccgctgctcccgcacccgctgcgcctggcaaataatctaagaaatcaaacacgcaacaagcctccgcgcctgttgtggtccccaacaaaaaagcacgagagaatctccgcaaagaggttctctcgtgctttttattttgcgtaaattggaaattacccagtcatgggtgagaatcgtaccgcatcgtgctaggtgtgagaagggagtgggatgcaatgtaccagacgttgtttgcaatgtgtggccaaacaaaaatcatagctggtagttactataggtaggttctcacgcaatgggaggggaagcggggtgtgtctccctcgccgcaccagaacaccctgttctttgatttcgtccatccgtggcagccgaaaggtagcgtgtcatgcgaacacttgaaactcagttcgggatatttgtgacattggaaagaatcgtggtgtaagaaaacaatcgaacagcaatggccttcgaccctatcatgtgcatttatgcagggtcagccaacaggacaaaagcaaaggtgagaataatctgccttctcaagaggctgcgaacggattttttgtatttttgcaattggatggtttttgaccagtctcctgtgcggcattatgcccagtgccctccctgagcgcgatgccctcaagcctcacggctattcccttcgggtattcgcagcctcggaagaggaaaagagaaaaaagggcaaaagaaaagggcgagttgccccgccctggatgttttcacaacggaataatccttattgtgaatagctgataaatcatatcgctggcaaagatatgaaaaacccattgaccaaacaagaaatccaaaaaaatattatgaaaaatgtactcggacttgatttaggaacaaactccattggatgggcactggtacagctgcccgaggaagagaatgtccgcccaaatattcgcatgggcagtcgcatccttccgatgagtcaggatgtgttgagcaaatttgagagtggtgtgaccacttcgcaaacccaggaacgcacatcgttccgccagttgcgccgcattcgcgaacgttatctgttgcgccgcgagcgtctgtttcgtgtgctccatgtgctaggtttcctcccgccgcattttgatgcagccttgggctgggaccgcacggacggcaagacttatggcaaatttcttggtcacgctgagccaaagatagcttggcgccgcgaccccagtggcaaaaaccgcttcttgttcatggattctttcggtgagatgttgagcgattttgagaagcaccagccgcaactcgttgctgatggtaagcagattccgctggattggacgctttattatttacgccataaagccttgcaggctcccctttcacgtcaagaactggcatggattctccttagctttaatcagaagcgtggttattatcagttgcgcggagaggaagaagaggtagatacctccaagcgtgtagagttcatgacctctcaggtgttgagcgttgaggaaacaagtcgcaatgctcgcaacacaacctataatataaatcttgagaacggatgctgtgtgccgtttacgagtagggcttcgctgaaggactgggtcggattgacgaaagagttcatcgtcaccacgtccttgaatgcagatggaaccccccagttgaatgaggacggcaagcctatctgtacgtatagcattcttgaagaggacaactacgcctctcggaagcagcgaaccgaagcagccattgaggagtctggcctcaccgtcggttcctacatctaccagtatttgctgaagcatcccgaggggaaggtcatcggcaaactggtgcgtaccattgaccgccgttattacaaggaagaattgcgcgccatcctgaccaagcaggctcagtttatacccgagttggccagtgcacaatctctggaggcgtgcattcaggaactgtatccccacaatgaagcccatcagcagagtttgcgtcgcaaggaccttatcaaccttattatggatgacctgctcttctatcaacgtccgctaaaaagtaagaagcatctcatcgccaactgtccctttgaacaatatgagtacctggcggaccgcgagacgggagagatgaaagtccagcacatcaagtgtatagccaaatcgcacccactctttcaggagtttcgtctctggcagtttgtgcaaaacctccgtcttttcaatagcaaggatatcaacgaggaagaggtgacagccctttatctgccagacgttgaggcgcgtgtaaggcttttcgattatctcaataatcagaaggatatcacgcaggaaaaattgttcaagggattcttccacctcaagaaagcaagcgggaaggacagccaatatccattgcgctggaattacgtggaggacaaggtctatccttgcaacgaaacgcgctatgtcttcttgactgccttgaagcgtgccaaaatcaaaaccgattggctgaccccagagcgcgagttgcgtatctggcaactgctgtattccgttgatgaccgcgtggaactcaccaaggctctcacgcattgggcccagcgagaacaattgcccgaagaatgggtggagtcgttctgcaagatacctcccttccagaaggaatatggtgcgtatagcgagaaggccatcaagaaattgctttccgtcatgcgtatgggtagccattgggacgaacaagccttgcctacaaatctgatggaaaactaccagtctgcgattggcgacgaaactgaatcccaactgcttgagcgaatggggggaaccgtgctcaaacagcccactgatttccagggcctctccctttggcaggcttgctatgccgtttatggtcgccactccgaggccaaggacacgacccgctggacgcgtcccgaggacattgatgctttccttcatggcttcaaacagcattcattgcacaatcccattgtagagcagtgcgttttggaaaccctccgcaccgtgcgcgatgtgtggaaggaggtgggccagattgacgagattcatgtggaaatgggtcgtagcatgaagagtacggcagcgcagcgtgagcgtatgagccgtaccatccgccaaaacgaagacacgaatctacgtatcaagcaactgttggaggaaatgaaggtggcccatattgaggctgtacgtccctattcccccatgcaccagttactcatgcgcatatatgaggagggtgccttgcagcaactcaacaaagaaagcgccgactaccaagagatttccagtattagcagaaaagcccaacctacgcctgccgagattcatcgttatcgtttgtggttggagcagaaatattgctcaccctacactgggcgtcccatttcgttcagccaactcttcacctcagcctacgagatagagcacgtcattcccaaatcccgattctacgatgattcgtttaccaacaaggttatctgtgaggcagaggtcaacaagctaaagtccaaccagcttggctacgagtttatcaagaaccacaaggggcagaccgtgcattgtcccgcccttggcgatgtgcgtatcttcacgccgcaggagtacgaggcattcgtgcgcgatcattatgctggccaaaagaccaaggctcagaaactgatgatggacgacatccccgaaactttcgtgcagcgacagatgaacgatagccgttatatcagccgcctcatgctgggcctcctctctcacattgttcgcgacgaggacgaggtagaagccacctcccgccatgtcatcccctgtacgggtgctatcaccgacaagttgaagaaggactgggggttgaacgatgtgtggaacagcatcgtcacgccgcgcttcgaacggatgaatcgcctgacaaattcagagaactatggctattgggataacaaggatggcaagcgtgtattccaaaccacgatgcccatggacgagcagcgcggatttaacaagaaacgcattgaccatcgtcaccatgccctagatgccttggccatcgccttggcttcgcgttctattgtgtcttatctgaacaatgtatcggcccacgatgcttgcacacgccaagacttgcgacgcaagctctgtggtcccaaccaaaccatcttgaaaccctggcccacactcacgcaggatgtctgcgatgccttgcatcgtgtagtggtcagtttcaagcaccaggtgcgcgtcatcaatcgtgccagcaattacgtagagcgctatgatggaggcggacacaaacgccttttcccccagacgggtgccaagcagtgggccatccgcaagtccttgcacaaggatacgatttatggtcatgtcaatctccgtcagattcgcgaggttgcgctcaatgtggctctcgaccaggtgtcgcagattgttgatcgcccgttgcgccggcagattcaaaaattgcaggccgagggattggacaagaaaaaacttaaagcatggttcgccgagcgcgacttcgtcttcaacgagcagtcggtgaagagggtgaaagtatattacttcaccgatgaagacaaacccatggtggccgtacgtaagccccttgatgcttccttcacggcggcaaccatcgccaagattaccgatacgggtattcagcgtatcctgcgcaactatctcgaagcctgtggcggcaacgccgaactggccttctcgcccgaaggcattgagcagttgaacagccatattgctcagtacaatgggggcaaggaccacaaacctattcttcgcgtacgcctctgcgagccgttgggtgagaaatttgctgtaggcgagtcgggtaacaaggttcgcaaatatgctgaagcacaaaagggaaccaatctctatctgggtgtctatgagaatgatgaaggccagcgcagtgttgccacaatgcccctgcgtatggtcatcgaacgcctgaagcaagggctcgcgcctgttcccgaaacggaccaacagggtgcgaagctccggttctggctctcgcccaacgacctcgtgtatctgcctacggaggatgagaagttgatccccaatattgaaaagctggagattagtcgaatctataagtttgtgagctgcacaggacgagtagcctatttcctgcctcatcatgtagctaccattattaaggatggtgcggaattccaaacattgaataagattcaaacaacagaggataaggttaatatagctagaaactgctggaaattggaggttgaccgcttgggcaatatcgtccgcattatccgatagcacgtatgattaagaaaaccctcttctttggcaatccagcctacctcagcctgcgccagcagcagctggttgtccaactgcccgaggtggagaagaacgataccatctccgaatcccttaagcgagctggcgagcgcaccatccctattgaagacataggggtggtggtgctcgacaacaggcggattaccatcacatcgggagctattgccgccctgctcgaaaacaatgtggccgtcatcacctgcgacgaccacagtataccccgcggactgctgatgccccttgagggaaacaccctccagcacgagcgtttccagtttcagatagaagcctccctgccgctccgcaagcaactctgggcacagactgtccgacagaagattctcaatcaggagtttgtgctgcgcacacaggttgtgggagtcgaaacggcctgtatgcgcacctgggctgccgccgtgcgcagtggcgaccccgacaatatggaggcacgggcggcagcctactattgggctcacctcttccccgacatcccttcgtttactcgccgtcgcgatggcgaaccgcccaaccacctgctcaactacggctatgccatcctccgcgccatcattgcgcgcaaccttgtggccagtggccttctgcccactctgggcatccaccaccacaatcgctacaacgcctattgtctggccgacgatgtgatggagccttatcgtccctacgtggaccaactggtcatacaggtgatgcaggcgtttgacgacattagcgaacttactcgagagctgaaggccgaactcctgcggattcctgtgctggatgtggtggttgatgggaaacgcagccccttgatggtggcggcgggattgaccacggcttcgctggctcgttgctacgcaggtgaggcgcgccaactggcatatccgcaatttttatgaacaacctgcccagtcgcttcagtgaataccgagttatgtggattctcgttttcttcgacctgcccacccagaccaagcgggatagaaaaatctatcacgattttcgcgagaacctgattcgagatggcttcacgatgtttcagtttagcatctacattcgccattgtgccagtcgcgagaatatggaggtgcacattcggcgcgttcgcagcattgtgcccgagtacggcaaggtgggtattctcactatcacggacaagcagtttggagatatggaggtgttctatggcaagaaagcccagaaggaccgccctgtctatattcagttggaactcttctaaccctcattgccttccatatcagccgcagttgctaaggtcatatagaaacaagaaatcccgttctcacgagcgggatttcttttatcacaaacaattttttgttttatgaatagtgcttgtaatttcctatatgccaacagaatatgagtattctgttgtttgtgatataggggggatatgactttgtcagctattcacaacgtcgtttctggatgccgctatggcggcgctgttgtttgtgatataggggggatatgactttgtcagctattcacaacaaatagtgccgcagtacgatggcagcgaaggttgtttgtgatataggggggatatgactttgtcagctattcacaaccgacagtttcgcataatggaaattacaaagttgtttgtgatataggggggatatgactttgtcagctattcacaacacagctccaggcacacaccgacataagaagttgtttgtgatataggggggatatgactttgtcagctattcacaaccctaccaaatatttttgcaaattttttcgggttgtttgtgatatagggggga

SEQ ID NO: 641 - DNA, 12270 bp, synthetic construct
  misc_feature 1..12270: note = Synthetic
  source 1..12270: mol_type = other DNA
cttacctttctttgtggtgatgaggatagcaccattagcagcattactaccataaagagctgcagcagatggaccagctaagacgctgatgctctcgatatcctctggattgagatcggcaataccttcactacttacacgaccttctcccatgataccgctatcacgtccgccactaaagttgaagattggaataccatcgataacatacaacacgttgttatcgccttcgatagacttggcaccacgcatgattacacgtgtagcacctccgacaccactggcactcttagaaatgttaacaccagctacttttccatttaatgaattcacaaagttggcatctttgttacgtgtcaactcatttgatccaactgattgtacgttgtaactcaaggctttctcggcacgtttaatacccaaggctgtcacaacgacctcgttcatcgtgtttgctacttccttaagcgtaacatcaatcgtagtcttatcaccaacaaggattgtctgagcggtatagccgacatacgagatgaccaacttcgctttgggcgctgcattaatggtgtagttaccatcaatgtcagtcactacaccatctttagagccttccaccataatggtggctccaatcaatggttcaccagcagagtcaacgacacgaccagttaccttgtgattaccgctttgttgcacagcctgtactgttgcagcatcaggtgagcctacgggatttcctactgcattagcactcgttggcactaatgcaacagaaagggcaaaagcaactgagaaatacagatgcttctgctttgattcatgaataattctcattaggttcagagtttaaattttaatattttaggtttcaaattgttgttttcttatgatagcagtatgaacgactaggttacgtcattgccacctctcactgtaagcggtgaagtaggattctcgctttatcagcaatggctactcaacgaataaacgtcaatctcacgaatgattaattgcttaaataaataatagcttaggtcaatgaacgtgtcttaataagtgcaaaagtataaaataaatttgtaaacaacacacttttctctaaaaaaacagtcatggtgtttgttatggttaaaagataactctgagcatcaacagattacaacaaacataaaaaaagagacatacgctcttcacgtacatctctgtttttgtttgatgtttaaaacatcctagttgcctgtatgcttattcgttctttacatcaactatctttgttggcgcctgctccttgttacgacgattaaccactgtaaccacgctctgggcaagacttaggaaagcctgaccggtaaccgtatcaacctgagttgctgctggagttcccttatcaccattctcacaaatactctgtacaataggaatctgggcaagcaatgggcagtcgagttccttcgctaagttcttacagccgtcttttccaaagatatagtatttgttctctggcagttcagctggtgtgaaccatgccatattctctaccaaaccaaggattggaatattcaccttgtcattgcgatacatgtctatacccttacgtgcatcagccagagctacattctgtggcgttgatacaatcaccgcacctgtaatagcaagcgtctgcatgagggtcagatgaatatcgctcgtaccaggaggagtatcgagaataaagtaatctaactcgccccagtctgcgtcagcaatgagttgcttgagtgctgaggtagccataccaccacgccaaagcgttgctgtgtctgggttgacaaagaaaccgatagaaagtagctttacaccatatttctctactggttcgatgagctgacgaccgtctttttctactccgtatggacgtgcatcctcaacaccaaacatctttggcatacttggaccaaagatatctgtatccagcaaaccaaccttatagccaaggcgtgctaaggctatagcaagattagcagagacggtactcttccctactccacctttaccagaacttactgcaatgatattcttcacctgtggcaataacttaccgacctcaggacgtggagcattcttaaattctgtggtgatagttacttcaacctccttaccaacagaatagtgtatctgggcctcagcggcctttatagtagatttgagaaaaggatcggtctcacgtgggaaaataagcgtgaaactaactttattaccattgatgctgggtgtgtctgccaacatctcactttcaataatattcttctttgttcctggataaattactttctccagtgcatctgtaatgagttttggatataatgtcattgttttattattttatcaatcttaaatgaagtcactaaaaaaggacctctcattgctctaaaagcccgtacgcatccaaatagggattcctcttatttcattgaatattcaaaaagaatgccacaaaataatcggacacattagttattctgcgattgctcccacttttcccactctttagcaacagctttccaatctgtcatctcacccgcctcaatagcttgctgctcacgtgcagcctcgtcacgagccttgtcacgggcacgctttgctttcatgtcggcaattgtggcatcgtcaagaatttgaatagcgccacgttcaatagcgtcctgcaattcctcctcgccaaaagctttaccgggttcattgaaatcagatatattaaactcgtagatggtacggaggtcatgacgaacaagtttctgcttcgcacgatttcccgcattcttcagtcggagtagtttttttatttcttttatctcgtcttttgcgaatttatttcttcccatgttttgattcttattcggatgtcaatgatagcgttcttgtctgcgaagatagcaacaaaatcccaatgctgcaagtttttcgtaaggaataaatagaacacttgtcactaaggatataaactatttgtgcgtaaattcaaaatcatatcgtcgaaaaatgttcgtttacgagacctaaaatatagatttttttttgtaagtttgtactcactttaaaaactgagtaaataacaacatatcacaaacaacaaaatatgaaacgcaaaacatggcgtaaatatcacaaatggattggaataatcattacattctttttggtaatgttctgcttatcaggaataattctcaatcatcgccaatccttcgcagatatcaacgtaagtcgtgccatcctaccagcgcgctattcttttgaacaatggaacaatgggttactgcgtggaactctgcgttataatgatgcagataagcataacaaagtaattatctatggtgcggctggtgtcattcaaacggactcagcggcatcaaagttcacagaatataaccaaggactgccttcaggtgctgattatcgccagataagaggggttgtgaaaactcctaaaaatgatatttttgcagccagcgtcatggggctttataaattaggtaagaactcacaatggcaaccggtgtctttacctctacaagagaatgacgaattattgactgatatcatcacgcatggtgatacgttgattgtgctttctcgttcccacctttattatgccaagacaccttacaagacatttacttgtcttacacttcaatcccctaacggctatgaaggcaaggtttcactcttccgtcaaatatggcttctacacagtggcgcattattcggaaccattggaaaactacttgtggatggaatcggtattatcctcatcttactttgtgtaacaggtatatggttctggctccgtcataaaagtacatcggtgcttgtgtggcataataaaattggagtttacaccttctatattacactcttccttgcgatcacgggctgggccttacgtccacctctcatgattttactcgcaaagaatagtacaaaaccattgccgggcacaaccttgagtagagacaacgcttggaatgacaaactgagaatgatacgttatgatgaccagaagcacgattggctcatctcaacttctgaaggatttttctcactcaaaacacttgctgacaaaccaacagctattgagtatgcaccccctgtaagcgtcatgggacagaacgtatggcaacgtataaatgacaacacatgggttgtcgggtcctttgatggtcttttcctttggaacagagattataacgaagttgccccatacgatgacagaatggctttcaatcctagtattcctggtactgcaccgagcgaacaaatgattacgggctttagttctgacttcaaaaacaaggagtgtatagcaacttattacttagggtcatcatttgcaaaacaacccgaagagttcaagaacaaaccaatgtctctttggagtcttgccttagaggtacacactggccgaatctatgcaggagcattaggttctttcctcttcatcttcgtcgcaggtatcctcatcatcatcgtcctcgtgtcaggtaagaaagcgtaggggagcaaataaccaagtaagaaaaaacacgaacaaattaaacgaagaatgagtcattgaaatatctcgattagctatagtgtgataaaacttctcatgtaagaaaaagaattacatacacgagagattgttttattttaatttgctgtcacttttaacaattcatttatcttgctctaaactaacaagttaagtatagagcataaatgacaggagtgacagcaagtttattttatgccgtgattggtaaaacgaaaaacgtacgattgatttttcataaatcttctctatggtataaacgaaacaaaaaagattttattgaggatatttccaaatatctgtttactaagcctaaaatatagaaaaaatcttttgttacttaaaaaaataaatcgtaactttggctctatatataaaaagaaagagcgagttgccccgctctgtttgttttcacaacggaataatccttattgtgacttgcttaaaaaatctgatgcaaatatacatataatataattaaaaaccaaataaaacaagaaaaaatgagaacaattcttggattagacttgggaaccaatagcattggttgggctaaagtctgcgttgacgacaacggaaactacgcacgtgagattaaacttggcagtcgtattatccctatgagtcaagatacactcagtaactttgataaaggcgtaacagagtctcctacagcagaacgaactacgtttcgaggtataagaagaatcagagaacgcgcactacaaagacgtgagcgtttacatagagtgttacacacaatagaattcttaccaaaacactatgatgaagcaattagatggaaccgagaagaagctacaacgtatggcaaatttcttaatcatgaagaaacaaagttagcttgggagaaacaagaggatggctctatgcgtttcctctttatggattcttttaaagaaatgatggctgactttgcaaaacaccagcccggaatggttgccgatgggaaaaagatacctttggattggacgctttattacctacgcaagaaagctctcacacaagccatcaagaaagaagaattagcgtggatattacttaatttcaatcagaaacgcggatattaccagttgcgtggagaggaagacgaagagaatccaactaaatgcgaagaattttacgaactgaaagttataagtgtggaggctgctgaggaaggaaaaggtggtaacacttggtataacgttaaattagaaaatggatggatataccgccgtcagagtaaaacggagctaaatgattgggttggaaaaatcagacaattcattgttactacagaatatgaaaaagatggagttaccgttaaaaaggataagaatggtgaagtaaaacgttctttccgagcaccaagtgaagatgattgggggctacgcaagaaacgaacagaaaaatcgttagagaattctggtaagacagttggtgcttttatctatgaccatatactttcaaaaccaactgacaaaatcagaggaaattttattcgtaccattgaacggaaattctataaaaaggaattggaagctatcctacgcgaacaatcaaaacatcataaggaactaagcggacataactcgcttgttgactgcatcaaagagctatatccaaataacaagcctcatcaagatagtctgatgaagaaagacatgtcatatcttttgattacagacttgattttctatcaaagacctctaaaaagtaagaaatctctgattgcagattgtccgtatgagtattatgaatatgtggtaaaagaaacgggagaaatcaagcgacaaggaatcaaatgtattgcgaagtcaaatccttattatcaggagttccgcttatggcaattccttatcaacctccgtctcttcgacagaacggatgataaagaagtaacctcagaatatttgtcttctaaagatgactattctaaactgtttgaatacctcaatgacaaaaaggatatcaaccaggagaccttattaaaagacttcttcaaacagaagaaaataaaaatgggtatggagaaagagtatcctatccgttggaattatattgaagacaaagagaaaaagtacccttgcaacgaaacacgtcacgagctacttgcagcattagacaaagcaggtatagaccatagttggttagatgacaaagaacaatactaccgcctttggcatcttctctattccgtagaatctaaggaagaagcacaaggagctttaagaaagctgaataataatgatgactttgttaacgcattcttaaaagtaaagccttttaagaaagaatatggtgcctattctgaaaaagccatcaagaaactccttgctgtcatgagaattggagatttttgggatgaggctaatatttgtgagcaaacaaaaaacagaatacataacattatcaacggagaaattgacgagaagataaaagaacgcatgggtcgttctttcactcaaatatccgatttccaaggactcccagagtggttatcttgttatgtcgtatatggcagacactctgaagcttcggataatcaaaggtggagaaccccagaagacctaatggcgtatatcaatggattcaagcaacattctcttcgtaatcctattgttgagcagtgtatccttgagacgctccgaaccgttcatgatatatggaaggaagcaggacacatcgacgagattcatgttgagttaggaagaaatatgaagagtacttctgagcaacgggcacaaaattctaaaagaatattgcaaaatgaaaataccaacctgcgcattaagagccttttaatggaactaaagaacgtgaaagaggttgagaatgtacgtccctactcgcctatgcaacaagaaatcttacggatatacgaggagggagcattgcaggaactaactacagaagatgctcaatatcccgagatctataagatttctcaaatggcacagccatcagcaaaagaattacttaaatacaggctttggttagagcagaagtattgttcgccctatacgggtaaacctatttcgctctcgaagttgttcacatctgcttatcagattgaacatatcattccacaaagtcgttattttgatgactctttcacaaataaagtaatttgcgaagctgaagtaaatcaacttaagagcaacatgttaggctatgaattcatcaagaagcatggtggagaaattgtgtattgtactaagataggtgacgttaaaatactcgatgaaaaggaataccataacttcgtaacagaacattatgccaataacagaaataagaaagagaaactcttactagaagatataccacaagagttcctaaaccgtcaactgaatgatagtcgatatatcagtaagaaggtaacatctattctttcaaacattgtgcgtggagaagatgagcaagaggttaactctaagtttgtcgttccatgtacggggggcataacagaccgcctgaagcaagattggggactacatgatgtgtggaacagacttgtatatcctcgctttgaacgccttaatcaacttacgcagtcagaagcctttggtcgttgggagaacaaagagggcaaacaggtctttcaaacttctgtacctttggaactccagagaggcttcagtaaaaacgaattgaccatcgtcatcatgcaatggatgcacttgtaatagcttgtgcatcacgcaatattatcaattatctcaacaatgagtctgccaagaatcaaacgaaaagagaggacttacgaaagaaactttgcgataagaatcgcattatacgtaaaccttgggagacattcacccaagatgcgcaagcagcacttgaagatgtcgttgtgagctttaaaaattatgtccgtgtcattaacaaagctaccaattactacgaaaggtatgaggcgaatggaaagaaaggaatggcaaaacaggagggacacgacatgtgggctattagaaagcctttgcacaaggagaccgtctttggacacgtcaatctccgtcgtaagatatcagttaaacttaaggatgcaattaagaatgttccagctatctgcaacaaagagttacgcgattacatcaatgatttaattgcaaagaaatacaattcaaaacaaatacttgcacacttcaaagataagaactatcgacttaatatgaagtatgtcgataaggttgatatgtggcagttcagtgacgaaaaggaacctatggtcgctactcgcaaatctcttgacacatcatttgatgccaaacgtattgcgactatcacggacactggaatccaaaagattcttctcaattacctcagtacaaaaaacaatgatccaaacattgctttcactcctgaaagtattgcagagatgaacaagcatatcgttgagtataacaatggtaagcagcatcaacctattctgaaagtaagagtgtcagaacctatgggagctaaatacgaggtgggagaaactggtaataaaaccaaaaagtttgttgaagctcagaaagggacaaatctttattttgccatctacgaagacaaagatggtaaccggtcatacaacactattccattaaatgtagttgctgaacgattaaagcaagggctttctccggtacctgacatgaatgaaaaggaagctcatttaagattttatctttcaccaaatgacttggtttatgtcccaacagaagaagaaaaacaatccggaaactgcaaactcaataaaaaacggatttataaaatggttagtgcaactgggtatgaatgtctttttcttccttacaccatttcaaatattatatataataaagttgagtttgagtcattgaataaaatgggaagagctttaacagccgagatgataaaagctgtttgttggaaacttgaggtagatcggttaggaaatatcctaaagattataaagtaaaacctttttgcttatgataaagaaaaccttatgcttcagcaatcctatttatttaagtttgcgaaatgcacaattagttttacatttaccagaagtagaaagtaacaaaactttacctgaagctattaaacgagaagcagaacgtaccatcccgatagaagatatcggggtggttgttctcgacaacaaacggattacgataacttctggcgtcatggaggctttactcgaaaacaattgtgcggttattacttgtaatcaaaagagtatgccagtaggattactcctacctttgtgcggtaacgcaacacaaaacgaacgttttcgctcacaaatagatgcatctctacctctaagaaaacaactttggcaacagacaataaaacaaaagattcttaatcaggaatacgtgttacgtgataacacagacaaggaaaccaattgcatgcgtgtatggtcaaatgatgttcgcagcggggaccctgacaatctagaagcaagagcagcagcttattattggaaaaatctcttcaacgattgtccaaactttgtaagagatcgtgatggttcacctccaaacaatcttttaaattatggttatgccattcttcgtgccataatcgcccgttcattagtaggaagtgggttacttcctacattaggtatccaccaccataatagatataatgcatattgtcttgctgatgacataatggaaccatatcgcccttatgtagatcaattggtgttagacatcattcataataacaatgaaatacctgagattacacgagaaataaaacttcaactacttagcatcccgacattagatgttgtcataaatggtaagcgtagcccattaatgattgcagcacaacaaacagcagcttcactcgccaaatgttttgctggagaaagtaaacgcatcagttacccagaaatgtaaaaactgtatgacaagttttgaacgcttcagtgagtatcgtattatgtggattcttgtattctttgatttaccaacagaaaccaagaaagagaagaaagcctatagtgactttcggaaatccctcataaaagatggattcacaatgttccagttttccatctacctacgtcattgtgctagtatggaaaatgctgaagtacacatgaaacgggttcgggctttactacctaaaataggaaaagtaggaatactttgtatcactgataaacaatttgctaatattcaattatattatggcgaaaaggcacaaagtcctaatgcccctgggcaacaattagaactcttttaaacatcttaactaccaatcactaacaaacaagtatcatacaacataaaagatattctattatgcaatagcataaaataaaaatcccattcattacgaatgggatttttctctgtagtatcagtttttcaacaaacaacaacttcatatcttattaattaccagataattatataacatcggttgttgttgataccacaaaggtacaatttttcaagcaaatcacaacagtagtgataatgtttcctactctggtgttgttgttgttgataccacaaaggtacaatttttcaagcaaatcacaacaaaagagcatgatggttcttactctgttgagttgttgttgataccacaaaggtacaatttttcaagcaaatcacaacaggtctcggttattctcttgaccctcttagttgttgttgataccacaaaggtacaatttttcaagcaaatcacaactggctctaaatccattagttggaagtgcaagttgttgttgataccacaaaggtacaatttttcaagcaaatcacaacagtagtttatagtatcattttattaggacagttgttgttgataccacaaaggtacaatttttcaagcaaatcacaactggctgcttctcttgttgttcgtatagttggttgttgttgataccacaaaggtacaatttttcaagcaaatcacaaccaattggcaatccatttaatccaatagcttgttgttgttgataccacaaaggtacaatttttcaagcaaatcacaacacgagacaaatgataggttttgtcatcagtgttgttgttgataccacaaaggtacaatttttcaagcaaatcacaacccccagtcttctgctatttcagaaccatctgttgttgttgataccacaaaggtacaatttttcaagcaaatcacaacagacgcacggcgcaacgcttcacggtctacgttgttgttgataccacaaaggtacaatttttcaagcaaatcacaacatgtcaaaacgtattgtcctttatcatcaagttgttgttgataccacaaaggtacaatttttcaagcaaatcacaaccacgagataagaacggcaaggcggataaaagttgttgttgataccacaaaggtacaatttttcaagcaaatcacaactcaaatccgttcctgcttatgattctcgaagttgttgttgataccacaaaggtacaatttttcaagcaaatcacaactataaatagaatctaaagataactctatatgttgttgttgataccacaaaggtacaatttttcaagcaaatcacaacagtggtatcgctcacagcatccagatgagggttgttgttgataccacaaaggtacaatttttcaagcaaatcacaacgttctgaaacatgtaataaaaatattgctgtccgataaaacctctacatgctgcactactctctctcaatgctgctg

SEQ ID NO: 642 - DNA, 11129 bp, synthetic construct
  misc_feature 1..11129: note = Synthetic
  source 1..11129: mol_type = other DNA
ccttacctttctttgtggtgatgaggatagcaccattagcagcattactaccataaagagctgcagcagatggaccagctaagacgctgatgctctcgatatcctctggattgagatcggcaataccttcactacttacacgaccttctcccatgataccgctatcacgtccgccactaaagttgaagattggaataccatcgataacatacaacacgttgttatcgccttcgatagacttggcaccacgcatgattacacgtgtagcacctccgacaccactggcactcttagaaatgttaacaccagctacttttccatttaatgaattcacaaagttggcatctttgttacgtgtcaactcatttgatccaactgattgtacgttgtaactcaaggctttctcggcacgtttaatacccaaggctgtcacaacgacctcgttcatcgtgtttgctacttccttaagcgtaacatcaatcgtagtcttatcaccaacaaggattgtctgagcggtatagccgacatacgagatgaccaacttcgctttgggcgctgcattaatggtgtagttaccatcaatgtcagtcactacaccatctttagagccttccaccataatggtggctccaatcaatggttcaccagcagagtcaacgacacgaccagttaccttgtgattaccgctttgttgcacagcctgtactgttgcagcatcaggtgagcctacgggatttcctactgcattagcactcgttggcactaatgcaacagaaagggcaaaagcaactgagaaatacagatgcttctgctttgattcatgaataattctcattaggttcagagtttaaattttaatattttaggtttcaaattgttgttttcttatgatagcagtatgaacgactaggttacgtcattgccacctctcactgtaagcggtgaagtaggattctcgctttatcagcaatggctactcaacgaataaacgtcaatctcacgaatgattaattgcttaaataaataatagcttaggtcaatgaacgtgtcttaataagtgcaaaagtataaaataaatttgtaaacaacacacttttctctaaaaaaacagtcatggtgtttgttatggttaaaagataactctgagcatcaacagattacaacaaacataaaaaaagagacatacgctcttcacgtacatctctgtttttgtttgatgtttaaaacatcctagttgcctgtatgcttattcgttctttacatcaactatctttgttggcgcctgctccttgttacgacgattaaccactgtaaccacgctctgggcaagacttaggaaagcctgaccggtaaccgtatcaacctgagttgctgctggagttcccttatcaccattctcacaaatactctgtacaataggaatctgggcaagcaatgggcagtcgagttccttcgctaagttcttacagccgtcttttccaaagatatagtatttgttctctggcagttcagctggtgtgaaccatgccatattctctaccaaaccaaggattggaatattcaccttgtcattgcgatacatgtctatacccttacgtgcatcagccagagctacattctgtggcgttgatacaatcaccgcacctgtaatagcaagcgtctgcatgagggtcagatgaatatcgctcgtaccaggaggagtatcgagaataaagtaatctaactcgccccagtctgcatcagcaatgagttgcttgagtgctgaggtagccataccaccacgccaaagcgttgctgtgtctgggttgacaaagaaaccgatagaaagtagctttacaccatatttctctactggttcgatgagctgacgaccatctttttctactccgtatggacgtgcatcctcaacaccaaacatctttggcatacttggaccaaagatatctgtatccagcaaaccaaccttatagccaaggcgtgctaaggctatagcaagattagcagagacggtactcttccctactccacctttaccagaacttactgcaatgatattcttcacctgtggcaataacttaccgacctcaggacgtggagcattcttaaattctgtggtgatagttacttcaacctccttaccaacagaatagtgtatctgggcctcagcggcctttatagtagatttgagaaaaggatcggtctcacgtgggaaaataagcgtgaaactaactttattaccattgatgctgggtgtgtctgccaacatctcactttcaataatattcttctttgttcctggataaattactttctccagtgcatctgtaatgagttttggatataatgtcattgttttattattttatcaatcttaaatgaagtcactaaaaaaggacctctcattgctctaaaagcccgtacgcatccaaatagggattcctcttatttcattgaatattcaaaaagaatgccacaaaataatcggacacattagttattctgcgattgctcccacttttcccactctttagcaacagctttccaatctgtcatctcacccgcctcaatagcttgctgctcacgtgcagcctcgtcacgagccttgtcacgggcacgctttgctttcatgtcggcaattgtggcatcgtcaagaatctgaatagcgccacgttcaatagcgtcctgcaattcctcctcgccaaaagctttaccgggttcattgaaatcagatatattaaactcgtagatggtacggaggtcatgacgaacaagtttctgcttcgcacgatttcccgcattcttcagtcggagtagtttttttatttcttttatctcgtcttttgcgaatttatttcttcccatgtcttgattcttattcggatgtcaatgatagcgttcttgtctgcgaagatagcaacaaaatcccaatgctgcaagtttttcgtaaggaataaatagaacacttgtcactaaggatataaactatttgtgcgtaaattcaaaatcatatcgtcgaaaaatgttcgtttacgagacctaaaatatagatttttttttgtaagtttgtactcactttaaaaactgagtaaataacaacatatcacaaacaacaaaatatgaaacgcaaaacatggcgtaaatatcacaaatggattggaataatcattacattctttttggtaatgttctgcttatcaggaataattctcaatcatcgccaatccttcgcagatatcaacgtaagtcgtgccatcctaccagcgcgctattcttttgaacaatggaacaatgggttactgcgtggaactctgcgttataatgatgcagataagcataacaaagtaattatctatggtgcggctggtgtcattcaaacggactcagcggcatcaaagttcacagaatataaccaaggactgccttcaggtgctgattatcgccagataagaggggttgtgaaaactcctaaaaatgatatttttgcagccagcgtcatggggctttataaattaggtaagaactcacaatggcaaccggtgtctttacctctacaagagaatgacgaattattgactgatatcatcacgcatggtgatacgttgattgtgctttctcgttcccacctttattatgccaagacaccttacaagacatttacttgtcttacacttcaatcccctaacggctatgaaggcaaggtttcactcttccgtcaaatatggcttctacacagtggcgcattattcggaaccattggaaaactactcgtggatggaatcggtattatcctcatcttactttgtgtaacaggtatatggttctggctccgtcataaaagtacatcggtgcttgtgtggcataataaaattggagtttacaccttctatattacactcttccttgcgatcactggctgggccttacgtccacctctcatgattttactcgcaaagaatagtacaaaaccattgccgggcacaaccttgagtagcgacaacgcttggaatgacaaactgagaatgatacgttatgatgaccagaagcacgattggctcatctcaacttctgaaggatttttctcactcaaaacacttgctgacaaaccaacagctattgagtatgcaccccctgtaagcgtcatgggacagaacgtatggcaacgtataaatgacaacacatgggttgtcgggtcttttgatggtcttttcctttggaacagagattataacgaagttgccccatacgatgacataatggctttcaatcctagtattcctggtactgcaccgagcgaacaaatgattacgggctttagttctgacttcaaaaacaaggagtgtatagcaacttattacttaggttcatcatttgcaaaacaacccgaagagttcaagaacaaaccaatgtctctttggagtcttgccttagaggtacacactggccgaatctatgcaggagcattaggttctttcctcttcatcttcgtcgcaggtatcctcatcatcatcgtcctcgtgtcaggtaagaaagcgtaggggagcaaataaccaagtaagaaaaaacacgaacaaattaaacgaagaacgagtcattgaaatatctcgattagctatagtgtgataagacttctcatgtaagagaaagaattacatacacgagagattgttttattttaatttgctgtcacttttaacagttcatttatcttgctctaaactaacaagttaagtatagagcataaatgacaggagtgacagcaagtttattttatgccgtgattggtaaaacgaaaaacgtacgattgatttttcataaatcttctctatggtataaacgaaacaaaaaagattttattgaggatatttccaaatatctgtttactaagcctaaaatatagaaaaaatcttttgttacttaaaaaaataaatcgtaactttggctctatatataaaaagaaagagcgagttgccccgctctgtttgttttcacaacggaataatccttattgtgacttgcttaaaaaatctgatgcaaatatacatataatataattaaaaaccaaataaaacaagaaaaaatgagaacaattcttggattagacttgggaaccaatagcattggttgggctaaagtctgcgttgacgacaacggaaactacgcacgtgagattaaacttggcagtcgtattatccctatgagtcaagatacactcagtaactttgataaaggcgtaacagagtctcctacagcagaacgaactacgtttcgaggtataagaagaatcagagaacgcgcactacaaagacgtgagcgtttacatagagtgttacacacaatagaattcttaccaaaacactatgatgaagcaattggatggaaccgagaagaagctacaacgtatggcaaatttcttaatcatgaagaaacaaagttagcttgggagaaacaagaggatggctctatgcgtttcctctttatggattcttttaaagaaatgatggctgactttgcaaaacaccagcccggaatggttgccgatgggaaaaagattcctttggattggacgctttattacctacgcaagaaagctctcacacaagccatcaagaaagaagaattagcgtggatattacttaatttcaatcagaaacgcggatattaccagttgcgtggagaggaagacgaagagaatccaactaaacgcgaagaattttacgaactgaaagttataagtgtggaggctgctgaggaaggaaaaggtggtaacacttggtataacgttaaattagaaaatggatggatataccgccgtcagagtaaaacggagctaaatgattgggttggaaaaatcagacaattcattgttactacagaatatgaaaaagatggagttaccgttaaaaaggataagaatggtgaagtaaaacgttctttccgagcaccaagtgaagatgattgggggctacgcaagaaacgaacagaaaaatcgttagagaattctggtaagacagttggtgcttttatctatgaccatatactttcaaaaccaactgacaaaatcagaggaaattttattcgtaccattgaacggaaattctataaaaaggaattggaagctatcctacgcgaacaatcaaaacatcataaggaactaagcggacataactcgcttgttgactgcatcaaagagctatatccaaataacaagcctcatcaagatagtctgatgaagaaagacatgtcatatcttttgattacagacttgattttctatcaaagacctctaaaaagtaagaaatctctgattgcagattgtccgtatgagtattatgaatatgtggtaaaagaaacgggagaaatcaagcgacaaggaatcaaatgtattgcgaagtcaaatccttattatcaggagttccgcttatggcaattccttatcaacctccgtctcttcgacagaacggatgataaagaagtaacctcagaatatttgtcttctaaagatgactattctaaactgtttgaatacctcaatgacaaaaaggatatcaaccaggagaccttattaaaagacttcttcaaacagaagaaaataaaaatgggtatggagaaagagtatcctatccgttggaattatattgaagacaaagagaaaaagtacccttgcaacgaaacacgtcacgagctacttgcagcattagacaaagcaggtatagaccatagttggttagatgacaaagaacaatactaccgcctttggcatcttctctattccgtagaatctaaggaagaagcacaaggagctttaagaaagctgaataataatgatgactttgttaacgcattcttaaaagtaaagccttttaagaaagaatatggtgcctattctgaaaaagccatcaagaaactccttgctgtcatgagaattggagatttttgggatgaggctaatatttgtgagcaaacaaaaaacagaatacataacattatcaacggagaaattgacgagaagataaaagaacgcatgggtcgttctttcactcaaatatccgatttccaaggactcccagagtggttatcttgttatgtcgtatatggcagacactctgaagcttcggataatcaaaggtggagaaccccagaagacctaatggcgtatatcaatggattcaagcaacattctcttcgtaatcctattgttgagcagtgtatccttgagacgctccgaaccgttcatgatatatggaaggaagcaggacacatcgacgagattcatgttgagttaggaagaaatatgaagagtacttctgagcaacgggcacaaaattctaaaagaatattgcaaaatgaaaataccaacctgcgcattaagagccttttaatggaactaaagaacgtgaaagaggttgagaatgtacgtccctactcgcctatgcaacaagaaatcttacggatatacgaggagggagcattgcaggaactaactacagaagatgctcaatatcccgagatctataagatttctcaaatggcacagccatcagcaaaagaattacttaaatacaggctttggttagagcagaagtattgttctccctatacgggtaaacctatttcgctctcgaagttgttcacatctgcttatcagattgaacatatcattccacaaagtcgttattttgatgactctttcacaaataaagtaatttgcgaagctgaagtaaatcaacttaagagcaacatgttaggctatgaattcatcaagaagcatggtggagaaattgtgtattgtactaagataggtgacgttaaaatactcgatgaaaaggaataccataacttcgtaacagaacattatgccaataacagaaataagaaagagaaactcttactagaagatataccacaagagttcctaaaccgtcaactgaatgatagtcgatatatcagtaagaaggtaacatctattctttcaaacattgtgcgtggagaagatgagcaagaggttaactctaagtttgtcgttccatgtacggggggcataacagaccgcctgaagcaagattggggactacatgatgtgtggaacagacttgtatatcctcgctttgaacgccttaatcaacttacgcagtcagaagcctttggtcgttgggagaacaaagagggcaaacaggtctttcaaacttctgtacctctggaactccagagaggcttcagtaaaaaacgaatagaccatcgacaccacgcaatggatgcacttgtaatagcttgtgcatcacgtaatattatcaattatctcaacaatgagtctgccaagaatcaaacgaagagagaggacttacgaaagaaactttgcgataagaatcgtgttatacgtaaaccttgggggacattcacccaagatgcgcaagcagcgcttgaagatgtcgttgtgagctttaaaaattatgttcgtgtcattaacaaagctaccaattactacgaaagatatgaggcgaatggaaagaaaggaatggcaaaacaggagggacacaacatgtgggctattagaaagcctttgcacaaggagaccgtctttggacacgtcaatctccgtcgtaagatatcagttaaacttaaggatgcaattaagaatgttccagctatctgcgacaaagagttacgcgattacatcaatgatttaattgcaaagaaatacaattcaaaacaaatacttgcacacttcaaagataagaactatcgacttaatatgaagtatgtcgataaggttgatatgtggcagttcagtgacgaaaaggaacctatggtcgctactcgcaaatctcttgacacatcatttgatgccaaacgtattgcgactatcacggacactggaatccaaaagattcttctcaattacctcagtacaaaaaacaatgatccaaacattgctttcactcctgaaagtattgcagagatgaacaagcatatcgttgagtataacaatggtaagcagcatcaacctattctgaaagtaagagtgtcagaacctatgggagctaaatacgaggtgggagaaactggtaataaaaccaaaaagtttgttgaagctcagaaagggacaaatctttattttgccatctacgaagacaaagatggtaaccggtcatacaacactattccattaaatgtagttgctgaacgattaaagcaagggctttctccggtacctgacatgaatgaaaaggaagctcatttaagattttatctttcaccaaatgacttggtttatgtcccaacagaagaagaaaaacaatccggagactgcaaactcaataaaaaacggatttataaaatggttagtgcaactgggtatgaatgtctttttcttccttacaccatttcaaatattatatataataaagttgagtttgagtcattgaataaaatgggaagagctttaacagccgagatgataaaagctgtttgttggaaacttgaggtagatcggttaggaaatatcctaaagattataaagtaaaacctttttgcttatgataaagaaaaccttatgcttcagcaatcctatttatttaagtttgcgaaatgcacaattagttttacatttaccagaagtagaaagtaacaaaactttacctgaagctattaaacgagaagcagaacgtaccatcccgatagaagatatcggggtggttgttctcgacaacaaacggattacgataacttctggcgtcatggaggctttactcgaaaacaattgtgcggttattacttgtaatcaaaagagtatgccagtaggattactcctacctttgtgcggtaacgcaacacaaaacgaacgttttcgctcacaaatagatgcatctctacctctaagaaaacaactttggcaacagacaataaaacaaaagattcttaatcaggaatacgtgttacgtgataacacagacaaggaaaccaattgcatgcgtgtatggtcaaatgatgttcgcagcggggaccctgacaatctagaagcaagagcagcagcttattattggaaaaatctcttcaacgattgtccaaactttgtaagagatcgtgatggttcacctccaaacaatcttttaaattatggttatgccattcttcgtgccataatcgcccgttcattagtaggaagtgggttacttcctacattaggtatccaccaccataatagatataatgcatattgtcttgctgatgacataatggaaccatatcgcccttatgtagatcaattggtgttagacatcattcataataacaatgaaatatctgagattacacgagaaataaaacttcaactacttagcatcccgacattagatgttgtcataaatggtaagcgtagcccattaatgattgcagcacaacaaacagcagcttcactcgccaaatgttttgctggagaaagtaaacgcatcagttacccagaaatgtaaaaactgtatgacaagttttgaacgcttcagtgagtatcgtattatgtggattcttgtattctttgatttaccaacagaaaccaagaaagagaagaaagcctatagtgactttcggaaatccctcataaaagatggattcacaatgttccagttttccatctacctacgtcattgtgcgagtatggaaaatgctgaagtacacatgaaacgggttcgggctttactacctaaaataggaaaagtaggaatactttgtatcactgataaacaatttgctaatattcaattatattatggcgaaaaggcacaaagtcctaatgcccctgggcaacaattagaactcttttaaacatcttaactaccaatcactaacaaacaagtatcatacaacataaaagatattctattatgcaatagcataaaataaaagagggtgtgtcaaaatggacacatcctcttttttattcttcctttaccttgtctaccacataattccctatttactgcggctatgctgctaatttcatataaaatgatttattggtctttaaatagcctatataaacttgtatagagcatctgaaggtgactaaaagtacctccataacggcttttagttccttgagattagtttttctgcacatttttcctatgttaaaggca

SEQ ID NO: 643 - DNA, 10163 bp, synthetic construct
  source 1..10163: mol_type = other DNA
  misc_feature 1..10163: note = Synthetic
cgacttgatgcggaacgcaagggctatgaccatttcaaggctgtacgcatcaagccagtgcccctccgctatcttgatgttcctctctgccgtgcagggatgcagcagcccagacttgtatatttccttgacctgcgtgcggctagtatgcccgaacacgccaaacaggtcggcaatctcatactcgcccatccatatctcgccgttgggtatagtgacgttcccgtgttcgtccatcgtgattatctgacgggctttgccgtttatgtcttctcctttcattgttatcctatcttgatattgccgaatgatacgttgagcttactgccgagcatggagaggtcggtgtcgagtttctcggtggttatcttcgcatagagttgcatggttacgatgttcgtgtgtccgagtacacggctcacgctctcgatgggcatgcccttgctgagtgccaatgtcgcaaagccgtgccttgcgcagtggaaggagatgtcctttgtgataccgcactcgcagatgactttcttgagcctcttgcagaccgtccaatagttgatgtccccgaatatggagttgtctttctgaaacggtctgtatcgttcgatgatttgcagggggacatcaagcaacttcacttggaacggaacatgcgtcttgtgtcttctcgcaagtatccacttctcgccgttcacctccacgatctcatcggtggtgagttctttcaagtccacgaacgaaagggcagtgaaggaggcgaaaacgaacaagtcacgcacgaaggcggagtggctgtcggcaaactcgtgcgacatcagcgtcttcagctcgtcctccgtaaggaactcacgctccttcgtgttcggactgacatggaactgagcaaacggatttctgggtatcttgccgttgaagtgcgcacgcatcaccacgcccttgagccacatgcagttcagccagatagtggcgttcctgtttcctttcaccgtactgaggtacacggcgaagtctctgatgaagtcgggagtgagtttctgcatcgacatgtcgctgcggttgtacttgtagcggataaacttttccgtgttgttccttgccctgagcatcaccttgtatgtccccatgctcctgtccttgcccacacgcttgagcagggaagcgcagtccctgtcgaaggatttgagcagggtgtcgtcctcgatgcccagcccctgataggcattgcgcaccatctctgccgtgacgaacgcctcacggtcggaaagcctttggtagtgcctgatgatttgcgccttgatgttgtcaagcgagagattggttgcgatggcttccttgctcttgcctttcgccctgttgcctctcacatcccacaactccctagggatggtgcgcttgcagctgaactgtgccaccgtgccgttgattgtaacacgtcccatgatggggacgataccgtttttctccttgctgccgttcacatagaacagcaccttgaatgtacttcttgccattgcctcttctttttgattgcaaaattaaacatgaaagagcctaaccctgctatgcaaaatatagagcagtgaagcaaaagcaacggatgcaccagaaaacgctatttttcttcttgttgatgaaggtgattaccccgtttggaggtaatgatttgaaaaccattcttctgctgtaatccgcatattactgcctcgtggcaggtggcggattttctgcggtttacaccgtatagccttaataatcaagcccaattgcgttaaactgccgatttcatgcaaatattacagcaatttttcgtatctttgtattgtataaatgactggcatactgatgaatacgttcaacaacaagactgcgcttgactatcgtttcttaactcgagaagacgttgtaagtcttctcgtgcaaaaggacatggagcttatgcgtaaggatgccgagcttgtgcaaaaggatgccgagcttgtgcaaaaggatgccgagctggcaagaaagtcccgccgcatccttgaacttgaacgtatggtattcggtaggcgcagcgagaaacgcctgccggaaagtcccgacggatgggttggcacgctcttcgacgaacagtgggcaaaggaaggttcgctgcttcacgcagaaacacttcccgtcatcgacgagataaagcagcaggccaagcgccgccgagaggcaagccgcaccaaccgccccgcaagaaaaggcaggccgtacgcctcttacgttcctgacgacatagagcggaaggtcgtggtaatctatcccgagggttatgatgcggaacgtatggtcgtcatcgggcatgacaggactgaacacttgtgcctacgtcccccttgcttttatgtcaaggttgaagaccgcgttgtctgccgtcagaaggaggcaaggccaacggatgcgaaggtcggcatactggaagcccccttgcagaggcaggcagtggattgttttgccgacgcctccctgctggccgagattgtcacgggaaagtttgcctatcacctgccggagtataggcagagcgccagatggaaggagcacggcatcaacatccccacctcaaccataaaccgttgggttcacggcgccgccgatgcactgcatccgctgtataagcttcaagtggggctgattctgcagagcccctacctgcaagttgatgagaccagcgtgcaggttgccgaccgcaagggcaagacccgcaagggttacctctggggagtgagggatgcgctgcattcccggggcgtattcttccactggaaggaaggttcacggtcgggcaccgtgcccgacgagctcttcaagggctaccacggcgccatacaatccgacgggtatgaggcatacggcaggtttgaaaacgttcagggcatagaactgttgggctgcatggcccatgtccggcgaaagttcgagcatttagcggcagacgacaagaatgccgcccacatagtcgacaccatcgccgcactttacgagttggaagaaaacctgaggcacggcaacgccggccctgagcaagtcctggctgaacggaaatccaaagcctatcccatactgaagtcacttgaagcatattttaaggaagtacacaagcagtacctccccaacgaagccatggagaaagccctgcgctatgccttctccgtatggatacgtatcagccgatacgtacaggacgggcgtttcaacatagacaacaacctcatggaacaagccatcaggcccatcacgctgggaagaaagaactacctgttctgcggcaacaacgaggaagcggaaaacaatgccgtcttctatacattcatggcctgttgcagggaggcaaggatagaaccttacggatggttaaggcgcgtcttagcgaaacctttgctggacatgaaggaggatgagttgattaaactactgcccataaactgcaaataacataaagcccttatatgacgcccgtcatataagggcttttttgtgaagtatcaatacggcgaattttggatgcttacagtcaagacaacttcgctaactttttagttggattgttgtttgttttgaaatttatgtttatttttgccttaacaaagacaaaagtgctttgtttgcgataatagcaggcaacaaaaaaggcggatgctatgaggtttccctaataacacccgacttatttgtttcacaacggaataatccttattgtgatttgcttgaaatcgtgctgcaaatttaatgataatatcgctaactgcaaaacaaatttcaataaaatgaaaaatattttaggtttagacctcggcacgaatagtgttggctgggctttgatttctgttgatgagaatggcaatctagtgaaggacatccgcttgggaagtcgaatcatccccatgagtcaggatgtactgggtaagttcgattcgggagttaccgtgtcgcagacggccgaacgcaccgagtatcgcagccatcgccgtttgttggagcgtgcactcttgcgccgagagcgacttcatcgtgttcttcacctgttgggcttcttgccagaacattatgctgcgtgcattggatgggatagaaacaataatgccacctatggcaagttcttgcccgaaacggaacctaaattagcttggcgaaaggcagacgatgggggctatcgatttgttttcatgcagtcgttcgaggagatgctcgacgatttcagtgcaagtcaaccatcgctcgttgccaacggcaaacgcattccattggattggacactgtattatcttcgaacgaaggctttgacaaagccaattgctaaggaagagttggcttggatattgcttaacttcaaccaaaaacgcggctattaccagctgcgcggggaggaagaagaggaaactccaagcaagcgcgtggagtatcacgaactaaaagtggtgaaagtggaagcaaccgacgaaggtaagggcggcaatgtttggtataacctgcttttagagaatggctgggtttatcgcaggcaaagcaagtattcgctagacaagtggttgggacaaacgcttccgtttatcgtcactaccgatttggaggcggatggcgttacacccaaacgcgataaagaaggtaatgtgaaacgttcgtttaggtcgccaaaagaagatgattggacactggttaagaaacgaaccgaagaccgtttggaaaaatcgggcttaaccgtgggggcatttatttaccaacatcttttggcgaacccatcagataaggtgcgtggccaattggtgcgaaccatcgaccgcaaatattacaagcgcgaattgcaagcgataatagccaaacagatggagtttcatcccgaattgcgtgatgccgaattgctgaaagcatgtgccgaagagctctatcggaacaacgaggcacaccgtgcacagcttctcgcaaaagactttaagcacttgcttgtagaagacgtgctgttttatcagcgtccgctgaaaagcaaaaaatcgcttatagccaactgtccgtacgaaacacgccaatatattaataaggagacgggagaaataaaggatgtgaacgtgaagtgcattgccaagtctaacccttatttccaagagttcagattgtggcaatggataagcaaccttagacttctgcgccaagccgatggtcaggacgtaaccgcagcgtacataaagggcaatgaagacaaggagcgattgttcgacctgctcaacaaccaaggcgaaataaagcaagaacacatcttgcgcgactttttgaaattgaagaaaccaaagggtggcgaattccccttgcgttggaactatgtaggcgacaaaatttaccctgccaacgaaacgcgccatgccatgaacaaagccattaagggcatgaccgtggataaggaggagaaagaaacgcttgggcagctgcttgatcagcctgccgtagcgtatatgctttggaacttgctctactccattaccgaccgcaacgagcttgccagtgccctgcgccgttttgcccttacgcatggtgtttcttctgtcgatgcctttgtggaatcattcttgaaggtgaaaccctttaagaaagagtatggtgcctattcggagaaagccaccaaaaagctgttacaagtaatgcgactgggcaagtattggtgcggcgacgaattgcccgaacctgctaaacggacgaaaggcaataagcaagccgtgtacgatgaaatggctaatcggggcatttgcaagcaaaccttgcaaaacatcagcaacatcatcgaagaggatatagacgagcggctgatgggtgcgcttcttaaccctgacagacctctaacggagttgtctcatttccaaggcttatccgtttcggatgcttgttacgtggtgtatggccgacattcggaagtggccgaaatagtcaagtggaaagatgctggcgaactaaacaccttcatcaacaactttaagcaacattctatgcgcaaccccatcgttgagcaatgtgtgctagaaaccttgcgcacggttcgcgatgtgtgggagcaagaagggcagatagacgagatacacgttgaactggggcgcaatatgaaacgaacggccgaacaacgggcgcgcgacacccaggccatacagcgcaacgaaaacaccaacatgcgcataagcttgctgcttaccgaattgaagaacgaccccagcatcagcgatgttcggccttattcgccttcgcaacgcgaattgctgaaaatatacgaagagggcgcattggagaacttaaccaaccaagacgaagacatcgctaagatttctcgtttggcacaaccatccgctagcgaactgcggcgctataagctgtggctcgaccaaaagtatgtgtcgccatatacgggtaggcccatccctttggccaagctgtttacccctgcctacgagattgaacacatcattccgcagagtcgttatttcgacaattcgttctctaacaaggttatttgtgaggccgatgtaaataagcttaaagataaccttttgggtatggagtttattaagaaattcggtggaaaaacaaagggcatccttgacgaggaggcctataagctgcacgttacgactaactatgcacacaaccccgcaaagcgaagcaagctgttgatggaagacttgcccacggattttaattcgcgacagctcaacgacacacgctatatcagtaaaacggtgatggccctgctttctaatgtggttagagaggaaggagaacgagaaacgcgttcgaaacatgtggtggtgtgtacgggcggcgttaccgatacgctgaaaaaagattggggcttgcacgatgtgtggcacaatttggtttatccgcgtttcatcaggcttaacaatcttacaggtagtcagaactttgggtattggagatacttgaatgaggagaatagaaagaaaggggaagatagtaggaaagtgttccaaatcactttacctctcgatttgcaacgcggatttgtgaaaaagcgtatcgaccatcgtcaccatgctatggatgcgctggttatcgcctgcgcatcgtccgacattgttaattatctcaacaatcaatcggctgccaatcctcatgctcgccaagacctacaacgcctgctgtgcgatagaaagcgcgagataagaaaaccttggccaacctttacgcaagatgcccaaaaggcacttgaagaccttgttgttagctttaaaaatacggtgcgcgtggtgaataaggcctccaacacgtatcttcgttatgataaggatgggaagaaaaagcgatttaagcaagagggtgaaggactgaaagccataaggaaacccatgcacaaggaaacttattacggcgaggtgaaccttatcaggaaagaaatgctgcctttgaaacgcgctttggatgatgtcaacgccattgtagacaaagaattgcgtgcctgcataaagggccttctgcgtgatggctttaacctccaacaggttttggccaactttaaagctaaggactttaagtttgataagcgcgatataaagaaggtggaagtgtatgttagttcggaaaaatctacgcccatggtggccacgcgcaagtcgttggacacgtctttcaatgccaaacgcattgccgacattaccgacacgggcattcaaaagattttgctaaactatttaaaggccaacgataattctcccgaacaggcctttacgcccgaaggtatcgcctatttgaacgagcacattgccgaatataacaacggaaaaccgcatcaacccatattgaaggtgcgtgtgtcagacgttatgggggctaagtttgctgtgggacagatgggggcaaagaaaacccagtttgtcgtagcagaaagtggaactaacctttatttcgctatttatgaggataaggagggaaaacggcactttgaaaccattgcccttaacgtagcggctgagaggttgaaaacggggcaaacgcctgtcccagaaactaacgatgctggcctacctcttaaattctacctgtcaccgaacgacttggtgtatgttcccacagacgaagaccgcgccgcagcgcatccttcaatagataagcggaggatatataagatggtgagcgcaacggaaggaaaatgtcatttcttgccagtttctgttgcttctatcattgctgataaagtagagttcgaagctatgaataaaattggccgtgtgatagatgccttggagtacaaggagaagagcgaggagaagagcgaggaggagaacaaaacttctgcaggtagcaaggttatgataaaggatgtgtgttggaagttggaagtagatcgacttggtaatatcacaaaaattgtgaggtaatgattaagaagacactttgtttcaccaatcccgcctatctaagtctgcaccaatgccagttggttatccgtcttcccgaagtggaggagaacgaaagtctgagcaatgtgctgaaagagcaggccgaccgcaccatcccagtggaagacattggggtggtggtgcttgaccatcggcgcataaccatcacttcgggcgcgctcgatgccttgctcgaaaacaattgtgcggtgataacctgcaatgcgcaaggtcaccccgtggggctactccttccccttagtggcaacaccttgcaaagcgaacgctttcgcgagcagatagactcttctctgcctttgcgcaagcagctatggcaacaaaccatcaaacagaagattgccaaccaagctgcggttctgcggagcgttacgggtaacgacgaaaagtgcatgcaggtgtgggcagagcaggtgcgaagtggcgaccccgataacattgaggcgcgtgcagcagctcattattggcagcatctttttccccaactgccccattttgttaggtcgcgcgaaggcgaaccgcccaacaatttgctgaactatggctatgccattctgcgtgctgtggtggctagggcattggttggcagtggcttgttgcccactttgggcattcatcatcacaatcgctacaatgcctattgcttggccgacgacattatggagccttatcgaccctatgtagaccgcctagtgctgaacatcattcgcacaaatggggtggtggatgaactcactcgcgagttgaagtcgcagttgcttgtggttcccacactagatgtggttgttaatggtaaacgaagtccactgatgatagccgctcagcagaccacggcttcgctctataagtgtttttcgggcgagctacgccgtgtgagttatcctgaaatgtaattcgcttatgtcaaaccttagccgacttaatgaatatcgtgttatgtggatattggtgtttttcgaccttccaacagaaacgaagaaggataagaaagcttacgtagactttcgcaatcttttgcagcgagatgggttcaccatgtttcaattctccatctacctacggcattgtgctagtatggagaatgcggaggtgcatatcaaacgggtgaaaaactcgctccccaagtatggcaaggtaggtgttttgtgtattaccgataagcaattcgacaacattcagctcttttatggcactaaacctcataagcctaacgcacctgggcaacagctggaattgttctaacgcaccggcattattagaaagaagaaatcccactcgcacagagtgggatttctttttgcagtctcattttttttatttcttaaatctttgtatctgtttgtagtacaaatagatatggtgtttaagttgtttgcgatactgcaaaagtacgatttttcaagcaaatcacaacaaggccgtgatggtcaagtatattatctagttgtttgcgatactgcaaaagtacgatttttcaagcaaatcacaactgagtacgagggattatcttcttcattagggttgtttgcgatactgcaaaagtacgatttttcaagcaaatcacaacgctacttgtttattccacatttcacgctgggttgtttgcgatactgcaaaagtacgatttttcaagcaaatcacaacatggttgataaggcttagacttacctttaagttgtttgcgatactgcaaaagtacgatttttcaagcaaatcacaacagtgcgtcat

SEQ ID NO: 644 - DNA, 7256 bp, synthetic construct
  misc_feature 1..7256: note = Synthetic
  source 1..7256: mol_type = other DNA
agagatatataaggcatcctccaaaaagaagagcaaatatgaggacaagtttaagtttgagccagacaattataactacagcatagcagacaaaaaagatggctacctcatcaccatcaaggcaaagaagggtgttgacggcgtgaaagaagcccgcatactgctcgataagcgcacccgcgccccaaaaagcctgaagataaaggtggcatttttctgggctaccatacatatctccaacttccagtcaggcaatcttgacgacagcctcttcgtattccccaaagcaaagttcgcaggctatgatttcatagataaacgggacgaagattaaaaagggttgactttcgctaagacagaagtcaaggtggcaggaaatattcccgccttgggaacaaaatcttcccacactgggagtaaaaacattcccgccgtgggttatcgtatctttaggacgctttcacaaagcgaagcgactgaaagaatttttttgttgcctggtaggcagattattgaaaaataagggcagatgattgaatcgtaaaggctggttattgaaaattaaacgtcatttgttgaaagacctaacatcgttttccgaagaagtccctgtttataggcgattcgggcgtttttgatgccttaaagaggtaacataagacctaacaaaaaggtaacataacacctaacataaacctaacatcggttttgacttcacaacatcgataaggcagcatttgatgttacctctcatgttacctttatgttaggtctatgttaggtatcatgttaggtctttagacttgttttgcaaccttaaaggtctgaatatcagttgcttgataattttggatgttaggtatttaagaaaaatgtcaataaaaattttgtggtattggaaatttttaataattttgtgggcgaatatatctactaacgagtagtcacaaattgacataaaaaaggcgagttgccccgccttgaatgttttcacaacggaataatccttattgtgatttgctaaaatttagtgctgcaaaagtaagaataaaatttaaatccaccaaataatttcaagaaaaatatctttattctatgaaaaatatattaggtttagacttgggaaccaacagtattggttgggcattactttctgttgacgaagatgataacatcataaaaccacaaataaagttaggcagtaggataattcctatgagccaagatgttcttggtaaattcgatagtggcgtaacggagtcacaaacagcccaacgaacgcaatataggggcgtgcgcagactgcgcgaaagatgcttgttgcgtcgtgaaagactattgcgtgttttgcatacactaaatatgctaccagaacattttgataactctataggttggaataaaaacgataacaagacctatggaaagttcaaagatgccagcgagccgaagatagcttggaggaagaatgagaatgggaaaatggagttcgtttttatgtcctctttcctggaaatgcttgatgattttgcagagcatcagcctgaattagttgctgatggcaagaaagttcccttggattggacgatatactacctgagaaagaaagcactctcacaagccattagtaagcaagagttagcttggatacttctaaactttaaccaaaagaggggctattaccaactgagaggtgaggatgaggaggaacactctgacttaaagaaagaagaatattacacccttaaggtggtaggagtagaggctactgatgaaaagcgaggtaatgacacatggtataacatacaccttgaaaatggttggatatatcatcgctccagtaaggtgccactaaacgattggaaaggtaaggtaaaggaatttattgttactaccgaatatgaacctgatggaacagtaaaaacagataaagaaggaaaagaaaaacgttcatttagagcgcctaaggatgatgactggaatcttcagaagaaacgtgttgagtcaaatatagagtcttcgggcaaaactgttggaacttatatttatgatactttgctcgctatgccttcggagaaaattcgtggcaagttggttagggtggtagagcgtaatttttataagcaagagttgttggcaatcctcaagaaacaagtcgaatatataccagaattaacaaacaaggatttgttagaggcttgtataaaagaactttacgcaagcaatacagcacatcaagacagtttgcgtagaaaggatttgacgtatctgctcgttaacgatttgttgttctatcaaagacccttgaagagcaagaaatctttgatatctgactgtccttatgaacaatatgaatatattgacaaagaaacaggggaggtgaaaacgcagcacataaagtgcatcgcaaagtcaaatccctactataacgagttccgcgtatggcaatttgttcaaaatctacgtttgtataacaggggtataaacgaagaggaagtaacttcgcaatatctaaaagatgaatatgattatgaacgtttgttccatttccttaatgacagaaaggaaatcacgcaggaagccttgctgaaagaattcttctcaataaaaaagtcaaagggcaaagatgcgaaatatcccttacgttggaactatgcagaagataaatcatatccttgcaacacaacacgttctatactgctgaactcattgcggaagtctggcatagatacggagttacttaaagatggaaatatagaatatcgtttgtggcatctcctgtattctgtggaagataagaatgaggttgatggcgccctaaaaaactttgcttgcgagaataatctgccagacacctttgtggaggtcttcaagaaaataccatcgtttaaaaaagaatatggagcttattctgaaaaagccataaagaaactgctgtccgtaatgcgtatgggaagtatgtggcatgaggaagatattcctgaaagtgtagatgcaataatcagtggtgagatagatgataaaattgcagcgagggtttcacgcagcggttatactttcccctctaagcagtcatgcaaaggactgcctgagtggttggcatgctatgtagtatatggcagacattctgaagcaagcgacatagaaacatgggagaaaccagaagacctcgcttattatattcgtaatttcaagcaccactcattgcgaaatccaatagtggaacagtgtattcttgaaacattgcgcactgtgcatgacatctggcagaagtatggcaagattgatgagatacacatagagttaggcaggagcatgaagaaccctgccaatattcgcaaggaaataaccgaacgtattcaaagaaacgagaacaccaatctgcgtataaaacaactgctccttgaattgaagaatgatgctaacatcaaagatgtccgtcctcactctccgatgcagcaagaaatattacgcatttatgaagaaggtgccttgcaagagctgaaaagggaagatgacgactatgcagacatagaacgcatctctcgtcttgcttcaccaactcagagcgaacttataaaatacaaattatggttggaacagaaatatcgctcgccatatacgggtaagaccatttcgctttcaaaactgttcactcctgcataccagatagagcatgtgattccgcaaggaaggtactttgacgattccctatctaacaaggtcatttgtgaagctgaagtaaaccaaaagaagagcaatatgctcggtatggagtttataaagaaatgtggcggagaaattattacatgtagcactcttggcaatgtaaaggtgtttaccgaagatgagtatagcaagttcgtcgaggaacactatgctaacaatcgtagcaaggcaaagaaacttttgatggaagacattccagaggaattcatacagcgacagatgaatgatagcagatatataagtaaggttatcaagggtttactgtcaaatgtcgtgcgcgaagagggcgagattgatgccatatctaaaaacgtcattccttgcacaggtggcataacagatcgtctaaagaaggattgggggcttaaggatgtgtggaacactattgtatatccacgttttgaacgaatgaatcagttgactggcacagaagattatggtcactgggaaaacaaggaaggcaaacgtgttttccagacagctatgccgttggaattatccaaaggtttcagcaaaaaacgtatagatcatcgccatcatgctatggatgcccttgttatagcactcgcatcaagaaacattgttagttatctcaataatgactctgcccatgacacaaaatatagggaagacttacgtaaattgttgtgtgaaaagaatcgcacaatccgcaaaccttgggacacattcacggaagatgcactaaaggcattgcaagatatcgttgtttcatttaagcattatataagagtcataaacaaagctaccaactattatgagcattatgacgagaaaggcaataaggcattcgtaaaacaagagggtgaagatatgtgggctgttcgcaagcctatgcataaggaaaccgtctttggacatgtcaatctgaaaagatataaggaagttccattcagtaaagctcttgctaatgtaaatcgtatctcaaacaaggaattgcgagatgcaatcaacgtgatgcttggggcgggaatgaatataaaacaaattaatgctcaattcaaaaagggcgagtacaaatatcttggacatgactacactaaggttaaggtagtatatttcacagacgaaacagagccaatggtggcaactcgtaagcttctggatgatagttttgatgagaagaaaatagcaagtatcactgacactggaatacaaaagatactgcttgcatatctgcattctaaagacaataatccgaagttggctttctcaccagagggaatcatggaactcaacgagcatattgcagaatataataatggcaagaaacatcaacctatcataagggtaagggtttctgaacctatgggcgagaaatataatgtaggtttcagtggcaataaaaataagaagtatgtagaggctcaaggaggtaccaacctctactttgctatatatgaaaatgaggagggaagacgcagttatcaaaccattcccctgaatgaagtagtagaaaggctgaaacaacgacttacgccagtacctgaaacaaacgaagcaggaaataaactgaagttctatctgtcacctaatgaccttgtgtatgttcctgatgaagaagaaagaatatctgatgtcaagaatctaaatagggaaaggatttataagtttatagatagtagcaacactacggcaaactttataccagcatattctgcatcggtaatttaccacctcccaaaggatattgccataaaacattctaaatctgatagaataatccaagacgaatatggagaaggtagtcctcaatcaaaaaatcaaaagtctatatctggtgcaatgataaaatcctgttgctggaaattagaagttgacagattgggcaatatcacaaaggttattcactaaacaatgattaagaaaactctatactttggcaatcctgcatatttggcattaagagaagagcaacttgttataaaacttccagaggtagaaacaagtgaaaatctgccattggagtttaagaaagaagctgaacgcaccatacccatagaggatgtcggtgtagttgttctcgacaataagcgtatcaccattactactggagcaatagaggctttgctggagaataatagtgcactcatatcatgtaatgacagaagcttacctgttggacttatgctgcccctcgtcggcaacactttacaaaacgaaaggttcagacatcagctgaatgcatcgctacccctgaaaaaacaattgtggcaacaaacagtaaaacagaaaattgcaaatcaggcgcaggtgttaaacacatatacattgacagaaactgcttgcatgcagaggtggataaacgatgtaaaaagtggtgacactgaaaatgtagaggctaaggctgctgcatattactggaagaatgtatttcctgatgttcctgacttcgtcaggggtagagagggagaaccgcccaataatctgctaaattatgggtatgctatactaagggctgtgatagcaagggcacttgtaggtagcggcttgttgcctactctcggaatacatcaccataacaggtataatgcctattgtcttgcagatgatataatggaaccttacagaccttatgttgacgagttagtgatacagataatgcatgaagaagatgattattcagaactaacccgcaatctgaaagctaaattgctgcaaattcctgtactcaatgtcgtaatcaacaggaagcgtagtccgttgatgattgctgctggcataacggctgcatcgttgtataagtgttttagtggggaaagcagacaaatagcctttcctacaatgccgtcatgatattatggatttatcgcgactgagcgaatacagagttatgtggattctcgtattctttgatttgcctacagaaactaaaaaagacaggaaggcatatgcacaattccgaaagcagttgaaatgtgacggttttacaatgttccagttttctatatatgtacgccattgtgcaagcagggaaaatatggatgttcatatgagaagggtacggtctttcttgcctgaatatggaaagataggaatattgacaattactgataagcaatttggggatattgagatattctatgggcagaaagaacaaccacaggcaaaccaacctcttcaacttgagttgttttagaaaaagaaatcctgcctttgttagcaggatttcattaccataagcaccaaattttattttctgaaaaaccttgtatcttccacatattcaacgccttgtggtaggtctgttgtttatgctgggtgcaaaggtactaaatttttagcaaatcacaactgaagagcgtagagcgccaggagcgcatgagatgtttctgccactgcaaaggtactaattttttagcaaatcacaacagatcagcatcaacagaaagacaaagacctgatgtttctgccactgcaaaggtactaatttttttgcaaattacaaccggcaaagatagcacgtaaggccttgctatgaaatacactaccagcgcttcgcttttcgg

SEQ ID NO: 645 - DNA, 5879 bp, synthetic construct
  source 1..5879: mol_type = other DNA
  misc_feature 1..5879: note = Synthetic
acgaatagtgttggctgggctttgatttctgttgacgagaatggcaatctagtgaagaacatccgcttgggaagtcgtatcatccccatgagtcaagatgtattgggtaagttcgattcgggagttaccgtgtcgcagacggccgaacgcaccgagtatcgcagccatcgccgtttgttagaacgtgcactcttgcgccgagagcgacttcatcgtgttgggcttcttgccagaacactatgctgcgtgcattggatgggatagaaacgataacgccacctatggcaagttcttgcccgaaacggaacctaaactagcttggcgaaaggcagacgatgggcgctatcgttttgttttcatgcagtcgttcgaagagatgctcgacgatttcaaggcaagtcagccttccctcgttgccaacggcaaacgcattccattggattggacactgtattatcttcgaacgaaggctttgacaaagccaattgccaaggaagagttggcttggatattgcttaatttcaaccaaaaacgcggctattaccagctgcgaggtgaggaagaagaggaaacaccaagcaagtgcgttgagtatcatgagctaaaagtggtgaaagtggaagcaaccgacgagggtaagggtggcaatgtttggtataacgtgcttttggagaatggctgggtttatcgcaggcaaagcaagtattcgctagacaagtggttgggacaaacgcttccgttcatcgtcactaccgatttggaggcggatggcgttacacccaaacgcgataaagatggtaatgagaaacgttcgtttaggtcgccaaaagaagatgattggacgctggttaagaaacgtaccgaagaccatttggaaaaatcgggcttaaccgtgggggcatttatttaccaacatcttttggcgaacccatcagataaggtgcgtggccaattggtgcgaaccatcgaccgcaaatattacaagcgcgaattgcaagcgataatagccaaacagatggagtttcatcccgaattgcgtgatgccgaattgctgaaagcatgtgccgaagagctctatcggaaaaacgaggcacaccgtgcacagcttctcgcaaaagactttaagcacttgcttgtagaagacgtgctgttttatcagcgtccgctgaaaagcaaaaagtcgcttatagccaactgtccgtacgaaacccgccaatatattaataaggagacgggagaaataaaggatgtgaacgtgaagtgcattgccaagtctaacccttatttccaagagttcagattgtggcaatggataagcaaccttagacttctgcgtcaagccgatggtcaggacgtaaccgcagcgtacataaagggcaatgaagacaaggagcgattgttcgacctgctcaacaaccaaggcgaaataaagcaagaacacattttgcgcgactttttgaaattgaagaaaccaaagggtggcgaattccccttgcgttggaactatgtaggcgacaaaatttaccctgccaacgaaacgcgccatgccatgaacaaagccattaagggcatggccgtggataaggaggagaaagaaacgcttgggcagctgcttgatcagcctgccgtagcgtatatgctttggaacttgctctactccattaccgaccgcaacgagcttgccagtgccctgcgccgttttgcccttacgcatggtgtttcttctgtcgatgcctttgtggaatcattcttgaaggtgaaaccctttaagaaagagtatggtgcctattcggagaaagccaccaaaaagctgttacaagtaatgcgactgggcaagtattggtgcggcgacgaattgcccgaacctgctaaacggacgaaaggcaataagcaagccgtgtacgatgaaatggctaatcggggcatttgcaagcaaaccttgcaaaacatcagcaacatcatcgaagaggatatagacgagcggctgatgggtgcgcttcttaaccctgacagacctctaacggagttgtctcatttccaaggcttatccgtttcggatgcttgttacgtggtgtatggccgacattcggaagtggccgaaatagtcaagtggaaagatgctggcgaactaaacaccttcatcaacaactttaagcaacattctatgcgcaaccccatcgttgagcaatgtgtgctagaaaccttgcgcacggttcgcgatgtgtgggagcaggaagggcagatagacgagatacacgttgaactggggcgcaatatgaaacgaacggccgaacaacgggcgcgcgacacccaggccatacagcgcaacgaaaacaccaacatgcgcataagcttgctgcttaccgaattgaagaacgaccccagcatcagcgatgttcggccttattcgccttcgcaacgcgaattgctgaaaatatacgaagagggcgcattggagaacttagccaaccaagacgaagacatcgctaagatttctcgtttggcacaaccatccgctagcgaactgcggcgctataagctgtggctcgaccaaaagtatgtgtcgccatatacgggtaggcccatccctttggccaagctgtttacccctgcctacgagattgaacacatcattccgcagagtcgttatttcgacaattcgttctcaaataaggttatttgtgaggccgaggtaaataagctcaaagataacaatttgggtatggagtttattaagaaattcggtggaaaaacaaagggcatccttgacgaggaggcctataagctgcacgttacgactaactatgcacacaaccccgcaaagcgaagcaagctgttgatggaagacttgcccaccgattttaattcgcgacagctcaacgacacacgctatatcagtaaaacggtgatggccctgctttctaatgtggttagagaggaaggagaacgagaaacgcgttcgaaacatgtggtggtgtgtacaggcggcgttaccgatacgctgaaaaaagattggggcttgcacgatgtgtggcacaatttggtttatccgcgtttcatcaggcttaacaatcttacaggtagtcaggattttgggtattggagatacttgaatgaggagaatagaaagaaaggggaagatagtaggaaagtgttccaaatcactttacctctcgatttgcaacgcggatttgtgaaaaagcgtatcgaccatcgtcaccatgctatggatgcacttgttatcgcctgcgcatcgcccgacattgttaattatctcaacaatcaatcggctgccaatcctcatgctcgccaagacctacaacgcctgctgtgcgatagaaagcgcgagataagaaaaccttggccaacctttacgcaagatgcccaaaaggcacttgaagaccttgttgttagctttaaaaatacggtgcgcgtggtgaataaggcctccaacacgtatcttcgttacgataaggatgggaagaagaagcgatttaagcaagagggtgaaggactgaaagccataaggaaacccatgcacaaggaaacttattacggcgaggtgaaccttatcaggaaagaaatgctgcctttgaaacgcgctttggatgatgtcaacgccattgtagacaaagaattgcgtgcctgcataaagggccttctgcgtgatggctttaacctccaacaggttttggccaactttaaagctaaggactttaagtttgataagcgcgatataaagaaggtggaagtgtatgttagttcggaaaaatctacgcccatggtggctacgcgcaagttgttggacacgtctttcaatgccaaacgcattgccgacattaccgacacgggcattcaaaagattttgctaaactatttaaaggccaacgataattctcccgaacaggcctttacacccgaaggtatcgcctatttgaacgagcatattgccgagtataacaacggaaaacggcatcagcccatattgaaggtgcgtgtatcggagattaggggtactaagtttgctgtgggacagacgggttcgaagaaaactaaatttgttgaagcgcagtctggaaccaacctttatttcgctatttatgaggataaggagggaaaacggaactttgaaaccattgcccttaacgtagcggctgagaggttgaaaacggggcaaacgcctgtcccagaaactaacgatgctggcctacctcttaaattctacctgtcaccgaacgacttggtgtatgttcccacagacgaagaccgcgccgcagcgcatccctcaatagacaggcggaggatatataagatggtgagtgcaacggataaaaatagtttcttcttgccatttgaagtagcttctattattgcagatcaggtagagtttgaggcaaagaacaaagttggccgtgtgatagaaacgttggagtacactgagcaatatgagtcttcagccattaacaagattatgataaaggacgtgtgctggaagttggaagtagaccgacttggtaacatcacaaaaattgtgagataatgattaagaagacactttgtttcactaatcccgcctatctaagtctgcaccaatgccagttggttatccgtctgcccgaagtggaggagaacgaaagtctgagcaatgtgctgaaagagcaggccgagcgcaccatcccagtggaagacattggggtggtggtgcttgaccatcggcgcataaccatcacttcgggcgcgctcgatgccttgctcgaaaacaattgtgcggtgataacctgcaatgcgcaaggtcaccccgtggggctacttcttccccttagtggcaacaccttgcaaagcgaacgctttcgcgagcagatagactcttctctgcctttgcgcaagcagctatggcaacaaaccatcaaacagaagattgccaaccaagctgcggttttgcggagcgttacgggaaacgacgaaaagtgcatgcaggtgtgggcagagcaggtgcgaagtggcgaccccgataacattgaggcgcgtgcagcagctcattattggcagcatctttttccccaactgccccattttgttaggtcgcgcgaaggcgaaccgcccaacaatttgctgaactatggctatgccattctgcgtgctgtggtggctagggcattggttggcagcggcttgttgcccactttgggcattcatcatcacaatcgctacaatgcctattgcttggccgacgacattatggagccttatcgaccctatgtagaccgcctagtgctgaacatcattcgcacaaatggggtggtggatcaactcactcgcgagttgaagtcgcagttgcttgtggttcccacactagatgtggttgttaatggtaaacgaagtccactgatgatagccgttcagcagaccacggcttcgctctataagtgtttttcgggcgagctacgccgtgtgagttatcctgaaatgtaatttgcttatgtctaaccttagccgacttaatgaatatcgtgttatgtggatattggtgtttttcgaccttccaacagaaacgaagaaggataagaaagcttacgtagactttcgcaatcttttgcagcgagatgggttcaccatgtttcaattctccatctacctgcggcattgtgctagcatggagaatgcggaagtgcatatcaaacgggtgaaaaactcgctccccaagtatggcaaggttggtgttttgtgtataacagataagcaattcgacaacattcagctcttttatggcactaaacctcataagcctaacgcacctgggcaacagctggaattgttctaacacaccggcattattagaaagaagaaatcccactccatttgagtgggatttctttttg

SEQ ID NO: 646 - DNA, 23432 bp, synthetic construct
  misc_feature 1..23432: note = Synthetic
  source 1..23432: mol_type = other DNA
agattgatatcttccatcgggaccacttgggactggccgccaccggtcgcgccgcccttcatgccaaagcagggaccgagggatggctcgcgcaggcagagcagggtcttgttaccaatccggttcatcgcgtccgccaggccgatgctggtcgttgtcttgccttcgcctgcaggcgtggggttgatggccgtgacgaggatcagcttgccatttgccctggcacgcaggccgctcaggtgttgcgccgcgattttcgccttgtcatggccgtaggggatcacatcctgcggcgcgatctgcaacgtctcggcaacatccatgatagggcgtttcttcgcgtttctggcgatctcgatatcggtcggcatgtatcccccggtttctgttcttgcttgtccccggtgtagacagacgcgccaaaacccgcaatcagacaggtcacaagagaggacaaccttatgagcaagcttatccgtccgtccgggcgcgcttttgaccagttgcgtgagatcacgttggagacgaatgtcacccgttatgcggaagggtcatgccttgcgaagttcggaaacacccatgtgctgtgcacggccagctgggagaagggggttccgccttggctgaaagggcagggcaagggctgggtcaccggtgagtacggcatgcttccacgcgctacgcatacgcggggcaggcgagaagctgcagcgggcaaacagtctggccgcacgcaggaaatccagcgcctgatcggccgctcccttcgctcggtttgtgacctccaggcgctgggcgagaatcagatcactatcgactgtgatgtccttcaggctgatggcggcacgcgcacggcatccattacgggcggctttgtggcgcttgccatggcctgccggtacctgaaggcagaaggcgtcatctccgcaaacccgatccagaagcaggcggctgccatttccgtcggcatctatcaggatcatccggttctggatgtcgactatccggaagattcccgcggcgaagccgacatgaatgtcgtgatgagctccgatggcggtttcattgaggtgcagggcacaggggaagagcgcccgatcacgcgctctgaactggatgaaatgctgcgtctggccgaaaaaggctgcaccgaattgttcgaagcccagcgcaaggcgcttggctaggccattatctggctggcaggttctgcaactcgaacatgccgaactggaagttctgggcgatacggtcggcacgctccatgaagtagtcaactgtttccggattctccgaaatgtcctccagcgtcagccggaacaaggccagccagatattgaagtgagcgggcgtgaggcccgtcagcttcatgtgcaccgggaagggcttccccgaatagcggcctgtattcatcgcaaccgatgaccaaaaatccttcatcttggcgaggtggggctcccacttatccttaatctctgtgtcgaaaatcgggcccagcatgggatgggcccgaacccgtgcatagaagctgtcgacaaggtttgacacgaatgcctcatttatgccgaggcgcgcggcattttcctgaatttcgcggcggcggtcttcagcggatcgaactcgataggtcatacagcctgcacatgggcaccgaaggcgaaggcgtccatacgcaatatcccataagtggaacttttgtgcagcaattggcgcgggccatccgatccggcgccgagcgctgcaaatagcggcagtatgtgatctggagtggggtgattggtcagaccatgaggccctgtttccagcgcattcagaacggccatgtcgtcactcgccagtgtcttatcatccacccagtccgcaaatgtgttcacccattccggtgtgtcgctatgcaattcaaggcgtgccgtgaacaaggcgcgcaaattgtgtgtgagggctcctgagcctataatgagaacaccttcatcccggtaagaagcgagcgccttgccgagacggtagtgccattccggggtctgattcatgctgatggacagctgcacgatcggaaactcggcggcaggatagatcagctgcaaaggcacccaggctccatggtccagcccgcgtgtcggatgcaaacgcgcctcaaagccgctgcggacgagagactgccgcatggtttctgcaagcgcaggggagcccgcagaggggtattgctgtgtatacagttcttcgggaaatccctgaaaatcatgaatggtctcaggatgcagcgcacctgtcagaaccggtatgggggcgttgaagtgggcggaaataaccagaatggcctttggcctgggcaatgcctggccgaggtggcgcagaaagtcccgtactggcgcatcatcctgtcccaaagtgggggagccatgggaaatgaagagggatggcaggctgtgtgtcatgctgtagagatgcgccgcagggcaaccctctacaattcacatctctggcatatgacctattcgcggcgtgcaggcttgccgttctgccaggttacttcctggccatacagcggaacggtcgaaaggctcatcttggctgagccatcaacgattttccggctgtaggagacatacatcagactgtcggtatcggcatcatagatgcggcgcacagccagctgcttgaatatcaggctctgattctgatcgaatacttcctcgccggacttgtcgaggtcaatgcgtccgatacggatcgggccggactgaaggcaggagatggaagaattggacgggttctcaaaccagttgcctttgccgatccggtcccatacgccccggtcgaaataggataggtgacagaccacgccttcgatcttggggtcacttagctgcttgatcttgatctcgttgccgagccagtcattcttgaactcgcctacctccttgccattgccacaggcagacagggggataagggcgagaagcaggcaggcagtgatgtgtttcatgcagacacgtacgcgaggctgcgggcctcgttcccatacacgctagtaatagcgttttttattcttggagagcatatccccgatggcgcgcacggtcgctgcgccgacttgcatcggggttggcttgcgatgatgggcatggcgaaccaggtgtccgcaattggagccgaagaagtcgtaatcatggccgatgcgcccacgtgcacggtgctccaccagatgtgcatccagaccgctataacggccatggcgacggatacgctggcccgttgagaagtcttcgaggctctgttcgatcacaccaccatgcttgcgggagtttgaaatcaccgtcctgcgcgtggttacgacgccataatgggaaaggacgaccccgaatcggatcgagactacatcaccagcctcatatttggtgcgcgggtcatgggtcatttattcggccgccacctgttcatggtcagccgtgtcttcctcatcgaaggtgagcaagtctccaggctggcattccagctcccggcacagggcttccagtgtcgagaagcggacagccttggccttgccggttttcaaaatggacagattggccagtgtcacaccgacacgttccgacagttctgtcagggacatgcggcgatccagcagcactcggtcgagggtcacgcgaatggacatatcctgtgctcctatatggtcattttctcttcgtcacgcaggcgtgtgccttcgcggaagacttgcgacaggatgaagagggcggcaacggacgcccaggcgataaggtcaaaagacagttcaatacgtgttcctttcaccatcagcccgatgatcagcgcaattgcgtagcgcatgagctgggtcacggcgatggcaatggcgatacgggtcaggcgtacagcattctcaggtacgaacggatcgcccgctgcaagggttgcaaggatttttcgaagctccatacagacaaatacaaccgctgcgacaacaaccacagcgccgattaggcctgcagtcagctcaggtaccgtgatgtcgtgattgtccacggtgacagagccgatactaatcgggttgcctgacagcatggagatcaattccacacttcctgcaataatgacgattgcgccgatcagcgcagtcatccacatgacaatcgtgaccagcacggtcatgatagcagccatggaattccctgcatttgtactcatacgttgtctcttcaccgttgggtgctgatgttttggggccgtctgtctttatcggtaaagacgtaaggcttaccgaataacgatataggcttttatgtcaaaagcaagaatggagccattgcagtatgggtgagaataatacgattcgacgcttggaacctgggcgattgatcgccgcgacacacaataagggtaaggtctcagagcttaaggatctgtttgggccgatgggctttgacgtcgtatcggcccttgatctggatttgccggagcctgaagagaccgaatccaccttcgcaggcaatgctattctgaaggccaaagctgcagcagtcgctacaggtgcgcctgccttgtcagatgattcaggcctggcggtagcggcgcttggcggggcaccgggcatttattctgcccgttgggccggagagccccgggatttcggcacagcgatggccaaggtagaacgggaactggaagagattggcgcgacagaccggactgctaaatttgtctgcgccttggctgttgtctggccggatggtcatgctgaagtgtttgaaggcgaagttcatggcaaactgatctggccgccacgcggtgacaaggggtttggatatgaccctgtttttgttgcagagggtgagcagatcacgtttggagagatggaccctgaccgcaaacatgcgatgagccaccgtgccaacgccgtgaagaaactgaaggctgccttgttatcatgacagagacgcccgcccccttcggtccggaatatggatttggggcctacatccattggccgtactgttcgaagatctgcccgtattgcgacttcaacgtctatgcggcgaaggatcgggacccctctttgttgctgcaggccatctgtgatgatctgaagatccaccggccgcgcatgccacagcatggcgcactggatgcggtgtttcttggtggggggacgccatctttgctgaagccggtggagattgtagaaatcctgcgcgctgcggacgaagcgtttggcatcaaggacggagcagagatcacactcgaggccaatcccaatgatgttctgcgcgcggatttgcgcggcctcaaggcggccggcgtaaaccggctgtccgtcggcgtgcagtccctacggccggcggccctggcgttcctggggcgtgaccatgatgagcacgcggccatggcgtccattgcgcgggccatgaaagtgtttcccaacacatcaatagacctgatttacgcgcgtcccggccaatccctccaggaatggcaactcgaactggaagacgtgctgaaattcggcgtaccacatatctccttatacgaactgacgattgaagagcggacagctttcggcaaggccgtcgagcgtggccagattgtgccgatggaggatgatgatcaggccgatctatatgaactgacccagaccatactcggcgcagcagggctgcctgcctatgaagtctccaatcatgccatggccccggaataccagtcccgccacaatcagatttactggcatggaggggactggatcggcgtaggtcctggcgcccatggccgcgtcagcgtcaatgggcagcgctatgcttctgaagcggagaagcgcccggatgcctatatcgccaatgtgcaggcgctggcttctggctggtcagctgcgcagaagctctatccgctggatattgctcgggagttgcttgccatggggctgcggccatcaggcgggattgaccggcgccgggttgaggtcctgtcgggccggtcgctgccgcagaacaagattgatgtctttgttgctgagggctggctgaaggaggatgggccacgcattgcgctcaccgcagccggacgtctactggctgatgcgatcacggcagaactggcggcgtgatcaggttaagggaaatcgccttatgcggattttccgtagaacgtccgcataaggccagtatcactagttcttagtcgagggatttggcgatgccttcccggcgcgggtctgcgccaccttcaagcccgtcctcgcgtaccacgatgacgtgtagaccggaattctcgccttcgcgctcttccacggtgtagcccattttgcgaagagcttcagctgcttccgggcctccgtcgatatcgacttcaacgccaatagagtcgccgcgtgcaatgatgttcggcaggtcgatggcttcctgagccgtcttgccccagtcaatcacgcccacaagcgttttggcgacataggcaatgatggaatttccgcccggagagccggtgaccatgaaaaggtcatcattgctgtcaaatacgagggtcggggacatggagctgcgcgggcgtttattggcggcgggggcgttggccaccggcttgccaccctttgtaggctcgcgtgagaagtccgtcagctgattgttgagtagatagccattgaccatgatggaagtgccgaaggccgcctcgaccgtggccgtcatggaaacagcattcccctcattatcaatgatggagatgtgtgtcgtgcccggtttgtgctcggtggcgtcttctccccagagcgggcgaagcggatcacggcccagcacaacacccggatcgcctggctcggcatggccatccggtgcgaaggcttcggttgcgcgcacttttagataatccgggttgatcagatcgcttgaggggacagccacgaagtctgcatccgcaacatagtggtcgcggtcagcataagtcaggcgctgagcatccacgaaagccttgaggaaatcatcttccgtcgccgtgtcggatgtcggcttcaggtaatgatacagccccatgatcatgttctgggcaacgccgccggaagaggggggcggggcagagcagatgcgatagccttccggaatggtgccgcatagggccgggcgtaccttcactttgtaatttgccagatcttccagcgtcatgtcaccggcattcgggccgctgttcacggcggcgacaatcgcctcggcatttttgccttcgtagaaggcggacgggccttgcgtggcaatggcgctcagcatgtccgcatagtcctggttcgtgcggatgtagccgaccggcaggggctctccatccggatagaaataggcggcgggaaccggcaggtcatcaatgcgcacaacggctttcagacgatcactcgccagcagttcagcgaggcgcggagagacttcaaagccatcctcggctagcttgatggcaggctggaaaactttttcccattccagagtgccggccgcatcatgtgctgtcttgtagagggcaatttgtcccggaacgccaacagccttgccagactgccaagcctccatgaagcccatgacctcgccatccttgacgaaatgctcgggcgtggtggaggcaggtgccgtttcccggccgtcgaaaacggtgatttcatccttggcgtggtcataatataccatgaaagcgccaccaccgatgccggagctttgtggctcaaccaggccaaggacggtgtgaaccgcgattgcggcgtcgatggcgttgccgccttcgcgcatgacttccagcccggcctcaaccgcgcgtgggtcagctgctgccaccatagcgcccttggtccaggcttctggagtcgcagtctctgtggcctgcgcttcagtctcttgcgctgtgtctgcagcgcgttgggcttcttctgtggcgctcattccgctctcctgagcgggagtgcaggcagctagccacagaacggaaaggaaaagcggtaaacgtgtcatggggagccccgtatcttggcgtgagtcgcggctgaccttatgagactgtagaggcaagggaaagatagaggcgcaattaatgacagcacccggcaaacggaatctcatcacggatgtttctggcattctcgtggggcaggctgaagacagcgcggttcgcacgggagttaccgtcattgtgccggatagaccggccatcgcggcggtctgtatcgccgggggtggccccggtacgcgcgagacggatttgctgacgggcgggcgtctggtggaaggggtcgatgctatctgcttgtccggggggagcgcttttggacttgcggcggcagacggtgttgcctctggtctcaagacagatgggcggggcttctctctggtggccagggagggcgtgccggcgacgccaattgttccggcagccattctgtatgatctggcaaatggtggcgacaagaattgggggcaggcctcaccttatgcgggtctgggcctcgatgcatatcgtgatgcagggagtagctttcttctgggccgggctggggccggctatggcgctctcgccggggttcatgcggggggcacaggctctgccagcattatgaccgatgatggcatcacggttggtgcgctggcgggagtgaattgcttcggatcggtaaggatgccgggcacggatgcctactgggcctggccctatgagcttaacggcgaatttggcggcgcccgcccgcctgcggacttcgtaatggacccggaggattgggggggcgcgaaagtgaacccggctttgggacagaatacgaccattgcctgcatcgccacagatctttccctcacgcaagaagaggcacggagggtggcacagatggcgctttccggattttcgcgggctatccggccggtgtttgcgccatttgatggggatgccgtgtttgttctgtctaccggccgggtcgacatgcctgaaaactggccattgatggtggcgcgtgtgggggagctggccgcgtcaacactcgcgcgcgccatcgctcggggcgtgcatgaagccaatcaagagcaagacgtatgactcctgaggggagaactggcccgtgcggaccttcccaacttgcccgcgcagccagagcggcccaagcatctatatgagcctgccagtctatatgagctgagttggtgctgtcgcgaagtggccggaaggcctgatcttgaggctatttcagctcctgctgcgaaaggtgtgaatcttgcgctcaaacaggcttgcatccactgatccatgcctgtatgtgtccgccttccttatggccgggcaccggtagctcagttggatagagcaccagactacgaatctgggggtcgggggttcgaatcctccccggtgcgccattccccaaataaccgagcagcttgtgggagattcccttatctcttcaccgtgacgacgtagatgttctcatctccacccgctccagtgcgccagttttccgtgatggacgaataaacccatgaaattggtggggttacgttactccagcccgtcagacgaatggcgcaccggagcgggtgaagatgggaacttgttcttgcttgtgatcacgcgacagtccggagagcattaatcccacaagctgtgtcgactagggcaaagtcgtacaatagctctaaacagtatatgggcgccccaaagggcgcccattttgtggtattcaccttgttaacggagagaccacacttcctgatccgaacaataaagcacaaatccttgcttctagaaagtagaaacttttcccgaaccaatacgggtaggtgggccaaccgcaactagatcgtcgctgcgcacacaacgcatagttacgaaatatatccgcaacgatctatagaatgtttactactatagattgctttgctacacaatctgtgcagatgctgtttatctgctgggtgcgggaatgcacggttgccttgggagtgatcgccccaaggcaacaattctaaccgcatttgagaagggataggaaatgacagtttggcgtctgggactggatgtgggttcaaactcgattgggtgggccgcaataggcttggatgcggatgggcgcccctgccgcattcttgaacacggaaatgagaagcgatttctatctggcgcaggcgttcgaatattccccgacggtcggaaccccaaggataagcagtctctagccgcgcaacggagggctcctaggggcatgcggcgcaatcgggaccggtacctgcaaagacgccaagacttcctgaaaaagcttgtcgaatttggcctattgcccgcggacgaagcggaacgcaaggtgctagaaaacccgaccggaaagaaacacaacaggaatattgaagttctcaaagactatgacccctggtgtctacgtgcccgtgccctgaatgagccgcttgagcctttccaggtcggtcgagccctgttccacctccagcagcgacgtggattcaagtcgaatcggaaagccgacaaggaagccaaagacggcaaaatttcccaaggagccgtcgtgacgctggcacggatgcaggaaagacacgcccggactttgggcgagctttttggccgtcctcgactcgaaggcaatcttcacgcatctacccgcgcgcgcttgagcggtgagggcacaaaagctttctacgacttctatccaacccgcgatctgatcctggatgaatttgaaaaaatctggcaggtgcaagcgacttatcatccgaccatactgacccgtgaggcccacgacaaactgtacagtattttgagctttcagcgtccgttgaaaccccagcccgtgggccgttgcacattggaaccggagacggatctacgcgccccttgggccctgccgtcttcccagcgcagaagaatctatgaaactctgaatgcaatgcattatcgcaagccaggcgaagcagcagagtggctgacaaccgagcaacgagatattctggcccaaaaggcgctagggacaaaggacctgacttttgatgccatgcgcaaagcattgaaattccatgatgatgtgaagttcagtattgaatccgaaaaacgtaagaagattgaaggcgaccacactgcagcgatcctggcgaacaaaaacctttggggcaaagaatggcgtaaacttcccgttgtggagcaggaggcgattgtcgagctacttttggggctggaacctctgacagagaagattccggtccatgtccggcaggttgctgaagctgtcatggggcaagttgcaaacacctttgcgatgactcgcagcgaggctgagaacctgctgacaagtagcgatcctaatgtgctcgcgaactggttgtctgagcggtacgggctatctcttgtaaacgcttccaatgtagtggaagccaatctgccggatagccatcagggcctcgggcgccgcgccaatgcaagagttctggcagaactgatggcagatgatgcgccgttctacagtgacgctgtagtacgcgcaggatacagggatcatcgcgccattgaaggtcagggcgaagttcatgaccggaaattaccttattatggggaagtcttggaacgttccgtcgcttttggaaccggtgacccacgcgatactctggaaaagcgagtgggcaagattgccaatccgaccgtgcacgttgcactgaaccagctaaggaaggtggtgaaccgcctaatggaacgttatggggctccgactgaagtcgtcattgaattagccagggatcttccactgggcgctgaagacaaacgcaaactggaacgcgagcaacgagataaccagaatgcaaatgaacagcgcgagaaaattctaaacgagtacggcatacggaacacctatgtgaaccgcttgaagttacgcctctttgaagaactaacacgcggaaaagctacaaatggccaatgcctgctaagtggtgaacaattcggcctggctaaattgctatcggatgagatcgaaattgatcatattctacccttcgctcaaacgctggatgacggttttaacaacaagatattggtgacccgccgggctaatcgcgacaaagcgagacgttcgccatatgaggcattcggtacctcaccgtccggctatgactgggaagagattgcatcgcgcgccgccaatcttccaccgcaaaaaagctggcggttttcgccggacgccatggagcgttacgagaatgaggagcgggatttcctcgaacgccaactcaacgacactaaatatattgctcgcctgacacgcacgtaccttggtgcaatttatggcggcggcgacgaggccgcgaaacatgtctgggttacgcccggccggttgacatcggacttacgctccgtctggggactcaaccggattcttgatggcaataagccgagcgatgagcccgacgccccttcgcgcaagaatcgcgacgatcatcgccaccatgcaattgacgcgattgttgttgctctgacggatcgcgccatgctgaagaaggcggcggaccatgcaaaactccagaactcggaggtttcttcagagcgcatgctggcggcattgggtgagccgtggaaaggatttcgggaagatgtagaaaggcatgtgaatgccattattgtgtcccataagaaagaccatgggattgaaggtcagctccacgaggacacgaattacggggtcgtacagagtccgcagggtgacgggcagaaacttgccacgcgtaaacccatcgtttcgttccagaaatatagccagctgcaggacattgcggacaatcgcatcagggaagaactcatggaacggacgtatgggttgtcggactctgatttcaagcaggccctccatgattatgtgaatgagcagaagccgggtaggcgaaccaatcctcgcagagtgcgcattcacaagccgataacggagtcaacgccactgcgccagattcatcatggcggcatgggcgagtaccagcgaggcgtgctggctggcgaaaactactgtcttgatattgtcgagacgccagacggcaagtggcactgccgtgagatatcccgcttcgatgccaatcgcctcaaaggaagcgatgaggcagaggtaccaggctggatggaagataatccggaagcgctactcgttatgcgcttacgaaaaggtgacatgatagcggtcgaagatgtgccgggtaaaatcgagtacaagcgtgtcgtcagattggaaccaagtgcaaaccgcgtaaggttggcaagggatcgagaagctggcgattatgagaaacgccacaccgacagggacgatctgttcagctgggactttgcgacaatctcgaagctcaaagcccgaaaggcacggcttgtgcatgtggacgaggcaggaagggtcttcgatccagggttgcgtcatgccgggacagattgtcgagatatcaagtaatggaatccacctttcggtggaacggggttttctgaagctcagccgcgaaggtgaaaagcttggcgaagttccgtttgataatattgacgccgtagtcgtacacggacacggggccactttctctgccaatgtttgtgcacgcctgtcgaatcaaggtgcaccacttattgtatgtggcaacaatcatagccctgtctcagtggtttggccgatacagggacaccatgcgcaaggttataggcttcaggctcaggcgaatgcgtctatgcccctgaaaaaacggctttggaaggatattgtaaccgcaaaaattttagcccaggctgccgcgctcaatcatatcggaaaccctctgccggggttaagactgatggcacgatcggttaaatctggagatttggaaaatatggaggcgcaggctgcgcgtcgttactggaagcatcttttcggaaagggtttcaggcgggacaggcaggcgaacaatcagaatgcgctcctgaactacggctatacggtgttgagagcaggtacggcccgcgccattcttgctgccggtttgcacccctcactttctatcatgcacgaaagtcgaggcgaagcactacggcttgccgacgatctgatggagcctttccgcccttgggtcgatgtcctggtgcatgatctaatagaaaagggggagagcgagttgacctttgatagcaagaacgctcttgctgatgtgctccgcctcgacatgcagggaccaaggggagcatccccacttcaggtttgtatcgaccgaatggcctcctcactggcgcgagtttacctcaaggaacagtctgcgctcgaattccctggccctcccttcgcactcgcccggtcggcgccgtgagtcagctcagtgggtacagaattatgtgggttatggtcatgttcgatttgcccgttctgacaaagagcgaaagaaagcgagctaataaatttaggctttttttgcgcgacattggcttcagtatggcgcagctatcggtttatatgaaagctgtaagcgggagcgatggtgttgatgctatttgtaggaaagtcgaggctgaggttccacttggtggagttgtcgatatattacaatttaccgacaaacagtatgagaacatcatttgcttccggaacaaaaagagacaggctgcgaatcaaactccgggtcaacttgcgctattttgacaatccgtcgctgttttctggcagagagataaaagaaaaagccccggaaatccggggcttatccatatatggaggttagccgatcaggaagtgtgggccaaccgcaacaacaactcggggcgtagcgcatctagaaccaggttagccgatcaggaagtgtgggccaaccgcaaccacctagtctttgcggtgaaactcaaacaaaggttagccgatcaggaagtgtgggccaaccgcaacggagcaccagccatgccagcacctttaatcaggttagccgatcaggaagtgtgggccaaccgcaacgaacatcgcgcagccgctacagccgcaagaaggttagccgatcaggaagtgtgggccaaccgcaacaggacggccagaatggcttccgaatacgccaggttagccgatcaggaagtgtgggccaaccgcaacacacaggatgttcggcacacgcccaaaggcaggttagccgatcaggaagtgtgggccaaccgcaaccgtgatcactcaaccctgatttacggtgcaaggttagccgatcaggaagtgtgggccaaccgcaaccgctgggcacgcgctggacgccgccagaccaggttagccgatcaggaagtgtgggccaaccgcaaccggtattatcctggtgaacaactataccacaggttagccgatcaggaagtgtgggccaaccgcaacttattcttgcgtgtggcgtttggtttgctgaggttagccgatcaggaagtgtgggccaaccgcaactcactgacagcttgctggaccgaagaccggaggttagccgatcaggaagtgtgggccaaccgcaacgtctttgttcagcgggctgttgtcgtttgcggttggcccacacttcctgatcggctaacctattgacgcctggctgcaaaatactgcttaaggttagccgatcaggaagtgtgggccaaccgcaacagagaaccatccatgtctgcattcgataacaggttagccgatcaggaagtgtgggccaaccgcaacgttcgcccatggctgacgagaaagaccaaaaggttagccgatcaggaagtgtgggccaaccgcaacaaagattgggtcggacgcaaagattgggtcaggttagccgatcaggaagtgtgggccaaccgcaaccgagtagagaccatggccgaagacgaaaagaggttagccgatcaggaagtgtgggccaaccgcaacctaagcagtattttgcagccaggcgtcaataggttagccgatcaggaagtgtgggccaaccgcaactatgccgacgaagtaaccacccagcaattgaggttagccgatcaggaagtgtgggccaaccgcaacagagaaccatccatgtctgcattcgataaaaggttagccgatcaggaagtgtgggccaaccgcaacacgccgaacgatgaagatgatggccttcgaaggttagccgatcaggaagtgtgggccaaccgcaacgaccgcgccacgacagaaaattctgacaaaaggttagccgatcaggaagtgtgggccaaccgcaaccaacggaggtcctgatgctgagtgagaaagaggttagccgatcaggaagtgtgggccaaccgcaaccacacgtcccgacagtccaggaattatggaaggttagccgatcaggaagtgtgggccaaccgcaactggcctcatcgagacccgcctgaagaaggcaggttagccgatcaggaagtgtgggccaaccgcaaccaggcgtctgaggacatcaaatacgtaaacaggttagccgatcaggaagtgtgggccaaccgcaactgctgaccgaatggggtggtgatcggggaaaggttagccgatcaggaagtgtgggccaaccgcaactaagggtggatttcgtagtgtggcccgtcgaggttagccgatcaggaagtgtgggccaaccgcaacctgcactcatgatgtcacctgatgaagcgtaggttagccgatcaggaagtgtgggccaaccgcaaccgcgtttacaagggccgtgccaactctcacaggttagccgatcaggaagtgtgggccaaccgcaaccgaacacgtgactcaacctcgctcttagttaggttagccgatcaggaagtgtgggccaaccgcaacagagcgcttcggaatggttgaagcgcttgaaggttagccgatcaggaagtgtgggccaaccgcaacactgagacgcgcgacggacggacaaagcgcaggttagccgatcaggaagtgtgggccaaccgcaacaggcaaccaaggctgggtgacagagcatgaaggttagccgatcaggaagtgtgggccaaccgcaacgaaacaggagaccgaaatggccacagcagaaggttagccgatcaggaagtgtgggccaaccgcaacctctatgcggaactcaaggcccggattgataggttagccgatcaggaagtgtgggccaaccgcaaccatttcgcacgacacaaagcgggaaaatcgaggttagccgatcaggaagtgtgggccaaccgcaacgcgtcgatgcaattagggtctctgattgcgaggttagccgatcaggaagtgtgggccaaccgcaacccatccggtccgggacatccttggcaaaccaggttagccgatcaggaagtgtgggccaaccgcaactgacaaagcaaatcacaaagtgcgcaaaaaaggttagccgatcaggaagtgtgggccaaccgcaactgagattgaggtgtatacggaaggcggggcaggttagccgatcaggaagtgtgggccaaccgcaaccgaccatcacaaggaagagattgcgcccctaggttagccgatcaggaagtgtgggccaaccgcaacaatatttcgcaaggggtgttcggcccgttaaggttagccgatcaggaagtgtgggccaaccgcaacgcccggcgtcagcgtctcaacaccttccggaggttagccgatcaggaagtgtgggccaaccgcaaccatcaaaaaaggaaagtgatggcgcgaaggaggttagccgatcaggaagtgtgggccaaccgcaacctggacccaataccttctcaacaaaacatgaggttagccgatcaggaagtgtgggccaaccgcaacttcacgcgcggatccccgaaggcggcctgcaggttagccgatcaggaagtgtgggccaaccgcaacccatcccatcaattgggttcttggcaagcaaggttagccgatcaggaagtgtgggccaaccgcaatgggtcttgccgacaaatacactaagggtcatatagcggacgcaggtggaataagttcatccttgctgtcacgaacgaggcgatgcagatgttcggcaaccggcgtccagattgtttagctgcataccacgctcggttccctgatcatcagcttatagagttttttgtttctgcccctgtcgaattcgaccgcctattggaaacggcaactcggcgggggccaagagctcacggatcaggaattgcagtcagtcgatgccgtcttcgtggaagacgtaccgaatggtgatttcgtctaaaaatcccaaaagcgcgacatctcgattgccgacgaactggtgttgcctctggttgaagcccgcagacagcctagtcaacaatgtacggactactgaactgacgtatcccaccgctcgaattccgcagacatgtccataattagaagatcgaattcagatgattgtgcgggtaccctctgacagaatgagataggctcgctcttggctggatgagctccacaaaaccccatcacctctgcaagtttccgtttcgcggagtcgaccttccagttcaagtcacctcgcttttggttgacttcggattccagcgaatagaactcgctttcgatctggtacatttcgttctcaacattgtacctgagatcataattcacattcatcgcgtccatcgatgccagccgcttttcccgcttattgtactgttccgaaagagcattgtgcttagacagaagtgtatccatccattcctccagaggccctaccttaccttccaattcagtgatcgcagactgggcctcacggtgagtcttctcggtccgttcaactttgtgcatccagataatctctgcgcttagaacactcagttgctccagcgcttcgttgcgttctgaggcattggctttctggaacgtacctgcgcctccctcccaggtcaggtctaacgaattcccatgaatttcgccggaaatgctctgcgtcgtgaacagagtatcgagggattttttcatatgcagcacgagttgttgctttgagatcgaaccgtcaaaaccaactgaatggggtgaaatctttccgctctcatccaccgtgtaagattcatatctgccggtcagttgtccgccagaggtttccacgatctggatcgtttcaaatccggcctgattaccgcgaacgtataggccggaaatatcggcgaatgcattggcgctggccaatgccaccaacattgccgcaatcgccattttcgagactcgcattttatcacctgttctgaattacttgcgctgcaactttatccaaaaatgcattaatatgatgggtatatccagtggtttaatttacagcaaaattgtgcgttgcgcagatggaagcgcgcgtacttgttggatggaatgtgaggcggattcgcgtctcaaaaggcgtttcgcaggagcgccttgcattcgatgcaagtgtggatcgctcctatttgggcgggctggaacgtggtgaacacaacccaactgttgatgtgcttgagcgcgttgcgaaggtgctggatgtgcctcttcgcgatcttttcgcggagtacgatccagaggtgggcgagattgacggattgccgcccgggcggaagcccagcgaaacctgattacagctagtgccgtttgcccgcttcaaggtgagcagaaccacaagttccttgaatcgcaccctgaattaaatagaatatgaattcttattttatatttgtgggatcgagatgccctctgccgttaagaaatcaaaccgccggggccggaagcgtgtcgtcgccagtctggccgagtcaaagacactcaccctttatcgggaagggcgacatcttcttgctcggaatgatcttgatcagatgtcgatctctcaggtgtcaaaggccgccgggatatccgtgggggccttctatgtccggttcagggataaagacgcgtttctggatttcgtcattacaaacaccttcgttcaggccagagttatctttcaggagcaagctgacgttcgctatgcgcccaatttagcggacgtcctcgtccggcaattctcaaatcctgagtttgccggagttgtccgtgctgccgtgaaactcggatttttggctaaacggcaccggacgccgtttgatgaataccggacatttgtctcccagcgcttggcggagctgttactttccgacgtgaggaagggagagcgtaggcaaacgattgccgctatcgattcagcgttggcagttcttacgcacgccgcgttgttctcagattccgaaattgatttaggagaaatcgaaactcagcaagtcatcatagatttgttgtccgggaagataggcaacgcaaagccgcttgcctcgaagaggcaaacttcaactaaagctaagaataagcccgctaaatctccccgcgatccggaaagtcttcgcaaacctaattcggataaggtggggccaaagggatcgagtaacggactgaagaaaatctgatcccgaaaagtttgttgggatttgttatgtctaatgatgtgtcagacaatttggcgccactagatccagaaattgttctgtcagatacagttctggatgggattgcagaacaactaggcttcgaaccgttttcggataccgttcgcaaggatctgagaagtacggttcggcgttattctttctaccagcatattttcgggtctcacgaagcagaccgtaaagccgcgaccgctgactataagtctttcaaggaaactgtttcggagtttcgtacgttcctggaacagcaggatcaggacgatcttgtctcggatctaaactttgcagcccttcacaggaatgcgtccgtaccgcagacagactttcctgagattacggatttcgagaaaacaaacggaacgccgtatctcttagaactaaagcggcttttgtcattgttagagtacgcaacagagttagccctcgaaaaatccgctgttcccagaggccgcaagcccaatcataccttagagagtttagtgcggcggttagcttatgtgtgggaagagctattagatcagaagttcacgatcgattatcacaagggaagcggcctaacgcctgcctttgagtttgtacgtttagtcgtggaaagaataattcccgacattagcgaaacagagatcgtcacggcgatgcggacaattgttgccgaacgcaatctgacagccccggattcctcacaagaataggccgccaatttccgcgttgttttctgccagcgccttttgcggcgcttatgctccctttctgctctcatgagctggtccggcagaccgccggtccggatcaagagtgcagagttgaaagccaggaaatctccccgcaaagccgatgcccggaagcagaccgcttctggctcgcgcggtgtggatttcgagctttctcccgatattcccatcaccgaagcagaacttcagattgtcgagacttatctgtcgtctatgatccgggacttgctggatgaggcagaagcctcagaggaactgatagaagggtagcctatgaagcgggcggcaatctatgtgcgggtctcgacagggaaacaggccgcaggcgaactctccatccccgatcaggttcgccagtgtgaagcttatgctgaacagaacggctatgaagttgtcaaagtctataccgatgctggggtcagcgcccgcacagacaagcggccccagtttcaggaaatgatctcccgtgccgttgcgccggatcaccctttcgatgcgatccttgttcacagccaatcccgcctgttccggaatacgaaagacctactggtctatcggtcccttctggaagagcggcaggttcgttttgtttcgatcactcaggacctgggcgaaggcgagaccgcagatattctgacaacgatggttggcgcgctggacgagtaccagagcaaggaaaccgcaaagcacgttgcacgctccatgatcgagaatgcgaagcaaggattctggaatggagccgctgcgccgttcgggttccgcacctatgccgccgagacacggggcgcgcgggtgaaaaagaaaatcgaaatcgatcccgaagaagcggaaaccgtcaggctgatattcaagctctatgtcaggggcgatggtgcatccggcccgatgggtgtgaagcggattacgacttacctgaatgcgcagggttatgtgagccgaaggggcaagccgttccgggtccagtttatcgacaagattctgaggaacaccgcttacatcggcgagcattactttaaccggaccgactcgcgccggaagacaccacgcccaagggaagaatgggttctgttcccgatgccgcgcattgtggaggatgtcctgttctatgaggcgcaagagaagctggaccgccagcatccgatgaagaccgcgccacggcttgtatcgagcgatgtacttctgacggctttggcggtttgcgaggattgcggtgcacccatgcggaagctctccggcaagagcgggcaatatcactattaccgctgctctcagaaggctgatgccggacaaacggcctgtaagggcgtatcgatcccgatgcaggagctggatgacattgtcatcgatgcactggaaggctctgtccttgaaccgaagcgccttcgcaagatgacggaaatgctgctcgcccgcgctcaggagcgggggcggtctgccaaagagcagcgcaaaaagctggatggcgagaagcggaaggcagaagcccaggtaacgaacctctacacaatggttggcagcggcgaactgacgatggatggcaccctgtcggcgcacatccgggagcaacaggaaaaggttgaacgcttgaaacggcagatagcgcttctggatcgggagcggagtgcgcctgtcgatcagcttggcgataaggtcgttgagaaattcgggattgctgtttcacaagctctcagaaatccggacaaccgccagtttgccaaagcttatgtccgcacgctcgtcagcaagatcgacgttggcgaaaaacagataagaatcagcggtccaaaggacgctatcgcccatcaggccatgtcttttgccgagagcggggaattagtgcctgcttttgcacaggaatggcgcgccttgaaggtaattcttcgaacgcgctatttgaaacattacaggattgggagcaccaactcaaacactctgagatagacttcaaggctatctctcagaagccaaaggggccgcagctatgagcggcctagagaaagcagcaaagatgggcgttagcgtccgtttcaagactgctgcggcgcaacaagacaaatccaagcccgcaccgccattctccctgcgtttgaccgttggagagcgcgcaaagctggaacacatggccaatggcatgtcgctcggcgcttatatcagaaagcgcctgttcggtgatgatgcagagccgcgaaagtcacgtcaacgcaggccaactgttgaccgtatagctctggcaagagcgct

SEQ ID NO: 647 - DNA, 23429 bp, synthetic construct
  misc_feature 1..23429: note = Synthetic
  source 1..23429: mol_type = other DNA
attgcggttgccgggctcattgcgccgccaatgctggcgcaagaggctcagccagcaccggccaaagccaaacgcctgaaaaccgtaaccatcaccgcaaccaagagaaccgagagcgcgcaggatgtccctgtcaccgtgacagctctggactcgcaagagctcgaacagctcggcgtgaagaacttcaccgattacctcgtccagatgcccggcgttactgccggtggttcaggcccgggccagaacacgatctatattcgcggtctggcctccacaactccgaacctgaccgtcgcgggcgtggctggcctggcccccaatgtcagcttctatctggatgaacagccgctggcccagcccggccggaatctggacgtgtacgccgcagatattgagcgcgttgaagtcctgtccgggccgcagggcacgctgttcggggccagctcccaggcaggcacggtgcggatgatcacgaacaagccgtcctttgacggctttgatgcgaacttcaaggcatcgaccgccttcaccgaaggcggtgaaatgagcaacagcgtcgaagcgatgatcaatgtgccggtcaatgacaagttggccttgcgcggcgtcgtctataacgacacccaaggcggctatattgataatgtcggcggcatcctgaccgttgaagactccgcgcggtttcgtccggaaagcacggttcgcgcaaatggcgtaccggtgaatgcccagcgcgctggttttcaggccggggcagacctgtccaatgtgaatttcatcgcggcgaacaatggcaacatcgccgagaatgacatcaatgatacgacctatcagggcttccgccttagcggcatgtatcgcatcaacgaagagtgggatcttctgctctctcactcccaacaaaaaattgacgccgagggggtctttgcagcagatccggagctggacgattacgacatcgttcgcttcacaccggaaagcattgaagacaagttccacaatacggcctggaccctcgaaggccgcattggcgcgctggaagccctttacacaggcgcgtatacggagcgtacaacagatcaggtcgtcgattattcagattacctgttcgttggccaatacctgccttactatatctgtgactactccgtgacctatccggctgcgggtgcagacccggccggtacgtgctatgcgccgaacctttctgtaaactctcacagcgagaccaaggttcagacgcacgagctgcgcttcaacacaccggatgagtatcgttggcgcgcaacttttggggccttctatagcgacctcgaactggcagagcgcaatgactatgtctatccgggcgtagcctatgtggagtatacggacggaactgtaggatttgcgccgaactatccgctgaccaatacggacgtgacaggtcagatcggtgatgcctatcccggctattacagcgatcccggcccattcccggagggtgttggcttccgtaatgacgtgttgcgtaccgacaagcaggttggcatctttggtgagaccacattcgacattacggatcagttcgccctgacactgggcgcgcggtattatgatgtggaagtggaccttgaaggcagcgccaactcttccttctacaatttgttcaccgaaagcgaccaacaggtgttcggcacaaacatctcctggctgtacggcccggatggtcccgaagaggcacctgacaaggcagccacggatggcgtgatcatgaaggcgactggagaatggacgccaacggatgaccttctgttctatgcaacatattccgaaggcttccgcgcgggcctcttgaatcgtcccggcggcactcaaggcccgggcaattatgtcgtgccttacgccgtagatacggatgaagtgaagaattacgaactcggctggaagaccgaactgttcgacaattccctgcgcttcaacggctcagcctttttcgtggaaatcgacgggcttcagacgaccatttttgatccgtccatcgtgaacctgttctattccgacaatgctgcaaatgcagaaattcggggccttgagggcgacttcacgtgggcaccggcatcggtcgatggtctgaccgtggcgggtgccttctccttgctcgacacggagatcacggaggttctagttccaactgatgatgtggttgagggcggagaactcgccttcgcacctgcctatcagggcaatgtgcgcgtccggtatgaatgggatcttgaacaggaaatcgcaggccagcgcctaacggctcacgtcatgccgcagcttgtgttctccgacagctcctacacggatgtcatcgagatcaacaagatggagcttgatggctatgtgacgctcggtggtacgctgggtgttacggccgataattggggcgccgaactctacgtgaagaatctgacaaatgagtatgccgaacttggtggcaacttcattttcgatcgcgagcgggtcaccccaatgcggccccggacgattggcgtccgtgtgtcctacagctactaagtcagacacgacttgatccaacgacagcgtcctgacagcttcagggcgctgttttttcattcatgggagcgtatgattagctgatgaccgctgcaactgatccggaaaccgatcttcgtcaggcacaaaaggccatgcaggccggagattttgccagggccagacagatcacggcagatgtgcttgccggccatccgggacaccgggacgcgctctatatggcggcggtctgcgcgcgctatgagaaccggcatgatgatgcgtttgaccgtcttgcggaattgaaagcggcgtcaccggattatggccgggcctatcaggaagaggggcaccttcggcgcaagctgggtgatgcccctggcgctctggctgcgttcgagcgcgccacacgctacaatccttccctcatcgccagctggacagcgcaggcagaactgaatgaccaggccggccgcgtggaggcggcaacaaatgcaaaagctcaggccgtgcggcttcagggcctgccacgcgaattgctggcggtgacgaaccacatccatgaggggcgcgtcttccgggcagaggaaatcgcccgcgcattcctgcgcaagaacccgacccatgtggagggtatgcgcctgcttgccgatatcggtacgcgccttggggtgcaggaagacgcagaattccttctcgaaagcgccgtcgagctggatcccgacaatatccagctgcggctcgactatattcaggtgctgcgcaaacggcagaaattctcagacgcgctggagcaggcaaagatcctgatggcccgggagccgggcaatcccgtcttccaatcgcactacgccatcgaaagtatgcaggcgggtgattatgaaaccgcactcgactattttgaccgtatcctgaaagccttaccggaagacccggcgacactggtctcccgcggacatgccctgaaaacctatggccgtacggaagatgccattgcctcctaccgcgcggcgacgaaagttgctccggggcaaggcgacgcctggtatggccttgcaaatctgaagacctatgctttcagcgaagaggaactgacgcgcatggaggcgcaagccgcctcgcctgatattgaccacatgtcccgcattcacatcgcctttgcgctgggcaaggcgcatgaagaccgcaagaaccataataaggcctttgaagcttatgcgttgggcaacgcgctgaaacatcaaaccgtgcgctacaccaccgagcagatgcaggcagagttcgacttacagaaatccatctgcacacaggatctttttaaggctcagagtggtaaggggtgtccagccccggacccgatcttcattctggggctgccccgcgcaggctccaccctgatcgagcaggtcctcgcttcccaccctcaggtggatggtacgctggaactgccgaacatcctgtcactggcacatcgccttcgcggtcggaaacagctgacggatcgcgagcgctatccccgcgtcctgcacgaattgtctgcgaaggatttgaaagcgctgggtgaggaatatatcgaaacgacccgtatccaccggcagggggcgcccttcttcacagacaagatgccgaacaatttccgccatatcggcctgattcatcttatcctgccaaatgccaggatcatcgatgcccgacgtaacccgatggattgctgttggtctggctataaacagctctttgcggaagggcaggagttcacctacagcctggatgacatcggccattattatcgcggctatgtcgatctgatggaccattgggaccgcgtcttgccggaagaccgcattctgagggttcagcatgaagacgtactggatgatctggaaagccaggtgcggcgcattctggactattgcggcctgcccttcgatgcggcctgtgtcgacttccacaagacagaccgggctgtgcgcacagccagttccgaacaggtgcgacgccccatcaacaaaagcggacttgaacaatggcgcccctatgaggcacatctggagccattgaaagccgcgctggggccagacctcgcgccccaataaggttcgcgcgtgtgacctcacgatcagatgacgccctcaccgccctgcgcaagattcagcgcatgacagagatagcctcaaaacggctggcccagacagccgggctgacgccctcgcaattgaccgtcttgcgcatgctggcagaaggcgaagacctgtccgcaggccatgtggcagaggcgacacagcttaagcatgccacaataaccagccttatcgacaaattggaagcgcgcggaatgattgcgcggtggcgctgtgataccgaccgccgccgcgtctggctgcgtctgttgccacccggtcaggccgctctcgctgaagctcctgatccgctgcacaagacattctccaaacgcttcgacatcttgccggactggcagcaatccatgctcgtttccgccctggaacacgccgtcaccctgctcgacgccgaaaccctggacgccgcccccgtgctcgacataggcgaactcgaccaaacagagaaataagggcgcgccgggaagcgggtagatagaacctgtttgccctggcgactgttaatctctctttgctcgctagctcccagtcagggcgctcttgaggcgaaggctatcgccccgcgtcgacaggaaaatcaggctctcagtagcagcggaaacgatagcgctgagcgccaactgggccgccgctacacaattgcgcgatagggtttcccaactcgctcgactgacgctcagtcgatgatcacgcgccttacctggcggagttcgctacgcggacattcctgttcgtcgtaatgaggctgaagccaacaccaaattcacctcaggtttgccttcagaaagacgtgcatactctccggcgcgcgaccaaggatcttgccaagcgtcggatcaacggtttcgaattcgcccgctcgtgctgcacgatagtatccgagcatgactgctacggagccttcgggaacgttgctcctttgggcattcgcttccatctccttctcgctaatgaatgttcgggaaatcgctttgcccgtgatcacactcgccaagcgtgcaagatcggcaaggtccagcgcctcgccgccagtgagcggcggcgtcgggccgtcgatcacttcgacccctgccagcagggcggcgtcgatggcggccaaatcgttatgagtcgtccaagcgactttgccgtcctgtggcgcagcaattgtccccgcttccaagccacgggcattcatcatgagcgcgcttgccgcgtagaaaccgtggcgtaaggcggtccaggccagacctgattccgccagcattttctccgtggcggcatgatctcggccgggcgggaaatgagaggttgcagagctggacacctgactcgtgtagaggacccgtttgacttcaacctcacgcgccgccgccagcgccgcagcgtgctgcttcaacggatcgcctcccgtcgcagcggcgtttgaggaaacaagcagcaggcgttccgccccctcccaggcatggactaggctctcgggatggtcgtaatccccccggcgcacccggacgccaagcgctgaaagatccgcgactctcgcgggatcgcggacgctgacgccgatgcgttcggcgggtgtatgcagtaatagattgtcgatgatcttgcggccgagttggccggaggcacctgtaacgatcaacacgaattggtctcctcaaagtgtgtatcggggcgagctgcgccacctgattgtgggcttggaatctagactgactgttctcccaacctttgataatccgcagaatttggaataagttgttcttcatgaagaacaatgttccgccgaatgatctccgggtgtttctagcggttctcaacgaaggcggcttccgagcggcggccaaacgtctgggcgtcgcgccttcgaaggtcagcaccacagtatcgcggatcgaggccaaactcggtgcgccgcttctcgtgcgcacaacgcgaagcgtccgagccactgaacagggacgtgccttggcagaccgcattgctccacttttggccgaggtggaccaggcctgtatagaaacggcgaattccacaggtcgggtaaggggtcggttgaagctgaacgttcccggcgctgtcatgccggatatcctgcctcctattcttacgaaatttcagcgcaaacatcctgaggtggaggtcgagatcgtggtcgagaacgacctggtcgatatcgtcgcgtcgggatgcgatgcaggcatccggtatggcgcctctttggaaaaggacatggtctccattcccatcggcccgtacgtccagcagatcgcgctggcggcggcgcctgcctatctggaggagcgaggctgcccgcagagccctggtgagctgacacttcacgacgcgatccgatatcggtttcatggtggaccacttctgccatggatgctgaaaaacggggatgagacgatcagagtggaaccggtcacgcggcttacgatcagcgtgaacgccatgaacaccgggctgagttatgcccgggccggattaggcattatcgggatgttccgcaattggcttgaagatgactttgcggctggaacccttgttccggtcctcgcagattgctggtgccatcaagaggggccgcgtttatactatcctagccgcctcacacccacccctttgcgggccttcattgagacttgccgtgccaattgagattcaaatcgtgctcgatcagaaacgagcatggcttgaagatttttgaaaaattttgattttttaagaaggtggcgcaccggggaaggtgaagatgggaactggtgcgtgattatcccgaagacctaatcagctgcagactggtccactggcatattcagaaagagctgtcattggacacattttccttcagacattttactgggttacgctacgcgcctttttagtctcgcgcacgggtggaagaccgaagaggcgccgatattcccgcgtgaactgctgtacgctcgcatatccgaccgcaaaggcggccgtactggacgtctggcccttggccagcattagtcgccgggcttcaatcaggcgcagctgcttttgaaattggagcggcgatagcgaggtctgcgcccggaaatgatggtggaaggtggaggggctcatccccgccacgtcggccaaccgctctaccgaaatggccgatgcgaactccgcgcggatgaccttgatggcgcgggcgatgcgcgccgtttggttgtcgggaaagccgagatgggcaatcgcctccccgtggcgccctgccagcagccagtgatgcatttcccgaaccagcgatgcctgcagcaccggcagagagtcaggacgatcatgcaagtttatcatgcgcagcgccacatccgacacctcatcatcggtgcactgtggcgctaccggacaggcaaggcccggcgacgtgctcatttcggcccggcaatcggcaatcaaagccgggtcaagccggagcgagaatgacaggtagggcgcgcgctgttccgccttggtgatgcgagtaagcgttggagtgtttgacgaaacaatcatcgaatcgccagcggcaacagtcaaagacatcccgcccgtggtcacatgcttggcgccctgcgtcaccaggcagaccagcggacgctcgattgcatatttgacatcgcgagtgcccgtcgcgcgaaagagtgtcatgccgggaatgcgtgtgcgggcgatcccatcggcgtcggcatggacccgcgtgaagcgatctatggctgcggtcagcgctacattcatccatttcatctattgcaagacgcccggcggtgcaaaaaattccggaggaataggcaaaaatagcggggtttgaggcccccacatatcccgggaatgcataggatcgggggaggcaatccggcacgacagatataaggagatggaaaatggctgacgcgaatggagcagaccgccacgaaggcgtgaaaatgacgggcaaggacggcgccgacggtccgaaagccttcctcatcttgatcgaggccaagccaggcaaggagcaggaagtgatccgcatgctggcagatattcgcgagtgcgtagaaacagagcccgcgaccggcccttggtatgccgttcagctctctgaaaccagctttgctatttatgaggtcttcccggatattgccggtcgcgatgcgcacatcgctggcggcggcggcgagattttcagggatgtcgaacgcatgaattcaattctgtcgaaactggcgcatgtgcagaaagtcgacattctcttgagcaagaaactgttcgcctgaacattcgtgcagcatggaaagtccagcatgttcgactaactcatgagcctcgccgtgaacgtctattgtcggcggattcctgcctctcagccgtctgatgtcgtcacagacccgactggggaaactatgaaatgaaaatcgcgttctaggcgaatggcgcacccaagaaggtgaagaggggaacatctacgtcgtcacggtgaagagataagggaatctcccacaagattctcgcttatttggggaatggcgcaccggggcaggtgaagagaagaactggtatcttatcgcaatcctgagacccgtctcggcgacaagttgattcccatcctttctcgtagcaacttctttgcttagaacaggcgacgatagcagtgatgagtaagtcggtgaaaaagtatgatcgcgtgcacatcgtccagacgatggctaagcattttccgttttgtcctgaagagagcattgatgagattgtcgcttgggtcacagatcgcagttggacaaaaaggacgcgtatcgtgacggctgtttctatagctgtgcatacgcacatccggcatcggcatactgattacgagcgccatctcaagatccacaaaatgactcgagattaggcgcgtcaaatcgttcaagatgaagtgaatgatgtttttacgctttggcatctgggtgcttgcgtacggtccgctcccaatactcatgcgcgagccctcccttagctgctcgcccaacaaggaaaaactggcgcgccggggtggataaaattggggccacctatttgatagtttgtttgcaggcagagtgcttaacggaagttgcgctgcaataacttcgacagcgctacaaagtatatgggcgccccagagggcgcccattttgtggtattcaccttgttaacggagagaccacacttcctgatccgaataataaagcacaaatccttgcttctggaaagtggaaatgattgctttccaaaagagaatggggccagatgtattcatctattggtgcgggatgcacagttgcctttggagtaatcggcccaaagcaatagcaatcatctccgctattactaagtgagggtagcagatgacagcatggcgtctgggactggatgttggctcaaactcgattgggtgggctgcaatagagttagacgctaacgggcgtccttgtggcattcttgaaggtggaaatgataagcaatttctacctggtgcaggcgcccgaatattccccgacggtcggaaccccaaggataaacagtccctcgccgcgcaaaggagagttccccggggaatgcggcgcaatcgggaccggtacctgcaaagacgcgaagatttcttgggggcgcttgtcggatttggcctgatgcctgccgatgaaacagaacgtaagacactggaaaacccgaccggaagaaaacgcaatcaagacatcgaaattcgcaagaatttcgatccttggtgcctgcgtgcccgcgctttgaatgagccgcttacccctttccagatcggtcgtgccctgtttcacctccaacagcgacgtggattcaagtcgaaccggaaagctgacaaggaagctaaagatggcaaaatctccaaaggggccgctgaaacgctaatgcggatgcaggagaaaaatgcaaggacattgggcgagcttttcggtcgccccagactcgaaggcaacttacaggcatctactcgcgcgcgtttgagcggtgaaggcacgaaagctttctacgatttctatcccacgcgtgagctgatcctggatgaatttgataaaatctggcaggcgcaaacgcctcatcacccggccttgctgacgcgtgtggcccacgacaaactatacagtattttgagctttcagcgtccgttgaaaccccaacccgttggccgttgcacattggaaccggaaactgacctgcgcgcgccctgggcactaccatcctcccagcgccggagaatctatgaaacactgaatgcgatgcactatcgcaaacccggcgaagcggcggaatggctgacaagagaacaacggaatcttctggctgaaaaagcgctcgctaagaaggatttgaccttcgatgccatgcgtacagcgttgaggtttcatgatgatgtgaagttcagcattgaatccgaaaaacgtaagaagattgaaggcgatcatacagcagccatcctggcaaataaaaaactctggggtaaagaatggcgcaagcttcctgttgtggagcaagaggcaattgtcgagctgcttctggggctggagcctctaacagagaagacgccggtccatgtccggcaggttgcggaagctgtcatggggcaagcggcaaagacctttgcgattgctcgcagcgaggcggaacacatgctgacaagcagcgatcctgatgtgctcgcaaactggttgtctgagcggtacgggctatctcctgaaaacgcttccaatgtagtggaagccaatttgccggacggccatcagggcctcgggcgctgcgccaatgcgaaagtactggcacaactcatggcagatgatttgccggtctatagtgaagctgtcatacgagccggatatagggatcatcgcgccatcgaaggccagggcgaggttcatgaccggaagctgccttattatggtgaggttcttgaacgctctgtcgcattcgggaccggagatccacgcgacccgctggagaagcgggtcggcaagatagccaacccgaccgtacacgttgcattgaaccaattgcggaaggtggtgaaccgcctgatggaccgttacggagctcccgccgaagtcgtgattgaattggctagggaccttccgctgggcgccgaagacaagcgcaaactggaacgcgagcaacgggataatcagaatgcaaatgaacatcgtgagagaattctgagggaacacggcgttcggaacacttatgtgaaccggttgaagctgcgtctttttgaggaactaacccgcggcaaggccacaaatggccgatgcgtgctaagtggtgagcaattcggttatgcagcattgctatctgacaaaattgaaatcgaccacatcttgccctttgcccagacgctggacgacagtttcaacaacaagattctcgtgacgcggcaggcaaaccgggacaaggcgagacgcgacccgtacacatttgctcaggaacaagccggctacgactgggaagaaatttccgcacgtgcggctgacctccctccccagaaaagctggcggttttcgccggacgccatggagcgctacgaaaacgaggaacgcgattttcttgatcgccagctcaacgatacaaaatatattgcgcgcctgacacgcacctaccttggcgcaatttacggtggcggcgacgaggccgtgaagcatgtctgggttacgcccggtcggttgacatcggacctgcgcgctgtctggggacttaaccggatacttgatggcaataaggcgagtgatgagcccgatgccccttcgcgcaagaatcgcgacgatcatcgccaccatgctatcgacgcaattgttgttgccctgacggatcgcgcgatgctgaagaaagctgccgatcatgcgagggggcaagatccggaggtttctacagaacgcatgctggctgcactgcgtgagccctgggagggctttcgggaggatgtcgaaacgcatgtgaacgccattgtcgtgtcccataagaaagatcatgggattgaaggtcagctccacgaggacacgaattacggggtcgtgcaaaacccacagggtgatgggcagaaactagccacccgcaaacccattgtttcatttgagaagtatggccagttgcaggacatagcggacaaccgtatccgggaagaactcatggaacggacctacgggttatcgggggcggatttcaaacaggcactccatgactatgtgaatgaacagaagcctggcaagcgaaccaaccctcgcagggtgcgcgttcacaagccggtaacggagtcaacgcccgtacgccagattcggcatggcgggacgggcgaacatcggcggggtgtgctggcggccgaaaactattgtctcgacatttttgagacgccagacggcaaatggcagtgtcgcgaaatatcccgcttcgatgccaaccgccttaatggaagcgatcaggtggcggtaccaggctggatgaaggacaacccggaagccacactcgttatgcgcttacgaaaaggtgatacgcttgcggtcgaagatgtgccgggtgaaatcgagtacaagcgtgtcgtcagattggaacccagtgcaaaccgcgtaaggttggcgagggatcgagaagctggcgattatgagaaacgccacaccgacagggacgatctgttcagctgggactttgcgacaatctcgaagcttaaagcccgaagggcacggcttgtgcatgtagacgaggcaggaagggtcttcgatccagggttgcgtcatgccgggacagattgtcgagatatcaagtaatggaatccacctttcggtggaacggggttttctgaagctcagccgcgaaggtgaaaagcttggcgaagttccgtttgataatattgacgccgtagtcgttcatggtcacggggccaccttctctgccaatgtttgtgctcgcctgtcaaatcaaggtgcaccgcttattgtttgtggcaacaatcatagccctgtctcagtggtttggccgatacagggacaccacgcccaaggttataggcttcaggctcaggcaaatgcgtctctgcccctgaagaaacggctttggaaggatattgtatccgcaaagatcgcagcccaggctgctgcgctcaatcacaccgggaaccctctgccggggttaagactgatggcgcgaacggttaaatccggagattcggaaaacatggaagcgcaggctgcgcgtcgttactggaagcatctttttggagaaagcttcaggcgggacaggcaggcaaacaatcagaatgcgtttctgaactacggctacacggtgttgagagcaggtacggcccgcgccattcttgccgcaggtttgcacccctctcttgctataatgcacgaaagtcgaggtgaggcgctacggcttgccgacgatctgatggagcctttccgaccttgggtcgataccctagtacatgatttgatagaaaggggtgagagcgagttgacactggagaacaagaaagctcttgcggatgtgctccgcctcgacatgcagggaccgaggggagcatccccacttcaagtttgcatcgaccgtatggcttcctcactagcgcgagtttaccttaaggaacagtctgcgctcgaattccctggccctcccttcgcactcgcccggtcggcgccgtgagtcagctcagtgggtatagaattatgtgggttatggtcatgttcgatttgcccgttctgacaaagagcgaaagaaagcgagctaataaatttaggctttttttgcgcgacattggcttcagtatggcgcagctatcggtttatatgaaagctgtaagcgggagcgatggtgttgatgctatttgtaggaaagtcgaggctgaggtcccacctggtggagtggtcgatatattacaatttaccgacaaacagtatgagaacatcatttgcttccggaacaaaaagagacaggcggcgaatcaatctccaagccaattggcgctcttctaagcaagcgtcgtcgtttttacacacacaattaaaagaaaaagccccggaaatccggggcttatccatatatggaggttagccgatcaggaagtgtgggccaaccgcaacgttaccggatgggacgatttctgttcaggcaggttagccgatcaggaagtgtgggccaaccgcaacaggcctttgttgtggccatggtcatgcgccaggttagccgatcaggaagtgtgggccaaccgcaaccgccaacggatgaggagctggcctggtggtaggttagccgatcaggaagtgtgggccaaccgcaacgattacgctatgactattgccaaatttggtaggttagccgatcaggaagtgtgggccaaccgcaacggatttaccggggcagacaataacagtcttaggttagccgatcaggaagtgtgggccaaccgcaacgactttgacgatcccttgccagagggcctaaggttagccgatcaggaagtgtgggccaaccgcaacagaccgaaggtgtagtcagtttgcagagtaggttagccgatcaggaagtgtgggccaaccgcaacctcaagaaaggcatcgcgctgtgttggaataggttagccgatcaggaagtgtgggccaaccgcaaccaatcatctatgctttccaaattggtagagaggttagccgatcaggaagtgtgggccaaccgcaacaaaattgtagcgcaggccgcagacaagtaaggttagccgatcaggaagtgtgggccaaccgcaaccatgggcggcggctattacctcaaagatggaggttagccgatcaggaagtgtgggccaaccgcaaccacaatgatcggaggcgtgatcgtcaccgtaggttagccgatcaggaagtgtgggccaaccgcaacctgctgttcgtccacccgcaatcgtcgggcaggttagccgatcaggaagtgtgggccaaccgcaaccgggcgtttaggttcctgaagccggggggaaggttagccgatcaggaagtgtgggccaaccgcaacttgacaagtccccagcgtccagactggatgaggttagccgatcaggaagtgtgggccaaccgcaaccttccgaccagcagcgcgccggatcgtgcaaggttagccgatcaggaagtgtgggccaaccgcaactatttcggaggcaatgcgaaaggcttcaggaggttagccgatcaggaagtgtgggccaaccgcaacgcccgatttcaacacccatgaaagccccaaaggttagccgatcaggaagtgtgggccaaccgcaactcatggataacacaccacaactagcgttttaggttagccgatcaggaagtgtgggccaaccgcaacgataacggcgacgccttcaacgcagatggcaggttagccgatcaggaagtgtgggccaaccgcaacgtaatttgttacctcccacttacctgtgtaaggttagccgatcaggaagtgtgggccaaccgcaaccgattgggacgccgttcgaagcttgttcagaggttagccgatcaggaagtgtgggccaaccgcaactaaggctgcaggcctttccgagagtacagcaggttagccgatcaggaagtgtgggccaaccgcaactgacgtatggaatgcaccctgcccgcgtgtaggttagccgatcaggaagtgtgggccaaccgcaactgatcttcaggcagctcaaactctggccctaggttagccgatcaggaagtgtgggccaaccgcaacggaaagtgtccggacgaccctgttgttgaaaggttagccgatcaggaagtgtgggccaaccgcaacgaagtagcgcgagagcgcggacctctcgcagataattgataatatacagattactgaattttcttatcccatcgcccgaattctgcagatatatccctaatgagaacatcaaacccggatgtctctctgggtaattcctggcaaaacgcgacaggttcattcttggctggcagtgttccacaaaactccatgacctctgcaaatttgcgtttcgctgaatcgacatcccagttcagactggcgcgtttgcgcttaacctcaccttccagcgaatagaactcgttttccagcccgtacatttcattctcaaccttgtacctcaggtcataattcacgttcatggcgctcatcgtttcaagccgcttctcgcgtgttttgtattgctccgaaagcgcatcgtatttggacaaaacggtgtccatccagtctgccagggtttcggatttggtctcgacatcagccactacggataaagcttcactgtaggtttccgctgcgcgttctgttttgcgcatccacacaatctgaacgccaaggtcattcagttccgcgagtgtcttgttgcgcaccgatgcgtcagatttccggaactcccccgctccgccttcccagatcaaattaagcgagttgcgttcgagcttgccggaaaggctacgatcacctttcagattcaggatcaggctattccgtgcaatagagccttcgatttctcttgaactggaatgcacctttccagactcgtccacatagtagtgctcatagcggccagccaagttcccttccgagagttcgaccagttggattgcttcgaaactgatttcatttcctcgcatgtacaggccggttgcatccgccgccgcaggcaaggcagagcatgcagcgaagccacaggccaagagcgcaattcttactatccaaccaagcatcagcttcttcccctttcgctggaagcaacctctcaaactaacaacacaaagcttaatatgatggatgtatccagtggtttaatttgccgcaaaattgtgcgttgcgcagatggaagcgcgcgcactcgttggatggaatgtgagacggattcgagtctcccagggcgtttcgcaggagcgcttggccttcgatgccgacgtggaccgttcctaccttgggggcttggaacgcggcgagcataacccaaccgtcgatgttcttgagcgagttgcgaacgtgctggatgtgcccattcgcgacctattcacagagtacgatcccaaagtcggagagattgaaggtctaccgcccggtcgcaaacctcatgatcctgacagctagtcaacgctaacacgtgcaggctacttgaatgaggttcaatctaattatagaatacgaattctgattatatatttgttggacggcatgacacctcctgagaaggaatccaaccgtaggggccgcaagcgtgtggtcgccagcctcgcagagaccaaaacacttgcgctgtaccgggaaggacggaggcttttagcaagtcatgactatgaccagatatcggtctcccaggtttcaaaagccgcaggaatatccgttggggcattctatgtccgtttcaaagacaaagacaccttcctggctttcgtcatcgcaaacagttttgctcaatcgagagccattttccgggaacaggctaatgcccggtatctacccaatcttgcagatgtgcttatcgctcaattttcgaacctaaagttcgcaggagttgtccgcgcggctataaaacttgggtttctggacaaacagcatcgtgaaccctttgatgagttcctgacattggtttcgcaacacttggcggagctgttgcttgcagatgtaaagaaggcggagcatcggcagcgggttgccgctttcgactcggcactggcaatccttacgcatgccgcgttattcatagattccgatatcgatctgcaagagatcgaaacccagcaggtcattatcgatctgctgtctgctaagtccgctagcgcaaaaccacttcctccaaagaaacggagttctgctcgatccgaaaacaaactccccaaatctgcccgtgattcggaaagccttcgcaaaccaaatgcggataaggtcaagaatcgtggatcaacgcgcagaccgaagaaaatctgatcccgcacaaactgtttgggtgcgttatgtccgaagatgcttctgaaactcaggcttcattgctgccagattctgatctggacgacattgcacgccagttagagtttgagccttttgtacaaaatgtccgcaatgaacttcgcgttgcagccaggcgctacgccttggatcagaaaatctttggcaactacgagtcttaccgcaaatccgttagtgcagactacaagccactgaagcagaaattatttgagtttcgcgcattcctggagcgccgagaatacgttgatcttgcctctgatctttatcttgccgcgcttcacaggagtgaacctgcgccggagacggactttcctgagattacggattttgaacgcacgcgcggcgaaccgtacttactagaactaaaacgcctattgtccttgttggaagatgcaactgacattgcattgaacaattccgccgtcccgaaaggccgcaagcctgattatccccttctggggctggtacgccgcttgtcttatgtctggatagaactgctaaagcagaagttctctatcgattatcacaagggaagcggccttacgcctacgtttcaatttgtaaagttgattgttcagagaattattcccgacattcgcgaaacagagattgtcacggcgatgcggacaatcgtttccgaactcaatctgaaagcccctgatccctcacaggaataggccgccaattccggctctgtttcctgccagcgccttttgcggcgctcactccctcattctgctctgatgagctggcccggcagaccgccggtccggatcaagagcgtagaattgaaagccaggaaatctccccgcaaaatcgatgctcggaagcagaccgcttccggctcgcgctgtgtggagatcgaggtattcccagatcttcccatcaccgaagcggaacttcagattgtcgagacatatctgtcggctatgatccgggacttgctggatgaggcagaagcctctgaggaactgattgagggatagtccatgaagcgggcggcaatctatgtgcgggtttcaacagggaaacaggccgcaggtgaactctccatccccgatcaggtccgtcaatgtgaagcctatgccgcgcagaacggctatgaagtcgtcaaagtctataccgatgcaggcgtcagcgcccggaccgacaagcggcctcagtttcaggaaatgatctcccgcgccgttgcgcccgatcacccgttcgatgcgatccttgttcacagccagtcccgcctgttccggaacacaaaagacctgctggtctatcggtcccttctggatgagcggcaggttcgttttgtttcgatcacgcaggatctgggcgaaggcgagaccgcagatattctgacaacgatggtaggcgcgctggatgagtaccagagcaaggaaaccgcaaagcacgttgcccgctccatgatcgaaaacgcgaagcaagggttctggaatggggctgccgcaccattcggattccgcacctatgccgccgaaacacgtggcgcgcggatcaagaagaaaatcgagatcgatccagacgaggcggaaaccgtccggctgattttcaaactctacgtcagaggcgatggtacatccggcccgatgggggtgaagcggattacgacttacctgaatgggcagggttatgtgagccgcaggggcaagccgttccgggtccagttcatcgacaagattctcaggaacactgcctacatcggtgagcattactttaaccggaccgactcgcgccggaagacaccacgcccaagggaggaatgggttctgttcccgatgccgcgcattgtggaggatgtcctgttctatgaagcgcaggagaagctggatcgccagcatccgatgaaaaccgcaccaaggctggtttcgagcgatgtgcttctgacggctctggcagtttgcgaagagtgcggcgcgccgatgcgcaagctctccggcaagagcgggcaatatcactattaccgttgctctcagaaagccgatgccgggcagacagcctgtaagggcgtgtcgatcccgatgcaggagctggacgatattgtcatcaatgcgctggaaggttcagttctcgaaccgaagcgcctgcgcaaaatgactgaaatgctgctcgcccgcgcacaggagcgcggacgctctgccaaagagcagcgcaaaaagctggatggcgagaagcggaaagctgaggcccaggtcacaaacctctacacgatggttggcagcggcgaattgtcgatggacggtaccttgtcggcacacatccgcgaacaacaggacaaggttgagcgtctgaaacggcagattgcgctgctggatcgggagcggagtgcgcctgtcgataagcttggcgacaaggtcgtggagagattcgggactgctgtttcgcaggctctcagaaatccggacaatcgccagtttgcgaaagcctatgtccgcacgcttatcagcaagatcgaagttggcgaaaaacagataagaatcagcggtccgaaggacgccattgcccatcaggccatgtcttttgccacgagcggtgagttagtgcctgcttttgcacaggaatggcgcaccggggaggattcgaacccccgacccccagattcgtagtctggtgctctatccaactgagctaccggtgcccggccataaggaaggcggacacatacaggcatggatcagcggatgcaagcctgtttgcgcgcaagattcacacctttcgcagcgagggctggaatggccctcaaatcggcccttcagccccatccgcgacagcgctgatccagtccgcataggccgatatgcgcatgtaaataccagggctgtccggtcgcgcgcacccaagcccccaactgaccacaccaatttgcacaggggtatcgtctcctgtcctcaacatcagcggcccaccgctgtctccctgacaggaatccacgcccccaacgcccgcacagatctgcgtatccgggtccacggatacgcccgccagcaaatcactcatgccgtaggtttcgatcagatcggttacctgctgcttgcagagcgccatatccaccgggggcaccatgccttcctgcaggatcaggctaggcgcgctgacatgacggccgccacgactgacaccggactggttccgggcgccttcccccatcttgccatagcctgcaacaaaggtttgcggagaggccgtgccggaaagatccacctccatcccgccgaggccatccagcctagccaccggcccggtccatgtcccttcgatatgcagcagggccaagtcattgccctgctctggcgcgcccggcacatagtcagggtgaacaacaatatcctgtatgggaaagaccgcagagcgaggaacctccatcagatcaccgcgaccgacgaccagaaccacgggaccaaaccgctgcatcttctcgccggttgcgtcagggaaatattgcgcagcccgcccatcggactcgatctcgatcccctcgacacaatggcccgcggtcagggcccattccggtgagatcatggtcgcgccgcattcatgatagacagatcgtccctgcacggcctgcaaagacgccatgcccggccaatcttcggggtctgcatcatgtccggcgacaacacaggcggccgcaagccccagcaggcctgcactgacaagacctttccaaccagacatcatggctccccctgtctctcgtgattggcctcatgaacgccccgcgcgatggcacgcgcaagcgtagaggcggccagctctcccacacgagataccataaaggggcgattttcggctatatcgacccggccggtcgacagaacgaacacggcgtcgccatcaaatggtgcaaacaccggccggatcgccctcgaaaagccggacagtgccatctgcgccaccctgtgcgcctcgccctgcgtacgtgaggcatctgtggcgatgcaggcgatcgtagtgttctgacccagagccgggttcgctttagctgcgccccagtcatccgggtccatgacaaagccttcaggcggtcgcttgcccccgaattcgccgcagatttcataaggccacgcccaatatgtctctgttcccggcatgaaggcagacccgaagcaattcactccggccagcgccccgacggttatgccatcccctgtcacaatgctggcagaccctgtgccgcccgcatgagctcctgccctggcaccatatccagcccctgcccgccccagaacaaaggtctcaccggcaccgcgatatgccgcaaggcccagcctggcatagggggagacctccccccaatccttgtcgccgccatttgccagatcatacagaatggctgccggaacgattggtgtcggcggcacgccttcgctggccaccagagagaagcctcgcctctctgacttgagaccggacgcgacaccgtctgctgccgcgagcccaaaggcgctgcctccggacaggcagatggcgtcgacacctggcacaagacgcccgcccgtcagcaaatccgtctcgcgcgtgcccggcccgccgcccgccacgcaaactgccgcaatggcaggcctttccggcacaatgacggagacgcccgtgcgaaccgcgctgtcttcagcctgccccacacgaatgccagggacatccgtgatgagattccgtttgccgggtgctgtcattaattgcgcctctgtctttcccttgccattacagtttcataaggtcagccgcgactcacgccaagacacggggatccccatgacacgtttaccgcttttcctt

SEQ ID NO: 648 - DNA, 23414 bp, synthetic construct
  source 1..23414: mol_type = other DNA
  misc_feature 1..23414: note = Synthetic
gcgccctgctggcgataggacggaaacagcatgtccccggcatcaagcgcctgggtcgcagcgactgcgacagcctcctcgccgagcgacttcatgtagaaagacaggcgcttggtgcgctgcatcttcagcatgcgattgtcgtattcgcgggtcagcaccatggttttgaggccggcgcgaagctcctcagggctcaggcccggcgcccagtcgccgaccgcgttggcctcctcgtcgagcacaccgacaaggccgaaggcgagatcgcggatctcggcagcatcggccaggatgtcaggcctggcatgatggccagggcgcggcaggccgagcctggagaagccaggcgtatctcccggacgaaaggcgggagcgggaacggaaatcctcggttctgccttgcccatgggaaaatgacctccaatttgttctaaattctgagttattcttctccgtaatatgccatttcagggcgccatccttcaagcatcccacaaaaataacgcatatcttccgccgaagggccgaatggcggaaggatattgcgggcagggcaggcgcgggtgcccgaaacggggaattccccttcagcgcccgttgaaattgctgcattgcgaaggagttagagtgtgtccggcaggctccagccccggcgcgcgcaagccgcgatcacggtattgcgcaggaggcaggcaatggtcatcgggccgacaccgccgggcaccggcgtgatatggccggccaccgccgcgcagctctcaaactccgcatcgccgaccagcttcgtcttgccctcgcccttttccggagcgggcacgcgattgataccgacatcaatgacggtggcaccgggtttgaccatgtcgccagtgacgataccgggccggcccacagcgggcaccaggatatcggcggaccggcagacctcgccgagatcggccgtgcgcgaatgggcgatggtaacggtgcagttctccgccaggaagagcagcgcggccggcttgccgacgaggatggagcggccgatcaccacgcagtgcttgcccgacagattgtcagccagcgcgcgcttggcgaggatgacgcagccagtgggcgtacagggcgcaaggcccggcttgccgagggcgaggcgcccggcgcttgtctccgtcagtccgtcgacatccttggccgggtcgatcttctcaatggcggagggctcatgcaggtgcttcggcagaggcaattgcaacaggatgccgtccacttccgggtcggcattgagatcggagatcaggttttccacctcgaactgggtggcgtcggccggcaggtgtttgtggatggagaccattccggcctcctcggtctggcgtaccttgttgcgcacatagacctggctggcggcattgtcgccgaccaggacaaccgccagcgttggcgctttgggcaggcccgccacagcggcggccacattggcgcgcacatctgcggcgatcgcttttccgtcgatgatctcagctgccatggcccatcagctcctcaagtcgcgcggcggcgccctcatccagatccgccagttcgacgcgtttaatacgcgatttgccgcccgagaccaccgccacctgccgcttggagatgccgagcgtcctggccagcagcgcctcgaccgccgcattggccttgccatcctcgggcacagcgcgcacgcgcagcttcaggagcgggcggccgtctgcatcctcgcccggcccatcaatcgcatccctgccggcgcgcggcgtgacgcggacagtcaccgtttgtcctaccaggacctgagcccgaacaggacaggcaacagccagtcgcgcacaaagatgatgagcaggaacagcacgaaaaccgacaggtcgagctgtccgagcggcggaatgatcctgcgcagcggcgcggcaagcggctcgaccacgctttcgagcatggagtagatctgccgcacggtctggttatgcagcgagaccacgccgcccacgatcagccaaccgaacaccacatagaccaacagcacgaagaacagcagggtgaggatggggtacaggaagtacacatatagcggcgcaaggggctcaagcatttaaaacatctccgaaaaatcggtctcgattgacgcatagatagggttgaatcgcgattggcaaggagtcagaccgggtctaggtctgttcgatgcctgataccagtccggatccttctgacgccgatgagctaccgctgcggccgctgagcgcgctgcagcaaggcgtcatcgcgctggccatggtggcgatgggcgcgggaatgacgatcaatttcgtggttgttgcaccgctcgcaaggaaagccgggctgcaggaaatccaggtggcgggaattctgacgctctctgccgccatttatgcgctgatgatcccctggtggggacggctggccgaccgggtcgggcgcaagcgggtcatggtgttttccctgctcgccatgggcctgacgaacatggcctttctctttgccctgtcggccgcgcttcagggccttgtcaccggcctttccatgtttgccctgctggtctttgtgcggatctggttcggcctgctttcacccgggctccagccctcggccatggcggccatgaccgatgcaaccacggcgatgacacgcgcaggcggcctcggaatgcttggtgcctcggtgagcatcggctcgatcatcgggccggcaggcgcctcggtgctcgccgattttggcgagctggttcccctgtggggcacgattgccctgaatatcggcgtcggactggtgctcgcctttgtcctgccgccgaccgagacccgcaagaccccacgcgacctgcggcggccaaaaccgctatctgtgcgcgatgcccgcgtctttccccatcttgcgttcctgttctgctatttcgttgccataggcatgattcagcaaaccctgggctggtttatcgaggacaggtaccagttcgtcgacaagcccggtctctctgccggcgaagccgcggttcagcatacagggaccgcttttgcctgcctggcaatcggcatgatcataatgcagttcggctatgtccagccgcgcaggccagagccgcgccgcgtgctgcctatcggactggccatggtcggagccggctatatcggcgccgacctgtttcatcccttctgggcgctgtgcgcctgtttcgtgcttgtcggcgccggggcagccctggccgtgtcgtctgccaatgcgctcggcagcctgtcggttgcgcgccacgaacagggcgcggcggcagcccttctggctgctgcgccgcccaccgggttcatcttcggaccgctgatgggcgcaggcctctaccagatgtttccggccctgcccttcatggcatctgcgggggtcatggccttgctcacaatatattccgtcctgatgctgcgccgtcatccgggctgaagtttcagccctcggccgagacgatggtgaaggcgttcagcttgttgccgtccggatcacggaaatagccggcgtaaaagccctcctcgccgcgcgggccgggcttgccttcatcggttccaccattggccagcgcgatctggtagagccgatcgacctgggcggtatccttcgcctccagcgccaccatggtcccgttgccgaccgtcgcagcattgccgtcaaaggggcgcgtggcggcgacacccgcaggcccgccgggcgtgccccaggcaatgaacatgtcctcttccatcatgcgcgacacgcccagctcggcggccagcgcatcatagaatttcgcggcgcgctccaggtcgttcgtccccagcgtcacatatccgatcatcgatccctccaagcttatggatggaagagaacgtaacaggaacttttgtttctggaaagcggattccgtgaaccgggacaccggaacacaggcgccgagcagaacgttggtctgtacagaccaactccaaggagaccctcatgaccaacaggactgccatctcactggtcttgtacggcatggtccagggcgtgctcttcggcgccgccctgctgaccgtgctctacattcccgccctgaaagccaatgccgcccttttcattccacttgccgtactggtcagcgtggcactggcgatccccatctcatggaagatcgccccgctgctgcgcgcacgccaccagcgccgcatggcgcatcaaagacagcttgcggaggcctgagctacatggcggaaatgccgccatccactttcagttcgatcccggtgacgagcttgctctcatcgctggcgagatagagcacggcataggcgatatcatccggctcgccgacacggccgagcgggatctggcgcgcgagcttggccaggccctcctcctcgccgaacatggccttcacgccgtccaggatcggcgtgttgatgaacaccggatgcaccgagttacagcgaatctgcccgcccgtcttggcgcagtgcagggcgatggatttcgacatgtgccgcaccgccgccttggcggtgttgtaggaaatatagtttccgctcgccacaatgccggcgatggaagagatattcacgatcgagcccatgccatgggcgcgcatcagcggaatggcgtatttgcagccgaggaaaatggaatccacgtcgacggcctgcaccttgcggaaagtgtcataggactcgtcttccactgacgccatcgaaccgatcccggcattgttgaccaggacattcagcccgcccatggcgtcatgggccgcctgaagcacgtcctgccagcggtccccatcggtgacatcgtgctgcaaagcgaaggccgtcccgtcgccatgctcggcattgatcgcggcggccacagcctcggcgcccgcaccgttgatatcgctgaccgtgaccttcgcgccctcgcgcgccagcatcttcgccgtcgcttcgccgagcccctgcgcaccgcccgtcaccagcgccatttttccgctcacgcgtcccatggccgtttcctcctgattgttttctgatggggaagggcgtgtcgcctggaagagcgcgcgtcaagccggtgcgttggggaaaccccgatcagagcttgcccgccaaaccctccatgaaatcggccagttcggcatccttttcggtgacaccgccagcgtcatgggtggtcagcaccacatccaccgtggagtagacattgaaccattcaggatggtgatccatctgctcggccttcagcgcgcacgcagacatgaaagcccaggcggtcttgaaatcggcgaacttgaaacggcgggacaccgcctcgcgtttatcatcggcgcgtgcccattccggacgggcggcaagaaaagcctctgctccgagattgtcggccatgtgaatctccttcagtcagcggattcatgaaggaaataacgccatgaaccggattcggaaatggcggtacgctcgccgggatagggttggccggcggccagctcctgcacgccgcccggtccgatgagggtgagaaggcgcgcctggtcgcggtgggagagcttttccggcgcgagatcagccgggtcgcgggcggcgaggtccggccagatataccaggtctcctggccgacctggcgcacgccatagggcatcttgaacaactcgatcagatgtaggttcgggtcccagccggtacggcgcatcaggtcccagtgggcatagtggtctgcgccgccgaaattcgacaggaagttcggctcggcattggccttgtaggagagccgccggatcgaaccggccccggagatctccaacagctcctcgcgcgtggcagtcaccgcatcgggcagctccggcggggcggtcggagcctcggtctcgaacaggctttcatcgggcgcaggcgcagatgccggatcgcgcgaggcattcccgcaacctgtgaggcaaatcgccagtagaagacccacccagtggcgcatgactggcccttacgccagccgcaccgggaatcaaatcggaaaacctgtcgccgccttcagatcggccagcaattgcgcctctgagacggccttgatggtcgacatgcccatggcgcgggcaggtttcaggttgatgccgagatcgtcgagatagacgcatttggccggatcgacatccagcgcctcgcacatcagggcatagatgcgcggatcgggcttgcggatgccgatcctggagctttcgatcacatggtgaaacagggagagcacctcggccacggcggcggccttgccctcatcgctgctcatccccgcccccttgccgatgggagcattgttcgtgatgcagccgaccttcgcatttttccggcagaccttcagcgcctcgaccacggcgggccggatctggcccgagagcagcgcgagcacatggctgcccggcacctcatggccgagcgcgcgcgcctctgcggcaaagagggcgtcgaattcctcgccggtcacctccgagcgttccaggcgcgcccaggcattggtgtcgccgttcagagcattgaccgagcggatgaaatccttcggcaggccgttctcggcctcatagcgattgaaggcctcaaacggcgaggaggtgatgaccccgccgaaatcccagatcacggcctcgattttactggccatgctcagcgcgcatccagcagcgtggtcctcgccgcgccctttggcatgtcgtccagcgccgtcgcctcaaagccaagctggcccatcaggccggcatcctcgtcgacatccgggttgtcggtggtcagcaggcggtcgccgacaaagatggaattggcgccggcgagcaggcagagcgcctggccctcctcgctcatttcctcgcggccggccgacaggcgtacccagctttccgggaacacgatccggcagacggcaatggcgcgcgccatttcgatcacgctgatcttcgggctctgaccgagcggcgtgccctcgatcgggaccagcatgttcacaggcacgctttcaggatggggggcgagtttcgacaactcatggatcagtccgacccggtcttcccggctctcacccatgcccagaatgccgccgcagcacagcttcagcccggcggtgcgcgccttgcccagcgtatcgagccggtcgtcatagacccgcgtggtgaccacctggtcgtaatattccggcgaggtatcgagattgtggttatagtaatcgaggccagcagccttcagcgcctcggcctggccctcttcgagcatgccgagcgtgacgcaggtctccaggccctcggccttcaccgcctcgatcatggccgcgactttcggcacatcgcgcggtttgagactgcgccaggccgcgcccatgcagaaccggtccgcaccattggccttggccgagcgcgccgcggagacaacctcttcaagcggcagcagtttttccgccttcagcccggtatcgaaatgggccgactggctgcaatagccgcaattttccgcgcagccgcccgtcttgatggacaagagctgggatttctgcaccgcgccatcggcccagttcacggcctttaccgccagcgatttcgcgatcagcgcgtcgagcggaagctcatacagcgcgcggatttcctcgcgcgtccagtcgtaacggggctttgtctctgtcatcggcgtctcctgtcgggaagttgcgtaagagacttgtggcgaaggtgcaagccgcccgtcaggcgagtgctacaccctcacttccccagctgggggccaagaaccgcgtttcgattgactggcgggccagttggccgatgctggcaagtgtgaaccggaaaggacctgcgccatgaaagccctgctgctcgccctcatcgccatgacctggctgaccgcgccagccatggccgaacatcatgctcaggccgcggacatgccacatgtcatcgaggccgacgtggtgcaggtcgtcgtggccccgcgcgccgaagccattcgccggatccaggccgaactggccgtgcgcggcttcaatcccggtcccatcgatggcgtcatcggcccgcgcaccatgacggccatgcgcgccttccagcgcgatgagggcatgatggaaggtctgctcacggtcgaaacgcttgagcggctcggcattggcgtgcgccgcccggtctatccgggtcggggcaccgaaacatcgctcagcggcgcttcgggcgagcccatgccggagcaggccagtccggcgacggaagcgccaacagagccggtcgccgcaccgacagcccctgccgttgtggcccgcacagcgctcccgaattttgtcggccgcaacggcgtggtgagtgaaaccgcgccgcttgactggcctggccgtcgcgtggactagcgcggcgccatgcggatcgcgccatccaggcgcacatcctcgccgttgaaataggcgttgcggatcatttccgtggccagcgaagcgtattcggccgggtcgccgagccgggccggattcggcaccatggcgccaagcgcctgcttcacattctccggcgcgccctgcagcagcggcgtgttgaagatacccggcaggatcgtgttcacgcggatcagctcgcgggaaaggtcgcgcgcaatcggcagggtcatgccgaccacgccgcccttggaggccgaataggccgcctggccgatctggccatcctcggcggcgaccgaagcggtgttcacgatcgcgccgcgctcgccgtcgatgggatcgagtgtcgccatgccggcggccgacttggcgatgcagcggaaggtgccgaccaggttgatctgaatgatcagattgaacttatcgagcgggaaatgtttgatctcgccggtttccttgtcgcgcgagacggtcttgatggcattgccggtgccggcgcagttgaccaggatacgttcctgaccgatcgccgcgcgggatttctcaaagccggcatccacgctgtcatcattggtgacatcaaccttgcagaacacaccgcccagctcggcggccagtgcctcgcccttttcttcattcagatcgaacagggccaccttcacgccatagtcttttgcgagcttggtcgctgtggccgcgcccagaccggacgcgccacccgtgatgacggcggaaatggaggaatcgagtttcatggctggaggttctcccttgaactggtgtcgttacgggcgatctactctttagagacggagtggccaatgactgacgcgagggaaatgaagccccaacccgccggccctgacagggcgcagctcccgcttgcgatcaatcgcagcacgcggacgacccgccggcgcttcctgccaaagctgcttagagtggccgggcgcatcccctttgccgacgatctggcggcctcctattacgccgccatcgatccaaaaaccccgcgcaaggccaaggctgttctgctcggcgcgctggcctattttgtggtgcccaccgatgccgtgccggacatgatcgccgcgttgggattcactgacgatgccacagtgctcgccaccgcactcggcattgtcggggcacatgtgaaggaaaaccaccgccgggctgcgcggcgtctgctgggaattccggaacctgccgttgcgcaggaaaaaggcgcgaaggcctgatctgaattcatttcagataacacacaaacccagaaccgcccatccccgcgaaagcgggggggtatagtgatatccaagaataaatgaggtgtcgcctcagtcttaaagacaatttggtttttgaggggaaaatagatttgggcgtcccatagggacgcccattttgtggtttaaccttgttaacggagagaccacacttcctgatccgcatacttaatccgacaagcctttcaattgcaaggctcatcttgaaaacctatcgcttttagcgtgcactacgaaagcacgggtcaactgtaactggtttgccggggcgccgatgatccaaagtcggctctccttttatctatagattcaaaaggttttcatcatgatgtggcggttgggactggatatcggctcgaattccatcggttgggcggccctttgccttaatgaagccctgcgcccgactggcttgctggagttcgggactggcgaacacttcgtgccggccgccggtgtgcgtatcttttccgatggcaggaacccaaaggacaaacaatcgcttgccgctcaacgccgcgtgccgagaggtatgcgccgtaaccgggatcggcgcttggaaaggcgggaggcgttcctgtgggccttgatcgaagccagtctgttgccggcggacctggccgaacgcaaagctctggaaaacccgatcggcgggggacaaacgcaagacagtctgcgtgatttcgatccctggtgcctgcgggcacgggcgctgaatgagccgctctcaccgtatcagatcggacgcgccctgtttcatctccagcaaaggcgcggcttcaagtcgaaccgcaaaacggacaaggacgccaaagacggcaagatctcgatgggggctgcggaaactctggctcgaatgaaagacaggaatgctcacaccttgggcgaactgtttggccgcccaaggctcgaaggtaatctgcatgcctccacccgtgcgcgcctgaatggcgagggcacaaaagccttttatgagttctatccgacgcgggatctcatcctgaaagagttcgaaaagatctgggagacgcaggccaaatatcatgctgatcttctgacggaagatgccagagaacgcctctacgatattttaagtttccagagaccgttgaagcctcagcctgtcgggcgctgcacgctggaacccgagaccgatctacgcgcgccatgggccctgccgtcttctcagcgccgtagaatctatgaaacgctgaatgccatgcactatcgcaggccgggtgaggcggcagaatggctgacgcttgccgagcgtgacctgctggcggaaaaggcgcttggcaagaaggatctgagcttcgatgccatgcgcacagcgctcagattccatgatgatgtgacgttcagcatcgagtcggagaagcgcaagaagattgaaggtgatcacacagccgccgtgcttgccagcaagaaggcctggggcccagactggcggaaattgcccctggccgaacaggaggcgcttgtcgaacttctgctcggacttgaaccgctgacaaagcgaacaccgccgcatattcgtgcggtcagcacgcaagtgattgcggctgtggccggagttttcaagctggaggaaagcgcggcggaagcgctgctgatcagttccgatcccgagatcctggcgacctggctgtctgaaagatatgggctcgacgcggaaaaggcgcgcagcatcgtggatgtaccccttcccgatgggcaccagcgccttggccgccgggccaattcaaaagtgctcgcccagctgatggctgatgacatgccggtttatagtgacgccgttgaacgtgccggctatcgcgatcaccgcgccattgaaggccatggcgtcgtgcatgaccggaaactgccctattatggcgaggttctggaacggtccgtcgcctttggaacgggagacctccaggacagtgtggaaaaacgcgtcggcaagatcgccaaccccacggtgcatgttgcgctcaatcagctccgcaaggtggtcaaccgtctgatcgagcgctatggcccgccggaagagatcgtgatcgaactggcgcgcgacctgcccctgggtgccgatgacaaacggaagctggagcgcgagcaggccgataatcagaaggcaaataaggcgcgcgcgaagatcctctcagaccatggcgcccggaacacctatacgaaccggctgaaactgcgcctcttcgaggaactgacaggcggcaaagccaccaatggccgatgtgtgctgagcaatacgcagtttggctatgccaagctcctctcggacgagatcgagatcgaccatatcctgcccttcgcagcgaccctggatgacagtttcaacaacaagatcctcgtgacccggcaggccaaccgcgacaaggcacgccgctcgccctacgacgcatttgggacatctccgacagggtatgactgggacgagatcgcgtcccgcgccgcagaactgccgccgcagaaaagctggcgcttcggcctggatgccatggagcgctatgaggccgaggagcgtgatttcctcgaccggcaactgaacgacaccaaatatattgcccgcctgacgcggacttatcttggcgccatttatggcggcggggacgaggcgatgaagcatgtctgggtcacgccaggccgcctcacatcggacttgcgcgcagtctgggggctgaaccagattctcgacggcaatcgggcgagtgatgatccagacgctccatcgcgcaagaatcgcgatgatcaccgccatcatgccatcgatgccattgtggttgccttgaccgatcgggcgaggcttaaggcggcggccgatcatgcccggtcgcaaaatcccgaagtgccatctgaacgcatgctcgccgccctggaggagccctggccgggcttccgcggcgatgtcgagcggcatgtgaatgcgattattgtgtcccacaagaaggatcatggggttgagggtcagttgcacgaagacaccaattacggccttgtccagaatccgcatggtgccggacagaagctgacgacccgcaagccgatcacatctttccagaatgcaggccagttgcaggatatcgcggacaaccggatccgcgaggaacttttggagcgcacttacggcctgacgggcaatgacttcaaacaggccctgcaagactatgtggatgaagacaagcccggccggcggaccaatccacgccgggtgcgcgttcacaggccggtgacggacgcaacacccctgcgccagatccagcatggccaggcgcgccagcatgttaggggcgttctggcaggcgaaaactactgcctggatattttcgagacatctgatggcaagtggcagtgccgggaagtcagccgtttcgatgcgaacaaaccgggccgtaacagccgcgctgatgcatccccggcctggaaggccgagcatccagacgcccgcttcataatgcgcttgcgcaagggcgacacgattgccgttgaggacatgcccggagaagtgacgtacaaaaatgttattcggctatcgcctagcaacaatgtcatatatctggccaccgataacgaggcgggagatttttccaatcggcacaaggatgacaatgatttgtttcggtgggactttgccaatatcggcaagttgaaaaacagaaaggcacgacttgtgcatgtagatgaggcaggacgcgtattcgatccggggccgccacatgccgggacagatagttgagatttcgagcaatggcatccacctgtcggtggagcgcggctttctaaggcttggccgcgatggcgaaaagatcggtgaggtgcctttcgacagtatcgaggccgtggttgttcatggccatggcgcgactttttcggccaatctttgcgcgcgcctgtccaaccagggcgcgcccctggtgatctgtggcagcaatcacacgcctgtctcggtcgtctggccggttgaagggcatcatgcacagggctttcgaatccaggcgcaagccgatgcgtcactccccctgaaaaagcgactttggaaaaatatcgtcgcggccaagattatggctcaggcctctgccctggatcatatcggcaagtcacttcccggccttcgattgatggccagcacggtcaaatccggggattccggaaatgttgaggcgcaagccgcccgccgctattggaagcagctttttggcgtggatttccgccgcgacagacaatccggcgcggagaatgccttcctgaattacggctatactgtgctccggtccggcatggcccgagccattctcgtggctggcctgcatccgtctctcgcgatcatgcatgaaagtcgtggcgaggctctgcgcttggcggatgatctgatggagcctttcaggccctggatcgacgttgtggttcacgatctgcttgaacagggcgcgacggacttggtgtcagagaccaagtctgcactcgcgaacacgcttcggatggatttacagggaccgcgaggggcctctccattgcagacttgcatggaccgcctggcaagctccctggcgaaagtttatctcaaggagcaaccagccctcgaatttcccggtcccccgctcgctcttgcccggccggcaagatgagccttctgagtgggtatagaatcatgtgggtgatggtcatgtttgatttgccggttttgaccaagggcgaaaggaaacgggccaacaaattccgcctgttcttgcgcgatatcggtttcagcatggctcagctgtctgtatatatgaaacccgtcagcgggagtgacggtgttgatgccatttgccggaaagtggaggccgaagtgcccccgggcggggtcgtcgatatcctgcagtttacggacaaacagtatgaaaacatcatttgctttcggaacaaaaagagacagtcggcgaatcaaacgccggggcaacttgcgcttttttgacaatcggtccttgtttttttggctcaggaccaaagaaaaagccccggaaatccggggcttagttgaatatagaggttagccgatcaggaagtgtgggccaaccgcaaccgcgtcatggacgtgctcacggcgacggcgaggttagccgatcaggaagtgtgggccaaccgcaacgagacgagtggctcaagatcggtggcggagaggttagccgatcaggaagtgtgggccaaccgcaaccaatcacggcaacaccaccaggccggcttcaggttagccgatcaggaagtgtgggccaaccgcaacgcaggcccatgtgcaggcgctgagccacgcaggttagccgatcaggaagtgtgggccaaccgcaacggtctggggcaggtcgttcacgagcgcccaaggttagccgatcaggaagtgtgggccaaccgcaactgatcacgggaagccccatcgacttcagcgaggttagccgatcaggaagtgtgggccaaccgcaactcccgaactattccgacgtcgcccatggcgaggttagccgatcaggaagtgtgggccaaccgcaacaaggcgccaacttcattcttggcgccctgaaggttagccgatcaggaagtgtgggccaaccgcaactgaggttgtcacggaatggtatttccgtgaaggttagccgatcaggaagtgtgggccaaccgcaaccatggaagagcagggattcgatacctgcgaaggttagccgatcaggaagtgtgggccaaccgcaacaaaagcacttggagcgtttcaggcgctattaggttagccgatcaggaagtgtgggccaaccgcaactcaacggagagccctatgcacttcgccaataggttagccgatcaggaagtgtgggccaaccgcaacgcaatcgcacgcaggaccttaggcgaacgaaggttagccgatcaggaagtgtgggccaaccgcaaccagtgtgttgccgcccagttcgaagaccagaggttagccgatcaggaagtgtgggccaaccgcaacggatacatcgcggtcggtctgatcgtcggcaggttagccgatcaggaagtgtgggccaaccgcaaccaagcttcaagcgttggggagcgatatcgaaggttagccgatcaggaagtgtgggccaaccgcaactgtccctggaaacaagggcggcggcgcggcaggttagccgatcaggaagtgtgggccaaccataatagctatattcatttgatagtaggtgatcttgaatcagcctacccagatgaacttttcaactcttcccaagcctcgtattcagcgcgaagttcctcgatcacgctatccagttccgcacgatgccctgaaatctccccacagaatccgaggcgcattaaccgctgatctgacggatcgcaaaaagcggctgtatgctcgtacccgtcccgaatggaacgcaaagtcgctctgacttcccagaacaaattatcaatacctaactgcagggatatcatgtcctgttcaatagcgatggcctgatggaaaagtggctctgtttgctgccaatctgcatcgatagcttccaacctttcaatgtgctcacgcctctgttgcacggcattggccagttcttcataccgtgcgcggctttcggccagatgatccatgagcgctggcttcgtctccgccagagcatcaaactgcgcctccgccgtcgtaaatctctgctcggctaaattcttccgattgttccacgccacattcagagcggtttgattgagttgttggagcagaacatttcgctgttcgagtgagcctttctggaattgagccgaaccaccggtccagatgatatgcagcgtgttccgctggacgcgcccggaaaggctcgaacttccgagcagtgctgagagcatcccctcgcttttcaggatgaactcattcccgctgactgtgcctgtgagatcgcctgagtcgacgtccagttcgccgcgttcggtgattgtgtaggattcaatccggcccgtcagttcaccgctgtccccttcgatgatctggatgacttccaattggtgaggtccgcctgccaggtaaagcccggtcatgtcagccatggcggcgggtgcggtgactgcccagagacaaacggccatcaggccgcagcggatggtagtcttgagccaaatcatggtgcgtctccgaaaactgctccccaggaagacaccacacaaaacttaatatgatggatatatccagtggtttaattgactacaaaatactgccttgcgccttatggatgggcgcgctcttgttggttggaatgtcaggcgaattcgcattgagcggggcgtgtcgcaggagcgattggccttcgatgccaatattgatcgctcttatctcggcggcctggagcggggcgagcacaaccccacggtcgatattcttgagaagatcgccgtgacgctggaggttccgcttcgggaactgttcgcagagtttgatccggaaatcggtcttcaaaaggggcttcagccagggcgaaagccccatgaagatgagtgagattggatcgccattattgccgaactatgtatctgatagctcagcgcaatcgagatcgatcagccgttcggggattggccccatatcaccaccttccccgatgctgttggcttcctttccgatgagccgcacgcaatgagccatgacatggcgccggcgcgtcctgccctggttgagaaacagtccattctcaaatttggtttcggagctgagatgatagcgggccagcatgtcgccataggattgtaactgagccggtagcactggttctcccgtttcccggtcgaaagcgctgcggaccgctttcttcggatcgcgctcataaggcgcaatcggcttgacgcgcttcggcttagaaggacgcccgcgctgtcctggctcggccagatggactgtgcaatcttgcagaaactccggcgcaaccgccgtgaaagcagagagaaagccgaaaggtttgacctggtcgcgatagggtttgtctgcattccaatacttcatccaggacaatagggccggactggtcgcgccatagcggctgagggccttttcttgaagtttagggtgatagtcgagcggcacttgatcgggatggccttccagggccgatttcacgatctgaaaccagagatcatactgccagcgatgcacgccgatctcgctcaactccacgcgaggatctggaatgccaggagccggctcatccgcatcataaggtgccagcagatgcccgagcccgtgttgcgaggcctttctcagcactgggtgaccgtcagcgctgagagtgaacaaggcatagcgcttggctgaaattgcccaggcaaagagcggctcaagctctctggtttcgggtttaaagttcacatcctcaacttgcaggatcgacccttgcttccggtagggattgagcggcgtgaaccagtcaatcacgcggtgcgcacgcgccagaaactccgcttccggcatgtcttcgggtttggcgattgcgaggctgtccgtgtcgcagaacacccagtccaggccttcctccagcgtgcgctgttccgccaaggcaagcatcagccgggccgcgcccgtgattagcgttccgagcaggggatggaaataccggcccggctcttccagtgcagtggattggatctcgatgtgcgcttcaccaaacccatggatatggatgacttccggctttggggcattgttgcggatgatctcgatgaagatgccatagctcgtcgcattggcgacaatcttgattgctttctggatggggtcgcccgctgccttggcttcgtcgcgcagatcgaccagacgagagaaaacatcctcagtaagtggatcgacgcgataggccggattcccgaagaggtcgatcggcttgaggccatattgcgccggtccaggttcgaaactgatggcctccaggatgtcgagtgttttcccggaacgcagtttggaggcaatgacatcggccagcgtgaaccagagcggctggtccaggctcagttcattctggccaatcgtgtaggatttcccgtcatacttggcgcgaatgggcaaaatgtctccatccggcttcagcttcacaagccttcgcaaccggtgccaggtttgcgagttttgaaggtcttccagagtgactctggccaggaaaacccgcgtgtcttccgtcgtgtctttccaggtcacgcccaccccgatgacaaaagaccagagccccatcagcgcattgacggtcggatacatcgacttgaaatcgcaatagagcacgcgggaaataacgcggcgcaaattcacctccgcgcgtccgccataatagctgcacatgatctggccgaagcattcgcgcggaaactccggctggcaggcaagcagtggctggacacccatatcttcgagataggccttgccgatgctggcttcgctgaggatgcgatgggccggtttagagaggccgtgctggccgaaccggcgcatcagctcagcgtaacattcccaggtggcctgcacatcgctgcgggcatagtcgagatagtcttctttgatggtttcgccatgcttttccgtggcggctttccgcgttggcgtttccagaaaggcgcaaaggctttcgagcgaaaagctccggctggtcagggcagcagccaaggtcttcacatcgacaaagaaaccgcgatgcacgggcgtgaaatccccgcgtttgcgcccacttcgcgcggtacgctgctgatagggtgccgcgaagtcgatgagagcggctttcgcgctcaaatgcttcacgcggacatccgggtctttccagtcccaactcagcttgaaactgaacccgccgcgcatcgaaccacgcgccgggccatgtgagaccgcgatccgggaaatgtcgaaaggcaggttgaaaccaacaatggttccattgagcttggccccgaccttgaggaatagccgccgaaactcccagagggtcagtaggtccaggccgcgctcttcggcatagatttgaaccgtctctgcttcgtatggcgtcagatgctcttgttcgcagaacaatccctcacgctgaagcacgccgcctttgcgaacctggaaactgccaatgcgcaaggcttgagagggatcgattgtggtttctgtatcgaagaccagaacccaatcggaaggcgtgtcgagcgctgctccctttcccgtcaccggctttttgcctggcagttcggtataggcgcgaacggcgatttctgctggcgttgcatagctcattgcaccgccccttccgcattttccggcagggcgtcggcaagttgcatcagccatctgccaaactcggcaatggtttctgcgatgcgggaaaaccacgccgacaaggcgagcaggtaacggcctatggattcgatctgcgggttttgtgattgcggcccgtaaggcagatcgcgctcttcatcgctgaacgccgcatggcaattgcggcattgcgggccgccatcatcatggaatttgcgcggggcaatatgggaatattccagcgcggcggggtggaagtgtccaccacatgttacgcaaatgaattcccaggtccggagccgttgggcatgtttggacaagcgcaattcgcttgcttcatttctgtcttcaatagtcatttcaaaataccattagttgctgacgatctgatagatttcatggaacggcggatcgtctttcgccgcccacatgaagagggtgtttggatcggtctcgaaggaatgaaatcggccctgtatatctctgatacccaggcctttgactggggcgagatgggctggatcagcggtgtagagaaaccatttcacatggttgaaatagctgccgacaagactggcattgtcgaagtccggaacggtcagcttgatctgcctggagcccttaaggaacggcacatcgcgcgggcgtttatcggacatcacccatttgccgccagaatattcggcaaggcggttgcctttcaaataccggcttaaccgttcctgcgaggtgccggtttccttggccgcatgcttgagagacccgcctctgcggatcagcttgaccgcagcttccaactcatcggttctggcaggtgtcgatggtttcccgctagcataagtttcgcccgccttgggatggccgcgtatctgagacagcgacaaccccctcgcccgcccccgagccttgcggcgggcatactcagctttgtaatcgcgcttgcggggcaattgggtctccaggtggcatgttcaccgcctgaaatggccgacattgaattccggctcatccaatctgcgtaggagtcctaaagttggatggctcgcgccttgcgtccgatttgcgtaggagttgtaaactgggacatccgcattgcagaaacgagctctactcgcaaacttggaatctgaggccatgcgacgtggcgtgagcgcgccaagcgaggcaaagtttgaaagctggatcaacaaggatttgatccggggagccaatgccaaaggccgcaagcgtggtcttccacccgactggtcttacggggagcaaacgctcaaggcggcttgtgaaatcctgcgattggaatctcttggagcaacgcgtgccgcgcagctcagggttgggcttggagttgcgggctaccctgtagacctggataaaattcgggatgatctggctagcgagtgcactcgaagtctcaaacgtatgacgcgcatgggatggcgaaatttcattggcatcaattcaaacgcaaacccaaccataagagatttgcggcgagtcacagagatctctcctgttctccgaaacacaggaattgtgcccactgatgaagacttgctgcaattggtgtcatccgcactcactggcacgagcgaaaatcctggtgttcccaactttttccaaggttactttgaccaaatgctcttcagtttgctgccagcgaacatgcaggatcataacgtacgcaaactcgcagatgatctattgtctgacctgtttggtattctaagaaacgtttcaaatagccccgattggcaggcattgatggttggagtttttactatcacctctccaatttggtgtgagatatttggccctgattttgataggctttttgttggttcgcgggtttagataatgtcccaggttacggcacaatctgatattgatgaagcgacagaaatttgggctgaccgttgccgatactggcttgcgcaacacgataacgcgagaccaaaccgcaagcgccgcgaacgcgaaaaaactccactcattctgaccggccacggactttccatgcgggtggacaaaggccgtctcatcattcgcgatggcaacacccattatcccagcccaaagcggcaattcgaatacttcaaaggcagtctcgatatcccgccgcgcattgtcctgctcgacggctcgggctccattacgctcgacgccatggactggcttgccgaacagcaagtgccgctcatccgcgtgaaatggaatgggcaattcctctccctgcttacatctggcggacaggccgccgactcggagaagctcgcgtggcaaatgcgggctagggaatgtgaaactgagaagctcgcattctacctgccgctgatgatcacgaagctggagaactcgcttgatacattgcggggctatctcccggaatctcgcgagcgcgatgccgctgaggacaaaatcagtgtctacctggaccgtctccgttcagatccgccagcggctttgaaaactcttctcggcatcgaagcccaatcagccagcgtttacttcaagtcctggcgagcccttgacctcaaatggcggcccagcaagcatcatcccatcccggatgagtggcaccaattctattcacgcggttcacttgcagtacgcaatcgcggcggcgcaaatatcttcgcaacccatcccgtcaacgcgatgttgaactatgcctacacagtcttgctagcacggacacaaatccaggccatagcagacggatatgacccaatgctgggtgtggtccatacccgcagccgctccagctacggcccgccacgtccaggatacgcgatagatctcatggaaccgcagcggcctaaggtggatcgcgttgtgttacagcttgttcgcgaggagacgttctcaggggcagacttcctgctgcagtctgatggtgtggttaggctggggacggagtttgcgagacggttggtgggagagttaaccaagtgaagtctgtacccaacatccagcaaccgaataatttccagcggaaataactatacccccccgcgaaagcggggatccaggagctgatgtttcaaacttgagtatgcgccggtccattgactccgctttcgcgggggaggcggagtggcacggtttacgacaggctcacgccgaatggttcgtctccgctcacaatgaggctgatatcggccaagttatgcgggaacaggctggcctagcgcttcgccttcatcagacccgcggccttgagtgccttgccggcgcgcaggacgcgttgcagcttgtgctcgctggaccggtcgccctgattggagtccgggtggaaacggcggacatagtcgctgtagcgctcgcggatctgttccggcgtggcatcggcggcaagatcgagctcgttcagcgcgcggacctgcaggcgcgtgcggccgcggttcatctcgcggggagcgctggaaacaccatcctcgaaaatttcccggccacgccagcg

SEQ ID NO: 649 - DNA, 14900 bp, synthetic construct
  misc_feature 1..14900: note = Synthetic
  source 1..14900: mol_type = other DNA
ggaacctcctcatagaaacctgtaaagtgataggagatgaagaaggaacttcgcaaaaaatttatgaatataaccaaattcaaaacaagggaattatgaaacatctttgggagataatctattaaggaagtatatgtcctcatttaatgttctttggataatcagtgatgaattcagggcagattgcatcggttatttaggaaactccatcataaaaacacctaatttagacaacttatgcaaagaaagtgctgttttctccaactgcttcgctcaggcagctccctgtgcacccagtcgcatgtgtatgtttacagggcgatacatgttttctcacgggtgtgtctggaacaaaacccctttacggtgtgctgaagaaaacatcgctttttacctaaaaaactatggctatactcctactttaattggctacaatgactatgccaaggacccggatattcttcctcccaatcatcctcatcgctcttcattaagttatgaatatgctttacccgggttcaatcacttattccaacatgaatatgattcacccgaatggtatgcctacctgaaagaaaaagggtatccgcaagaactatgtaatcgcgaatatatgtgccaacccgatgtcccatcggagggacacggagaacatctcgcggaatattatcccgctcgctataaatcggaacatagcgaatgtaggttcattacagaaaaagcgattgaatatattgacagtcaaaaagataccccctggttcttaagtctaaattatataaagcctcacagccccaatttatgctctgacccataccataaactctatcagaataccgtatttcctcctcctatacgagccgaattggattactaccaaaacgacccttacttcaaaagattggggaaagatgcttgcaattcccttattaacccaacacatttacaagattttcgttctgcttattatggcatgataaccgaattggatttcaatttaggaatattatttgattacttaaagacccacaatttgtggaataacactttactcatctttacttctgaccatggggaacatcttggagaccatttcctaacaggtaaatgtcattatttcgatagtgcctatcatgtcccattaattatccatgacccatcagaacaagctaacgctactcggggacaggtaatagatgatttagtggaactaattgacatagcacctacaatttgcaattaccttaatatcccctcttattccctttttcagggaataaatttattgcctcgtatccataatgatatgcttgctatcaaccgcaaagccgtattttatgagtattactattactcccatcttactccggaagaacaggaaaaaacagaagcggaaaagtgtttgatttgtgcggttcgcaatacaaaatataaatgtgtcttttttggagaggacatattaccaccccgactttttgacatttctcaccctcatggagaattaaataatttagcagcggatgaaaaataccaacatctcataccccattatctatcattacttttacgctggaaaatgcaaaatgcagattggcgtatggaacgctgggcaagaccattgagaccttatgacgattaatttttttgcctgatttgcccgacctatcaattaaaaatcaacctttgccccatattacgaggcaaaggttgaaggcaatcaaagacttttaagtatcaactattcacacaattcaaaaattccagcggcacccatacctccaccaatacacatagtctccagcccccatttcacgccacgacggcgcatttcatacatcaatgtgcatgcaagtttagtgccggtgcaacctaatggatgtccaagagcaatagcacctccattgacatttactatatccggatttaagccgagggttttaataacatagagtgtctgagaagcaaacgcttcattgcactctaccaatccgatatcttccactttaattccggcttgacgacatgcttcttgaatggcaggaatctgagcaggtcctaagtatcccgggtccccagcgccaacggcgtatccccttaaccgtgccaacggttttaagttgaactcttttacaatatcctcactcacaataacagttgcagccgcaccacaactggtttgacttgcatttcctgctgttgtaacaccttttcctgcaggaccctgaaatgccaacttcagcttggctaatccttcaagtgtcgtatccgctcgcggaccttcatctgtatcaaaaataaaggtcttaccatccaaaccttttacttctatcggaacgatttcttctttgaacttaccttctttaattgctttcactgctaattgattgctacgcaaagcccactggtcgcattcttcgcgtgtaataccaaaatcattagcgacattatcggcacattgtcccatagatgtgtaggcacgcggatttttacggattaaactggggttcgggcatgtcttatttccacccattggaatcacactcatggattccacaccacccgcaatacctacatccaacatatcgcattcaatctttgaagaaagaattgccatagtgtccaatcccgaagagcaaaaacgatttacggtctcgccagaaatggtgtccggcaaatcggcaattaataaaccgatacgaccgacattcatccctgcttcggcttcagggaacgcacaaccgattatgcaatcctgaaaccgctcggcgggaataccggaccgttttacaacttctcgtaatactgccgctaataaatcatccgggcgaacatgtgcaatggcacttccttttttggacttgcccacggcagttctacatgctgctacaatatatgatttttccatatataatcctccttacaactttaaggttaattccgcaatggtttacctgtggttaacatgtgttgaattctttgttgtgttttttctgttccacaaagactgcagaaggcttcgcattctaaatcaagcaggtcttgttccgttatcggtgttccttctgcacggtcaccaccggtcaggatataagccaccttggttgcgataagcatatcgtgttctgatgcaaatccggcttctttcataccccataccgccgcttcgaatgccgcacgaggtgtctcacccaatgcccataatcttggcggacgtggaggacgataaccagcctgtattagacttaagcatacattcttcgctctacctacttgaagttcaaaattcggctcgattatatccgtgggtcttaagtatcccaattcaacaacctctgcaccgctggtaccgaccttcgccatagcaatatcttcaaatgaacgacgaataaatgggaatgggtctgcatttactccttccggcaccaattccagagcacgaactgtcatttccttcgttccgccacccgcgggaataactccgacgccagcttctaccagacccgcataagtttcacccgcaatcacacattttgcagcatgcatacagatttcaagaccaccaccgaaggtgtaatgatgcggtgctataaccaccggcttggaacaatatttcatccgcatgttggctccctgcaaaccacgcaccatcgcttcaatagcaccccaatcctgttgcataatttgtcccaaaataaggaacagattggcaccggcactgaaatgcggtccctggttcgcaacgaccataccctcatacttgccatcttctaaaaggtctactcctttgctcaacatagtaacaatatccgcatccactgcattcatcttgcaatggaactcacagcagataatcccgtcaccaatgtcaatcaaactggcactatcgtttctatcaatctctttattgggctgtgctttgaccgctgctaaacgaatctctttcgggttcttgggtaccggcttataagactccgtagccacatcaaagtaataatccacaccattctctgtcttatagaaggaatttccgcctgcttctttcactgctttagcaattgccggtaattcaaacccttcggcttccattcgtttgcaaacttcttcaaaacctaataaatcccaggtttcaaagattcctgcttcccacgcaaatccccacttcaccgcattatcaatgtttacaatatcatcggaaatttcagggatacggttcgctgcatatttggctacattagcaaataacttaaatacaaatttggagcctttatcctcactaaaatgcatgatcttcaatttttcagcgaggtcttcaatactgcgaaccgcacctgtgcattcaaacttcgctttaacgggatcgcgatattcgacggtatcagggtcaattgcctgaacaatcgcttttcctttttcatcttttttatcggtcttcttatagaaaccactgcccgtcttattaccccataattttttctccaccatcttctcgacccaatcaggcatcttaaagtaatctctgcattcatcatccgggcaaccatcgtatacattcttcacaaccttcacaaaggtatctaaaccgaccaaatcggctgtgcggaaggttgccgaactggcatgtccaatagccggtcctgtcaaagcgtcaatctcctcaaccgttaaaccttccttcgtcatctcatgcaatatataagacatagtaaaggtcaaaatacgattggcgataaagttcggagtatcctttgcgtaaacaatccctttgcctaaaacattctcaccaaaccacgccatagtttcaaccacttcaggaagggtatccggtcccggaataagttctaacaatctcaaatatcgcggaggattgaaaaagtgagttcccataaaatgctgactcatctctttgggcatatccttcgccatagcacgaatcggaataccacttgtattggatgtaacaatgcttcccggcttacggtgttgagcaacctgggcatatacctgctttttaatgtccaggttttccatcactacttcaataatcaagtcgcaatctgctatcttatgcatatcatcctcaaagttacctgtctctatcatattgagataacttttgctgtacagaggagccggcttcgctttcagcagatttgctttgttaccctcgaccagcgcatttctttttttaggattcttcttttcatcctcagagaggttcggagttactatatccagcataatgctgggaactccacagttggcaaggtgtgctgcgatagccgcacccataacgccagagcctaaaaccgctgcttttcgaatttccctcatggattttttactcctatcactgggtttaatgttttaattttacggacaatgtatacttaccgttcgttatacaacatttataatactatctgcaaatcaaaattgcaaatttttttccctatcccaagaaataccttctatttttagttttattgatttatatcaatcaacttttagcaattttataataatgaaattaaacctttaaattccctttcaaaaaaataggctctataaaaattatagagcctattaaatttttctattgcgatttttgttattctttttcccaaccatattcaacacgcggcataggcttgccttctctttgcagatgacgcaattctttataacttattagttctattcccagtgatttgatgtattctcgcgtctctggcttgcagaagaaatccgtatccgcagttctacgagcagccgaacctgtggtagccttcatttctggcgttaattcaccacaatggatataaatttcggacacctttcctgcggggatttgtgccaatcgctctttccaccaactttccgttgcttcgatagtcggtgggtcatccataaacagttcgtcaggatgtaaaactcctaactcatctgctttgtctatcaaatattcgccaccgtattttttcattaattcacgacctgccatacgacaagggagattgtaatcttttgctatcttgatatatatctcatggtatcccggtgcatattgcattgttcccatgtgtgagtctatatgtgttacatcaattcctgctgccaatgctttatctatttgtgcacgaacttctttttcggcttcttcaggcttcgcattcaaatatacgaaaggcacatcggcatagaaataacccatctcatcgcataaactgggaacagccgttcttcctaatacaggaccccatttatatttgccccattcactggttaatgtcgtatgaatacctatacttgcttttggattttcttttattaaacttacggcttcgggaaaccatgggcaaggaaccattactgtggctgatgtaacgccacctaccctcaaagctcgaatagttgccatattggttgcatgattcatcccaaagtcatccgcattaataatcaaaactttagtattcggcggaaatcccaaccgttccaccagaggaatcttttttggtttgtcctgggcaaaaactgaaacagtaaccgcaaaacatgtaataaaagacaaaataaacaaaaccttgtttcccataaaaatactccttctattatgttgaaatagtttgagttatactttcgttaaaattatagttagatgtttgacttatctgaatactatttcgttttaattttttattttctggaaaatagaatatcataattatataaaattcttaacaaaaggatatattatgacgaaaaagaatattttccttgcttctcttttcctatctatctttcttttttctattacaacaaacacaatagcccaatggcagaagccaactcaaggacctgaaataaattataaagtcttttctgaatatgaaagtataaagccagaactcccagtaaagatagccttacaatttcagttagaatcggaatggcatatcaacagtaataaacctctggacgaatttctgattcctaccgaacttatatttgaagaaaatccttttgtccaggtaaagaaaattatttatcctccttctaaggaagtaaaattatccttttctgaagaacctttatcggtttttgaaaataatttctttgtgggtattgaacttattgttttatctaataccgaaaataaaactttagtagaattaacggggtctttgaaataccaaccctgtaatgaccgacaatgcctccctccttcgtctatccaggtcaaaatatctttgaatatcagcgataaccctattcttgcgaatgatgaaacacaacaaaaaataaaaatgatacagtgggacaaagccgaatcccttcttgaaacaaaagcagtccaacaagaaaaagtctctgatacaacatcgccatcacaaataaatacctcggttatttcaaataaaaattgggaagaacttataaaagattttcgtgtagtatcccgattagatggctatgcgaatcgagatgaatttatccgatttatagaatctgctgagcaagaaggtataccttcagtctcaaaaaaaattaaccgcagtattatctctctgctttttattattctcataggtgggcttgcattaaatcttacaccctgcgttcttcctgtcattccattaaatctggcaattattggcgccggggcacgggcgggttcacgcatacgcggtttcttattaggtttagcctatggattgggcatctcccttgtctatggtggattggggattgcggtcgttttgggtatttccaaaacatttggagccatcaattcaacctattggttcaatggattaataaccttactattccttatattagcattagctatgtttgactttattaatattgatttttctcgattccaatcttatgtcggtgttcgcagaaatacaaaaggaagtttttttgtcgctttattcatgggtggagtatctgccctattagcaggggcttgtgtggctcctgtggtcatatccacaatattgcaggcacaggatttatatagtcagggttattcttccgctctcttcctacctttgttattaggcgtaggaatggctttgccctggcctatattaggtgctgggatgacccttctgcccaaacccggcaaatggatggaatatgtaaaatacgccttcggtgtgttcttactttgtctcgcagcatattacggatataccacctacacattattaaatgccagagacatctcaacagcgcaaatcacagaaggctggcatacctcattagcagaaggattaaacgaagcaaaaacaaacaataaacctgttatcattgacttctgggcaacatggtgtaaaaattgtcttgttatgaataaaacagttttgcccgacgaaaccgtccaacagaaactcaatcatttcatccgaattaaatatcaggctgaaaatccaaacgaaacagaaacccgaaaagtcctcgaccattttgaagttttagggctacctacttttataatattgaaacctaaacaaaattaatctatgaaggctatcttttaccaactactaatagagcacttctttacaataatcggttttttatttgccgttttcctcattctcaaaatcatcagtgaacatcgccgacccggaggcgctatatcctgggtcatcgctattatttttgccccttatatcggcgttcctctttatttcatactcggaagcagaaaaatagcaaaaaagataaacaggaaagaacccctttactctacaagcacagcaaaaccagaacaacctataaaaaatcccattgaacgcatccttttatcctcaggtatgccacccatacgccgtatccattcagtctccttctcattcgatggtattgaagcctataacaaactaattgaaatcataaaagaagccaaagaatacatctactgcactactttcattttagggaaagataaaacgggattaagtatcataaacacattagcggaaaaaggaaaacaaggcgttcgtgtccatttgctattagacagtctcggttgcctaaccattacaaaaaaaatactggaaccacttatacaagccggaggcgaagtaagtttcttcctacctgttctccccttacgcagaaaatggtctgcaaaccttcgcaatcacagaaaaattgtcatcgtagatggaaatatagccatggtaggtggaatgaacctatccgacaatttcatgggaccgaccccttcctccaatcgttttttggacaatgccgttttcctccagggagaagccctatacgatatagagcagatatttcgtagcgattggtatttcaccacagaaaaagagctgcctgaacccaaaatttcctcattcacatcagaaacgaaacctctccccagtcttgtccaggtagtagccagcggtcccgatgtccctgaagacacactacacgacgctatactaaccgcttgcatggaagcccgagaacgcatctggattgtaacaccttacttcgtgcctgacgaccctatcctgaaactacttaatctccaggcacgcgcaggtgtagatgtctctatcatcctacccgaacattcaaaccacagattggctgatttcgcacgcggtcccgccctacgcgaactaataaatagcggagcacatatctggttttacgaaaaaggaatggttcactccaaacttctcatattcgaccgtttccttgccgtaacaggctcgcccaacctcgatatacgcagcatgtacctgaactttgaaattgccctattccactattcccccaacgaaattgatgccattgccggctggatataccaactcatgaacaactcccgattcatcgccgagctccccgccaattccttacaagcccacctcgaaaacttaagcctcctcatcgcccccctcatttaaaactttaaatcacctataaaaacggataaaatattactttacaaaagaataccaaaaaaaggatggctcctatggaaaatgaaaaaatttttagtttcgacattggcacaggtagtttaggcacctgcattcgtaaaggaagtgaaattgaattattagatgtagaaaccctccccagtgattttgccacagtaaaagaagcacgcgaacgaagaagacaaatccgaacacgaattgcacataagaaaagagaagaatggtggaaagaacacgcacaaaaagcaggtattgaagtgttagaaacaggtcatctgaatgaaaagggagaatatattaaacccgatactcgattaactcgagaatttcaaaaaaaaggagacccaactatttataactcccttttacttcgcatcgctcttcttcatggcaaaaaattagagggatggcaaatctataaagccatctggtctgccattcaacgaagaggatacgacatcaaccttccctggaaatcaaaaataaaagaggctaaagaagaagataacgaagagcaacaatccgacaaaaaaagaaagaaaaaagaaaagaaggcaaacaacgaagaaaatgatgaaaagcaggttgaagaagcagtccaaaaatataaagaggaaatgaagaaatgctttggagaaaaacaagaattttattatccctcattttttgatgcttttagattaggaatatgggaccccgatgattccgaaaactactcaaaaacaattgatgaaaatgcaaaacccatccgaaacaagtatggagaaatttcaactattgctcccgcagaaatggtggataaagaactaaaacaacttctcgttcaggcagggaaacaatacccctatattgaaaaaaatttaaattatatcctctatggacctaccggctgtaaatatggcgcctatcttttaaaggattaccgtaaatatatgggtagggatgtagaatggcaaggattactatcccaaaagacaccccgttttgataaccgcatcgtgtataaatgccgactaatacccagacttaatgtatgcaaacgaaaagatccattatgtaaagaaataacattcctgatgaaactaaaaaacttccgatatgtagaagcagaaaccggcgtagaaaaatctctcacaccaaaagaaatttcagaacttttcgaaacgcataaaaataattttcatattgcggaatctaaattaaaaaattatcttcaaaaaaaattaaatggtattgttcatccttccttcaaaaccatcgaagccccaaaagaaaagggaagagccagtttttgtagacccgctatgaaaattattaaagatattattctatccggcaaatcaccacatgagtcatatcaagaatatatttcaaacaaccaaaacacagaccctaaaaagggacttatcaacgaagattataaattcttattagcaatgcctgattcatgggacaaattccatatccctgacacccgagaagaagaagcccaacttgacgaggaagaaagaataaaaaagatccatgaaattttctccaaaatttctaatcccgtagtaagacaccgtcttttacttttctaccaaaaattacaaaaaatcaaagaaaagttcgacgaacccgacaaaattgtgctggagtttgcaagagaccctgaaaatactatcgctggtaaaaagaaaaaagaacaaataatgaaacaacaaaaagaaaatgaaaaaataaataaacaagtaagagataaactaaatgacctaaaagaacatggtgtccaaattgaaggtaaaaaggcattccttaaattaaaattatggatggatcaagggggtaaagatatatatcagcatgcaagagacccctactctgaaactaatattcccgccacagaaataaacaattgcgagattgaccatatcgttccacgagaaaaaggaggacccgatgcttactacaaccttgtgttaacatcaagagccaataatcaggcaaaagggaaacaaacaccctacgaatggttaggaaaagacattacacaatggaataaatttattgattatataagtagttttaacaagtcagaaaaaaacaaaggagacaaaaaaacagacaaatttggtttaccaaagaagaaaataagattactcatttctgataatcctgaagagctattagaaaaatatactcatttggcagaaaccgcttatatttccagactcgcccaaaaaatatgtcatctattttttggatgggaacaattaacaaaaggttccgaacgaaaagtattcgtagtcacgggaaattttacctcccgaattcgaaatatttttgaattaaatcagattttagagggagaagaaacaaacgaagaggattcaaatagcgaaactaatgatcaagacgaaagcaccgattcaaaacaaaacaagaaaaagaaaaatcgtgataatccaagacaccatgctttagatgctcttataatatcaatcacacccgaaattaaatttaaccctgaaaagggtaaagatgaatatcccacctggttcaataaagacttttgcatagaaaaattagaaaaatgtttgccccttaaaattcgtttcgttaaaccaaaacttgccgaaactatctacggattaagaaaatacatagatgataatggaaagataacagatgattatgtcttcgtaacaagatttggaaccggaactgatattagagattatttaaaaattttcagcaagaaagcagaggaaagaaaaaaatatagaaattacatcaaatcaatttacagctctaaaataagaaaagactttgaaaacaaattaaaaaataatcctacgaaagaagaatgggagatatttttacacaactaccgtgctggtggaaaacccaaaaaactattacttattgaaggcgaaaaaattaaatctgaagatgtagaaaagttcttgaaaggtgaaataaataatttgggcgaattcattaaaggaaaaatgccaggacaatatttgaaacaaaaaaaggaatcacatggctatttcgttgttaaaaataataaaggaaagtgggaacgcatacctatctatgtattcgaatccccctataaaaagaaaaaagaaattttaataagatataaagataaagaaatttatttcttcaaatcaggaatgattgttgaaatcaaagaaagttttaaatatcaaaaaagaataaaaaataacacagataaaaaagattctacaattattgtagataaaggaaaatattatttgaatacaatcaacgaaacaaaacaatgtaaaataacacaaattgatggtaaagaaattacacttcaattagatactctgatggatttaggtaaaatgcgacctgcacaaaacatattataaagatgtcctatcatattattcatatactccagcataatagttatttatcagttgaccatggtttcttagtgttaaaaaccaaagaacaagagcggcgagcattattatcggaaatcctgattgtcgttgtagcagcaaaaggagtaagtttttctggaaatgctttgtctgaaattattaaaaatggaggcgtaattctacattgtgatgaacattataaacccattgggaaaacaatcggtttgccttctgtaatccactcacaggttttcaaacggcaggtggaaagagataatacattcaacaataaagtgtggttaaaaatcattcaagcaaaaattataaatcaggcagaaaccctggatattatcggtgcttatcataaattgtgggaatatattaatgagaaaaactgggatgaaggtaatgccgctcgacattactggaaatattattttatgcaatttggaaaattagcacctgcgggcagggaacacttcggagcagaacatccgataaatcaaatgttaaattatgcttatgccgtattaggtgctttatgtcatcgttctatacttgctcacggcttaaacccctgtttaggtatccatcataaatatcgttttaagtctgaacctttactatatgacttgatggaacccctccgtcctttttgtgatttaatactctttttagccttccaaaaagatatagatattactatgtcaaacttcgctaaagagatagcaaaaaatttagccaatattaaaatcagggttcacggtaaaaacataaaattcattcatgccattgaccaatatatttcctcagtagcccaatgttttaataccggctatatcaaattattaaccatacctgaaattcaagatttacaatgctaaaaaaaaacaagagacataaaaaaaaggaggcaagtaaatatcgtatgggatggttactcgttatgttcgatttgcccaccgataccgcagaagaaaggcgaagcgcgagccgtttccgtgcagatttattaagagatggataccttatgattcaatattctgtttacgctcgtcctgcggtaacattagatacaaaggaaagatgtatttcgtatctccgaaaaataaatccatcaacaggcgacatccgttgtttctttataacggatattcaatggaaacaaatgatatttatatgtgataaaacacgcccatcaaaacgacgaattgacaaccaaccccatatcggcgaacaattacaattctggtaatctgttaaggagaggatataccgagacgtgcatgcagaggtccgatactcctctcttttgttaagacgccacaaagaaaatttttaatattcaattgtaaatctttaactattataggtttttaaatcctattataacaaatctgaaatctttgtggcgtcaaaacatcaaaatatttaacaattaaatctcttctattataacaaatctgaaatctttgtggcgtcaaaacgcagtctgctttgaatatttcaactctcc

SEQ ID NO: 650 - DNA, 5616 bp, synthetic construct
  misc_feature 1..5616: note = Synthetic
  source 1..5616: mol_type = other DNA
cctgtatccattccgaacacagaagtgaaacgctgtagcgccgatggtagtgtggcattcgccatgtgagagtaggacactgccaggcttctaatttgatgtggcttcaagccgataaaaaacccagcatgcgctgggtttttttctttctgctatttaatcaacgctattttcttcctttcgtctgtaccgtctttaacatagatgttgcagatcatccgataactttgctgttcatcgaagaatatgagctgcatcgcatgcacacggtgccactttcctgtctgtaagtcacatgactttgcacatcgtcatgattacctctgaagtctttttaccgcggtatttgatgcgaactcgaagtgagattcaaggagcaccatcatgataaggcgtgtgagtagaagtgcggatcgagtattatgagagttctggctcgttgcttgagaggtcactcttagatgttttcacatcccatcgatacaatttcgtttatagctattgttccagttattcattgcatggttaacaggctgataatcgacacagtgaactgtttttcaggcaacatttaaacactgttagatagttttttgcacagagaacgagaagtttgatgctagcttaaaaaggttggtgaggtgcttgaacaaatacatctgcgatacgtttggcgccagatgattttgcggtattcagaaaacaaaaaagccagctcattgagctggcttttccgcattgaatttggcggagggatagggatttgaatccaatttatccaaccacaaatgaaaattaatcgtttaatatcataaacttacggaagcgacaccaagtgttaatgatcaattgataacttcaattgactataggcctttttcaggaaaggttcaactgtgtcaaattcaaatttggaaaaactgaatatcccgtttagatcgaacaaatcaagcatccattctggaaagaaagatttctttgcggatttgacgaagcgaacaagaaaattttctatcagcgaatgagaacccaaaatgaaaaaggactaaccgaagttagtcctcattggcgtctaaggataaatccttagcttattctactagtccccaccagcaaaactgacgcctatcacaaggatactcaaaaaaatcccatacacaatatatttgtgtaatttcttgcagtattctgtaaggaaagcttactaactataagggctgttatgtttgtcaaagctggtgttgatttaggaaccgcatctatcgggttcatggtctggggagtgaatgatggactatacgaaccactttatcatgaggttcgtattttcaaggagccggcagaaaatactcaatcgggcatggtcatgaagaccgtacaacgccgagacgctcgacaagccagacgccagcagaaacgatactctcgtcgcatgaatggcctaaaaaatcttggagttttcttaggtctatcaaagtgcgatatagccggtcgacgcagtatttatttaacggaattacgagcagatgctgctcaaggaaaaattgagcttaaagatttctttcatgtattaattcgaattgcaaagcgacgtggttatgcaggtggttttactaaaacgcttgaaggcgatgtagcaaaaggcgcatctgagctacaggaacgaatgaatgcattagctgagtcaaaaggtgtgccttcagtcacgttaggacaatttattcatcaccactaccttcaaggcaatcccacatatctgaaagcccaagttggcctccgaaactcctttgatgatgaagcgcgcactgcattatttgctctaagggaaatggtaatcgatgaatttaataccatctgggatgaacaagcaaaacatcacgaagttttaaacaaaataattgatggccgtgctctcaagagcagagtatttgatgccatcttctttcagcgtccgttgaaagctcctcgtgctatggtatccccttgcatttatgaaccgactttagcccgagcaccatgtgcgcatccagcatatcagacataccggattgaaacactgattgcgaatttacgctgggggggtggtaaaagagctgaaagattaacagtagaacaagctcaatttgtcagagacattttgaatggaagaaatgataagtgtcttggaaaagttgatggtgtttttaacatcaaagatgtgttgaaagcattaaaagacgctaacttgcatgatcccatggagcgtacattaaacgttaatggccatggtagggaaactatcgtcggaaataccacgatcacccgtatgcgatattatggctggttggatgattggcggcgcttagaatctaaacatcaaactggggtcattaacctgctagccgacattggtgatcctgcgttattcatgccttctgactggcataaaaatttgttgaaagataagcataaacagggtcaaagcaaataccggacgatccctgatgaagttgtcttattcattgaaaaaatgaaagccactaaaaagggtaatggcgaagatgcattcgaccgtctgagtaagatggagtttagttcgggtcgtgcaagttattcaattaaagcgttgaataatctaaatcaatggtttgtagaagcatgggcaaaaggaatagatgttatttctgattatcacgctcaacaagattgttatggtcatcgggccaaaacaaaagccgatacagaaacaatgagtcgaatgatatcatcaccaccgaaaacaggaaatgcggttgttgatgtcgcattacgagagctgaagggtgttttgcagcggtttagtgataccacgggtcattttattgatgaaatagtcgtagagatgaaccgtgaagttgggttggggattaaagccagaaacgatctgaattcccagatgcgctttaatgaaaaaacgaatggcatcatccgcaaagcattatctgaattacacaaagcaccaacaccatccaatattcgtcgttacaagctatgggaagaacaacagaattgttgtccatattgtgcgggtaaaatttcagttcgggatgccctagacggaagtgtaactaattatgaacatatcattccgcgaagcttgactcaggtaggcttaaagcagagtgaaatcatcttagctcatgcaagctgtaaccatgagaaaggtaatcgaaccccatttgatgcgttcggacatgatgaaacgcgatgggatattattcaaaacagagcgaaatcacttattgaaacagcaagtaagctcaaaggttcacaagcgtacaatctgaagcgaaaagcagagcttttacgtatcaaagattatgaaatcgatgtgatgacagatgagtccattgcggattttgccgatagacaatttcatcaaacatcttggatctcaaaaacggctactcagtggttgaaagagtttatccctgccgtctaccctacttctgggcgtttcaccgcaaaactcagacatcagtggggcttaaatacaatcattcctgcaacgcgaatcaaggaaggtctttctgtttccgttgtcacgacggatatcaatggtaatgaagtcattaagccaatcgatacggagttatttaaaaaacatcggactttttgggaaggaaaaggcgatggtatttggactgctgaccaactctataaacggaatgatcatcgacaccatctgattgatgcaatcacaatatctctaatgtcacgctcaatgtttattcagatgattaaagagtctcaacgtaaaggcgatgacacaagacatttgagtgcaccattaccaatgcctcacccttctttatatgttgttgctgaacatatgattgaaaacaccaacatcagtcacaaaccagatcgccatattgaaggtggtttttttcaagacacaatatattcgcgcgataaaaatttgattgcaagaattgaggctgatgggggtaaaattacagcgacgacagggttatgtaaaaaaacaacgattcttgatttaaagggtaattcagagtctgctacccgtgataatattaatagaatcgtgagcgagcaaactaaatttttaattctgaatgcgtttaatgaaagaatagcttctggcatctcatggaaagaagcacttacagtacctgtttttaatcctgtaaatcagaattacatctctaaagttaagttatttgcatcacccgctgggcagcctattgaacaagatagtcatttatatatttcggatggttatgcatatctagatgtttggtcagaaaccataataaagaatgggaaagaaaaactagaaagcaaatcagaactagtttcaatctatgatgcacacttaagacgctcaaacaaaaatatcttatgtaaagatagaaaacgattttttatcggagacacgattctggataaaaaaacagggtcaatagaagtaattaggcaactaaagatggaagggccaactattctccttcagcatttaactgacatttctgaacccaaaaaactcagaaaagtgtcagggaaacgattggctgatatagaagtgatagataatgtcagagcatcggatcctgatatttgaggggcaagctcatttgtccgttaaccttgggcgattgtctattcgtcgccctaatcagcctgtgacatatgttcttcctgaagatatagacgttatagtaatcaatcatcactcaataactttttcttctcagttaattgatatttgtgaacaattctctattagcattttgtttgttggtatcagccactatccaatagccactctctcatcattaaatccaacgacacaaacagtccgtcgtcttcatcagcaaatagaatttcatttaaattccgtcaaacatgaatgttggatgaagcttgttcaagccaagatccgtagccaaatttcagtcttggaaataaatgggaaggaagttcccgtgaggatgaaaaaaattattgatgaggtaaaaccaggagactttgaaaataaagaggctgaggcagctagaatctattggactacgctttttaatgctgagtttaaaagaagcaaacaaggtgcatcagatttgacaaatatttgcctcaactacggctatacaatattacgctcattaatagcaaggcaagtggctatttatggattaaaccctgctcttggaatccatcacgaaaattttgaaaatccatataatcttgttgacgacttgattgaacctttcaggtttctgatcgaccacacagtttgtcaaataatgttgacacaaaataagtcagtcttcgataaaagctgcaaactcagattgctcaatgatgtcttaatcgatcttccagtaaataaatcaattgtcagaacagatacggcaataagtctatttattgaaagttttattagaaaattaactaacgctgatgaaccgttagttcttccgagatatgacctgtagcggtcaactaataccggacagtaaattagattgattttcagcttttgcaggaggaataccatcattatgactatgtggtctctcccaattgtaatagcccattaagtaagcgcttatatctcgggttgcctctgctagt

SEQ ID NO: 651 - DNA, 23384 bp, synthetic construct
  misc_feature 1..23384: note = Synthetic
  source 1..23384: mol_type = other DNA
tcacccggctgccggccgaccgtgcctccgacatcatcccgcgcctgcccggcgtcgtgctgtcaggcccgccgggagagaagaagaacttcggcctgcgcgggctgacccccgacttcacccgcgtgcaggtcgacgggctgcagcttccctccggcgccggggcgcgcagcctggagccgaccacgctccccggcttcctgctgcagtcggtcggcatcctgcgcaatccctccgccgagtacgaggcggacggcatcggcgggcgcatcctgattgagacccgtcccgtgccgccgcgcgacgcgctcgagttgcgcggcgcgctcggcggcaacgacgcgctgatcgacggccgcaaccagcaggccggggcgctggtcgcgcgccgcttctccgacggcttcggcctgctcggcgcgatcaatgtcgatcgccggcgcatctggaagatcaaggacttcagcgaacgcaccttccagggcgggccgggcggtcagggccagatcgtcgatgagcgcgatcccaaggacttcacgaacatcgacgcgctcggccagctcggctgggtctgggacggcggcaggctgaccctgcggcagacgctgctgcattcgctgatcgacaatccgcgacggcgcgacacctaccgccgcgacaccggtgtgcagctgaaccgccagctcgccgaaggcgaggagcgtctgaccgtggcgagcctcgcggtcggcctggagcagaggctcgccgaacggctcaccctcgcgctggatgccgcgctgagcacggcccagctcggcaaggacgggctgacccgcaccttcagccccgccggcgcgttccagaacgcttcggccgaggagagcagcgtgcgcgactggcagtgggatctgggcgcgagcctcgcctggcggctcgaccagcccttcgccaccgaactgaagtcgggcctcaagctgcggcgtgtcgatcggcgcaacaatgccgagctcttcacggtcgccgccaacggcagccgctcgcagaccgcggcggacatcctgcgctccacggaagccgactacaccgcctccgagacctacctcgccggctacatccagaaccgcatcgagttcggtcgctggacgctgatcccggggctccgtctcgagcacgtgggctacgatctcgacggcggccgcggcagttcgacccccggcttcaccgatgtcctgccctcgctgccggtctccttccgcctgacggagggcctctccctgcgcgccgccgtctcgcgccaggtgaaccggcccaagctcgaggagatcgcgcccggcacgacgcggcgggggccgcgcgtgttcttcggcaatcccgatctcaggcccgcccgcgcgtggtcgttcgatgtcggcgccgactatgccggccagcacgtcttcctcggcgtcaacctgttccatcgcagcatcacggacgtgatcgacgccaacgagttcgcgcccaaccagttcgagtaccgcaacgccggcgacggtcgcgtgcgcggcatcgagttcgagcagcggctgagcggcggcatcacggggctcgactggctggcgccgttcggcctcaggctcaaccagacgctgctggagagtcgcgtcaacgacccgatcactggaccgcgccgcttctccgaagtgccgcgcttcgtcgccaacaccgtgctggaatggaacgacgaggcgcgcggcacgctggtctcggtcggcgtcaactacgtcacgacgcgcatcatcctgagcaacgagggcaacggcgcgctgcgctacaaggagctggagccgaccaccttcgtcgatgtctatctcgagcagcgtctcgtgcccgggctcgcggtgttcgcgagcggcgagaacctgaccaaccagaagcgcgacgagttcgaacgcaccaacggcgtgctgagccgccaagccatcatcgacagcggccgcgtcttcttcctcgggctgaaggcgtcgctgtgatgcggattgcgattgactcgcaagtagggccggtggcagaacccgccgcggggatgcagagccgcaaccctgaaccggcccggtggtgcgcgatgcacgcgggccatccatggacccctgacatgactgtgagttccaacatcgacgccttcgcgcgcgccgaggtgaaggcgacgctgcgcgtcggcgaccgcgtgtggctcgccaccgaggcgggcctctgccgccgcgacccgggcgacatcctgcgcccggcaggcgcgctcgcggacgcctccgtccaggcgctcggtcccgcccccggcggcatggtggcggcggtcggtcgcgagatcgtgctgctggacggcgccggggccgaacgcagccggcgcgccggtcccgcaggcgagaagatcgcgaccgtcagtgccgccgcggaccgcatcctcgtcggcaccaagaacgggctctatgcggcgcaggaggatggctgggtgcgcctgttcggcggggccggttgcgaggtgatcggcatccacgagcttcccggacggctgatcctgcgcatcaagaagcagggcgaccggcggcttcccgcgctcgccgagagcggcgatggcggcgcgacctggacgatgaccgagatgggccactacggcgacgtcccggtcgccgccgatctccgccacgtggtgacccgctggcacggcgccttccggcgtgatggccgtcgcggcggctacaagaagcatccgatcacggcggcggaactggcggccgacggcacggtgctcgtgctggacggggacaaggccgagatcgtcggaccgggacgtcggcatctcgaggcgttccatccggcgatcgccgaggccgagttcgtccacctgctgccggacggcatcctcgccgccggcgtacagggcgcgatgctgttcgatccgctccgcgggtcggtcgtcgatctggcggaggcggtcggcgccgatcggcgcgcacggctcggcaagcgcaagaagctcttcgcgctcgaccgtggcgccgtcctggcgacgtgcagcttcggaacgttcctgagcgaggacggcggcgccacatggcggcccgcggatgccgaatggaacgtgctcgacgcggaacatatcgcgcgcgcgcccgatggccgctggttcctcctctgccagcgcggcctcttcgtcagcgccacgaacggggcgcgctgggactacgtcaagccgaagctgccggccggcgtgcggcattacggcgagttccgcaccctcgccatcgcggcggagaggctctggctcggcaccaagggcgggctgttcgcggcgccgctggccgatgccgaacgcctcgccccggtggacgccgtacccgcggcggcggtcgaggcgctcgcaccacgacgcgagggcacgctcctggtcggcctggagggacagggactgttcgtgttcgatcccgcatccggcagcctcgcccccctcgcgccccaggccgtgcacgaggcgcgcatcgtcgcggatggcgaccgcctcctcgccgccgtcgaggatcgcctgatcgcgatccgggccgacgtggccgacgcgacaccggctgccgccaccggagcgatcgggatcgccgccaatgacgagcgcgtgctggtctgggaccgcaagcgggcctggatcaagcgccagggggaaggcgactggaccgcgctggccgggtggccggaggccgcgcgcagcgccgccctgctcgatcgcgcggtcctcgtcaccgacaggacgcggatcgtggcgatggccctgccggatgcggcctgatgtgctggggatgcccgtcatgggcatccccgtcacgcgcccgctcgcgggcgagatggcggcgacgctctggagtctgcgcggcttcctcgccgccctgatggcagcgctcgccgccaaggccgccgtcatgcccgcctatgcctgggccacgggccgcctggtcgaggcgatccgcgcacccgaggcgacgatcctcggcgtgatcgccgcgatcggcccgctcttcgccgcgatcatcctcgccgtcgcggtcgtcgaattcggcgagaaggtcgcctccaaggcgatggaggcccgcctcctcgtcgtgctccagcgcatcttcctcgcgcggcggcaggtcgagcacgcggcgcgggacgtgagccaggtgctctacggctgcgacatcgcccgcaaggggttcgaggccgtctacaaggacggctggcgcatccccgccgaggtgatcggcgtgctcgcctggcagctcacgctcggcgcgggctgggtgccgctgatgctgggcgcgctggtgccggcactcggctgcgtctggctgatcggcaagcggctcgaactggtcagcctgcagatcctcggctggcaggccaggatcgccgcgacgacaggcgcggccgaacgcggccgattcaccgagacgcaggagcggatcttccgcggatcgatccgcttcgagatcctgaaatggctgaccgagcgtggcctcgacgccgcactctggaccttcctcgccctctccgcgctcgccgcctgggcgctcgatccgcggctcttgccgggcgagagcgaacttgccggcgccgcggtcttcgcggtcaacctgcgcctcctcgccaagccgctctcggatgtcggcaaggtctacaccaagtggcgcgaggccctgccggcgatccgcgcggtctatcgcccctccgaggaggccgtgccgcgatgatcccgctgcctgcaccgtggcttgcctgggtgctgccgcctttgctgctgatcggttcgaacgtgctgatgaccttcgcctggtacggccacctgaagcggccgcactggagcctggggcttgccatcgtcgcctcctggggcatcgccttcttcgagtactgcctcgccgtgccggccaaccgcatcggcttcggcgcctacaccgcgcagcagctcaaggtgatgcaggaggtgatcaccatggcggtgttcgccgccttcgccgtctggttcctcaaggagcagctcacctggaactacctcgccgccgccatctgcctcgtcgccgccgtggtattcatcttcctgcccggccgctgaccgctggtccggccgctgcggttcgcccctccccccatccggccactccgctatgctcggtgcatgattctctccgggacatcgcggcttgccggcgtactgggctggccggtcgcgcattcgcgctcgccgcgcctgcacgggttctggctcgaacgccatcgcatcgacggtgcctacctgccgctgccggtgcggcccgaacgcttcgccgatgccgtgcgatccctgcgcgacctcgggttccggggcgccaacgtgaccatcccgcacaaggaggccgccttcgccgtctgcgacgaggtggacgcgactgcgaaccgcgccggtgccgtcaacacgctggtgtttcggcccgacggcacgatcgccggctccaacaccgacggctggggcttcctcgcaggtctgcgccaggccgtgcccggcgtcgatctcgccgccacacccgccaccctcctcggcgccggcggctccgcccgcgccatcgccgccgccctgctcgacggcggctgtccgcgcctcgtcctcgtcaaccgcacgcggagccgcgccgaggcgctttgcgccgcgctcgggggacctgtcgcggccgccggctgggacgaggccgctgacctccttcccgccacgcgcctcctggtcaacaccacctcgctcggcatgcagggcacgccctcgcccgatctgccgctcgaccgcctgccggcggaggcgatcgtcgccgacatcgtctacgtgccgcgcatcaccgggctgctcgccgccgccgccgcacgcgggctccgcaccctgggcgggctgccgatgctgctgcaccaggcgcgtcccggcttccgcgcgtggttcggcatcgatccggaggtggacgacgagctcgcccgcttcgtcgccggcgacgtgccggagaccgccgaggcggcatgatcgtgatcgggctgacgggcggcatcggcatgggcaagtcgaccgccgcgcggaccttccgccgtctcggcatccccgtgcacgacgcggatgccgccgtgcaccggctctacgcccggggcggcgcaggcgtcgccgcgattgccgccctcgccccggaggccgtggcggacggttcggtcgtgcgcgaggcgctgcggcagcgcgcgctctccgacccggccttcctggcgcggctggaagcggcgatccaccccctggtgcggcaggaggaacggcgcttcctcgcccgttgccgccgcgcgcgccgccccctcgccgtgctcgacatcccgctgctgttcgagacgggaagcgatcgccgggtcgaccatgtggtcgtcgtcagtgccccggcggcgacgcaacgcgcccgcgtgctcccccggcccggcatgaccgaggcccggctcgccgcgatccgcgcacgccagatgccggataccgagaagcgccgccgcgccgataccgtcatccgcaccgggctgtcgcgccaccatgcccagcgcgcgatccggcgcctggtggcgcggcttcgcgagggcgggcgatgagcgaccgcgaggtgctgctcgacaccgagaccaccgggctcgaggccgcccaggggcaccgcatcatcgagatctgctgcctcgagctgaggaaccatgtgcccacggggcgggtgctgcaccgcctggtcgacccggggcgcgagatcgaccccgaggcggaacgcatccacggcatcacgcgcgcgagcctgatcggcaagcccgccttcggcgagatcgccgacgagctgctcgccttcctcggcgaggatccgatcgtcgcgcacaatgcgcccttcgatatcggcttcatcaatgccgaactcgcccggctcgacctgccgccgatcgatccggcgcgcgcgatcgacacggtggcgctcgcgcgcaggcgccatcctggcctgccggcgaatctcgacgcgctctgccgtcgcttcggcatcgacatctcgatgcgcaccacccacaacgcgctgctcgactgccagctgctcgcccaggtctatctcgagctgctgggcggccgccagccggggctggggctcgcaccggccgcgcgcggggcggtgcgcggcgcgcgggccgccgccccgcccacgcgcaggccgcggccgatcgtgccgagcgcggaggagcttgccgcgcaccgcgccttcatcgcctcgatcgagggtgcgctctgggctcggctcgaacccgagacctacggcagcgcaacgacaccgcgctgatcagcaggaggcgggcggagcgggcgcggtggcgaaggcgaccaggcaggcgccgaaccggtcggcgaactgccagtgctgcccggcggcatggccggcgaagccctcgggccggtcgatcagcagcaccgccgccacccgtcggccgagccggtcccggatcagcgcggcgcgcccgtcggggtcgagcacgaacgggtcgtgcgcgaactgcacgaaggcgacgcgtgcggacggggcgtcggcgcgctcgacgatcgagcgcaactgatcggcctgcgcgttgaggttcatgctgccgccctggccgtgcgccgccgccgcgatcgcgaccgccacatcgaccagccccggcgtgtcgagcacctgcagcgcgttccaggccccgcgcgactggccggcgacgacgatccgccggtatccggcggcgcgcagccgcctgagcccgtcgcgcagccagccggcggcgcggtcggcgtcgtcgctgttcgggtggcggtcgaagcgcagcacgtcgaagccggcgaggttgaagtgccgcacccaggtctgcggctgcgtgccgcgatagtcggcgttgttggcaccgcggccgtggccgaacacgatcgcgccggcggcggtcgccgcgccgcgccagagatagcgcgcatccggcacgatctcccaggcgaagccgccgatgccgaggcttgccggcgcggccgagggcgggttccaggccctggcgggatcgacgatcgccagatcgaccgcgtagagtcggcagtccgtgccggcgcggcgcgcgcagttggcgagtgctgtggccttcgcctggtcgaggtcgcgcgcgccccacgccgctccgccctcgccacggggcccgatcgcgaaggcacggtgcgtgttgtagccgatgaagcgcgcccaggcggcacgcgtctcggcgttcgcgccgggcggcccggcgggatcggcgatcgggacgggctgggcgatggccagcgccggccagagccaggcgagggcggcgagcacaccgccccgccgcgatggcgggacggttccgcgcgccccggagccgcgcgcggccccgcgcggcatcgccgcgcccgacggatcccgtcccccccgtcgccgcatgcgcctcaccttgtcctgccgcacctgcgctgccattgtccgccaccgtttccccggctttcaacaggttccccgatgaagaagaccgtcaagaaggtcgtgctcgcctattcgggcgggctcgacacctccgtgatcctgaagtggctgcagacgacctacggcgccgaggtcgtcaccttcaccgccgatctcggccagggcgaggagctcggccccgcgcgcgacaaggcgcgcctgctcggcatcaaggacgagaacatcttcatcgacgacctgcgcgaggagttcgtgcgcgacttcgtcttcccgatgttccgggcgaacgcgctctacgagggccagtacctgctcggcacctcgatcgcgcggccgctgatcgccaagcgccagatcgagatcgcggaagcgaccggggcggatgcggtcgcgcatggcgcgaccggcaagggcaacgaccaggtgcgcttcgagctctcctactacgcgctcaagccggacgtcaccgtgatcgcgccctggcgcgagtgggagctcacctcgcgcacggcgctgctcgacttcgccgagaagcaccagatcccgatcgccaaggacaagcgcggcgaggcgccgttcagcgtggacgcgaacctgctgcactcgtcctccgaggggaagatcctcgaggaaccggggatggaggcggacgagatcgtctatcagcgcaccctgagcccgatggcggcccccgaccgcgtgaccgagatcgcgatcgacttcgagcgcggcgacgcggtggcgctgaacggcgagcggttgtcgccggcgacgctgctgacgcggctcaacgcgctcgggaaggagaacggcatcggtcggctcgatctggtggagaaccgtttcgtcggcatgaagtcgcgcggcgtctacgagacgccgggcggcacgatcctgctcgccgcccatcgcgcgatcgagagcatcacgctcgaccgcgaggtcgcgcatctgaaagaccagctcatgccgcgctatgccgagctgatctattacgggttctggttcgcgcccgagcgacggatgctgcaggccgcgatcgacgcgagccaggagcatgtcaccgggcgggtgaagctgaagctctacaagggcaacgtgatggtctcgggccgcgagagcccgcacagcctctactcgatgaagtacgtcaccttcgaggacgaccagggcgcctatgaccagaaggacgccgcgggcttcatccggctgaacgcgctgcggctcaggctgggcgcgatggcggggcgcaagggcggggcgctgtagccccgcccgccaggaccatccctcgcggggcacgctagcccagcggggcttgccctgagagtgcaagacccccgcgcgaggcgggggtcagggggcgcttcgtccgcgggatgcccagcccgcacctgtgtggacgaataggttttgcctgcggcaagcagccacaccaggcatcgctacacgagtgttacactacctccttggttgcattcatccaagggggcatcgtcatgcaaacgatctggggcttcgatctcggcgtgacctcggtcgggttcgccgtgatccgctgggacgggtggagcacgcctgagggaaacggcgagatcgtccggctcggcgtgcgcgtgtttcccgaaacgcgcgagatcgacacgcaggggccaggcgccccgctcaacgcagggcgtcggcagaagcggctgatgcgtcgacaggtgcggcgccgccgttggcggcgtgtgcacctgcgcgccctgctcgcggaggcagggctgctgcctgacgagcgtgcgcagccgccgacggggcaggacccgtatgcactccgtgcccgcggcttggagggtgccctttcggctgaagaagccgggtgggcgatcttccatctcctcaagcgccgcggcttccagggcagccgcaaggtcggcccggtcgagccagcccccgcgaccgccgaggtagacgacgaggaggccccgcgcgggcggcgccggcgcggcagggcgttggcttctccgcccgaaccggccgacgagcgagcgcgcgaggaggcagaggagcgggcgcgcggcgaggcgttggcggcgcggatggcggggcggaagctcgcgatctacttgcaatcggacgatcatctgaagcccgacgggaccacaccggcgctctgggacacgccacgtcggcgcgccgtcggccagacgcgcccgatggtgcgcgaggagttcgaggcgctgtgggccgagcaggcgaaacaccatccgacgctgctcacgcctgacctgaaggcacggatcgagacggtcgcgctggcccagcggccgaccttctttcgcgcccgcaccgtcggcacggacgatctcgaacccggcgaacctcgggcgctgaaggccgagtggctgacgcagcgcttcgagatgctccagctcgtcaacgcgctccggctggagcgcggcaaccagcgcgagctcgatccggccgagcgggccatggcgatcgcgtatctcgagaccgagcgccgccccacctgggcgggcctgcgcgcggcgatcgggatcgggcggagcgaccgcttcacgcacgagcgcggcgagaaggcgacgatccgcggcaatgcgaccgaggccgcgctcaggaccgccttgggcgcggcctgggatgcgctgccggaggcgatgcgcgagacgatccgtgccgagatcggccgcacctggcaccggatcgagtatcggccgacgaagggcggcgcgatcctcgaaatccacgatcacgttgggatcgcggccgagcgcgccgccctggccgagcgcgcgcgcaccgagtgggggctgccgccgcaggcggcggaggcgctgtcgcgtctcgacctgccggacggcgcggcacgccacagcctcgcggcgatgcgcacgctgctgccgctgctggagtcgggcgtgccgtacatgacggccgtggaacgggtctatggcgcccaccgcgacagcggtgcgccgcttgcccggctgccggtgccgaacctgtcggagctggacaaggtcaaggacgcctgggtgcgcgagcgcatggcggcattgctcgccggcatccgcaacccgaccgtgctgcgcacgctcagcgagctgcgcaaggtggtgaacacgctcctgcgcgcgcacggccggcccgacgtgatccggctggagttcgcacgcgatctcaagcagtcggccgaggagcggcgcgagaccgacaagcgccagcgcgagcgcgagcgggcgcgcgacgaggcacgcaagaaggtggcggaactcggcaagccggcggaggggccggagggcgaggagaacgtgttgcgctggctgctctgcaaggaacagggcgggcgctgcccctattcgcaccccggcaagacgatcagttgcaccgaagcgctcgatccgacggcgacgcagatcgaccacatcttccccgtcagccgcagcttcgacgattcgcaggcgaacaaggtgctgtgcttcgcccgcgagaacgcggcgaaggggcggcgcacgccgttcgagtggctgtcgggcgacgccgaccgctggacccatctgacgacgatcgtctggccgcagatgaaaaacgccggctggccggaggcgaagctgcggcgctgcctgaaggcgaggctggaggacccggagaccgacgaggcgggcttcacgaaccgccaactggtggacacggcgttcatcgcccgcgccgcgcgcccctatctcgggctgctgttcggcggcgggcaggcggggctggatgcggtgcagccggtgccgggacgggcgacggcgctgctgcgccgtgcgtgggggatcggcctcggcaagctgctggatcttggcgacgacgacggtctgaaggtgcgcgaggatctgcgccaccacgcggttgacgcgctggcggtggcgctgaccaccccgcgcacggtggcggaactgtcgcgctggtggcagcgccgtgagacgggcccgcgcccgcccggcttccacctgccctggcccggcttccgcgaggacgccaagacggcggtggaggcgatcctggtcagccatcgcgtgcaggcgaagctgtcgggaccgctgcacgaggagacgcggctcggcgacacggggcagcgcgaggccgccggctcggcgatctacgtcaagcgcaaggcggtggcggatctcagtgcttcggagatcctgagcacgcccgaggacggcggagacgcctggatcgccgacgcgggagtgcggcaggcgatcctcgatcatctggcagccaacgggctcgtcttggagcggaagaagcgcggcaaggcagcagatggcacggcgcagcggcggctcaaggcactgcttgcgcaggaaatccgactgcctttgacggatagggtgcgcagaaaatgggcaaagttcggcatcacggcggagcgcggaccggtgattcgacgggtgcggctgcacatgcggcggaaggagggcgtgatgcgcgtgcacgccacgaagaacatccatgccgagctcgggccgggcacgaaccaccacatcgcgatctaccgcgacggcgagaccattcgatacctcgtcgcgacgaagcgtgaagcgctggtgcgcgtgcaacggggcgaacccgccgtgcggcccgagcacccggaaggcggacggctggtgatggcgctgcgaccgcgcgacgtgctctgtcgtgagaatgatgggctccggcaattcgcgctcgttcgaaaggtcaatgcggcagggcgcatcttttacaagccacttcattcggcgaacgagcctaagcctgaagtctcgctcggcccgagttgtgtcaacgacggctggcggaagatctccgtcgatccgatcggccgctggaggccggcgcgatgacgcgcacggtggaggtctcgtctcccgcgcggctcagcctgcgccaccgccagctcgtggtggcgcgcgaggacggcagtgcgcccaccgtgccggtcgaggacctcgccctgctgatcgtggacaacccccaggtcacctacacccacgcgctgctcgcggcactcgccgaggcgaaggtcgcgacgatcctgtgcggccccgatcacatgccggtgggcgtgctgctgccctatgccgccaacgcgcttgccggcgagcggcagcgcgcgcagctcgcctgcccgcgcccgctcgccaagcggctgtggcaggcgatcgtcgcctgcaagctgcgccggcaggccgacctgctgcgccgcgccaccgggcaggacgcggggctcgatgcgatggccgcgcgcgtgcgctcgggcgaccccgagaacctggaggcgcagggcgcgcagcgctactggccgcggctgctcggcccggcgttccggcgcgaccgctccggcgcggcgccgaacccgctgctgaactacggctatgcggtgctgcgcgcggcgaccgcgcgggccgtcgtcggcgccgggctgctggccggcgtgggcctgttccacgccaaccgcggcgatgccttcgcgctcgcctccgacctgatggagccgttccgtccgttcgtcgacggggtggtgtgggagatggcgcgggccgggctggccgagggcgagcttgacaggacgcgcaaggcgcatctgctcggcgtgctgaacatcgcggtggggatggacgggcaggcgatgccgctcgggcttgcgctgcaccgggctgccgcgtcgctggcggcaagcttcgggggaaggcggatgctgctgcggctgcccgaggacccgacgggcctgcccgagccagcggaggagccggatgagggcgccgcgcccgccccttcttgacccaatcgcctggcgcaccgtgtgggtgttcgcgatgttcgacctgccggtggagacgaaggcgcaccggcgcgcctatgctcgcttccgcaaggatctgctggcggacggattcgcgatgatgcagttcagcgtgtatttccggcattgcgcgagcctagacagcgccacggcgcatatccggcggatgggcctgcgggttccggcggagggggaggtgcggttcctgacggtgacggacgcgcagttcgcgcggatccaggtgttcgccggaaaacggcggaaacccccggagactccgccggcgcagctggagtttttctagcatgcgccggcggattcgtgtgccgtttcaggcggttgccggaagggcagtgtagcgatgcccggtgcggccgcaaaccgcagccctggcgctagcgaagtcgcgcgcttccgcagtgtagcgatgcccggtgcggccgcaaaccgcagcgctagtgtcgacaaggatgtgcaacaagcgagtgtagcgatgcccggtgcggccgcaaaccgcagcagcatcggctgaggcacgctctcccactcgagtgtagcgatgcccggtgcggccgcaaaccgcagccaccagccgcatgggcacgttcatactcacagtgtagcgatgcccggtgcggccgcaaaccgcagcgccgccggtgaagtgtggcaggcgccgcggagtgtagcgatgcccggtgcggccgcaaaccgcagcgcagcgacaacgaccgaggtgatccagcgcagtgtagcgatgcccggtgcggccgcaaaccgcagcatacaactcggtcagcttcttggcggtttcagtgtagcgatgcccggtgcggccgcaaaccgcagccgagatggtgccgttgtggaacgaagcgcagagtgtagcgatgcccggtgcggccgcaaaccgcagcggaatggcacgttcaagatcacgccggaggagtgtagcgatgcccggtgcggccgcaaaccgcagctcggtggccgcagggtcgtactcggcgtgcagtgtagcgatgcccggtgcggccgcaaaccgcagcaaatcggcgacgcgccggcccgccagcgccagtgtagcgatgcccggtgcggccgcaaaccgcagcagaagctcaatgccgggcgctatgacgaggagtgtagcgatgcccggtgcggccgcaaaccgcagccggcattatatagggacaatccctatgcgtagtgtagcgatgcccggtgcggccgcaaaccgcagccttgatcgtgacgtcgtgtgcgctcaaccaagtgtagcgatgcccggtgcggccgcaaaccgcagcccctggtgtgggggcgcccgacgaaaccagcagtgtagcgatgcccggtgcggccgcaaaccgcagcgcacagcgaccgatgcgccgccacccgtccagtgtagcgatgcccggtgcggccgcaaaccgcagcttggcgtgcgacgggatgcgcctcgctcatgagtgtagcgatgcccggtgcggccgcaaaccgcagcctggacgggttgccctgtgcgtcggtctcgagtgtagcgatgcccggtgcggccgcaaaccgcagcttcgctgtcgtcccggcgccgccgcgcggcagtgtagcgatgcccggtgcggccgcaaaccgcagcgcacagcgaccgatgcgccgccacccgtccagtgtagcgatgcccggtgcggccgcaaaccgcagcgctcacccacgaagcgatttatgagggcgaagtgtagcggtgcccggtgcggccgcaaaccgcagcaaccacaacgtcacgatcccgtcggcatcagtgtagcgatgcccggtgcggccgcaaaccgcagcgttcgatccgcaggacctcgcggtggcgaggccctgcggatcgaacgggcgcatccaagtccacggcgtgaaccggcgcacactcagaacgccgccgtggcggcaagcgcgcggccgatctccatcatcatgtactcgaactcggtgatgaaccgttcggtcacgaccacgtggaagtagtcgccgccgttgacgatgtcgtcgcccttgcgcgccccgaacggcagggtgcgctcgaagccgtgcttggcgatgtccttgccgccccactggtccagcaccaccagccccttcgcggtctggcgcaggtagatcgcggcatggttgccgtgcttgcggttgggataccggcccgcctcgttccagcctgctgcgatcaccgtgccctcgggcacggcgaggttgcccttcacgagcggccccttgcgccagaacttcaccttcggcgcaccggaggcaacctgcggcaggatcggacactggccgttgcccacctgggtggtgcgcgtcttccacttggccaggttcgcggccttgtggaactcgagcatctcgggcttgccggtgaagcccttgtcggccttcgccatggcctgaagctcggccagtgtgcccttcggcatcggcccgtcctccgttccggtgagggaccttgtactcggccatcgccccccgccgagtgagcgggctcacgccccccgctcctgacccaggtcaatgcaaccggggcgggcgctccccatatgagggcacacagcagggaggagcagcccgatgagcgccaggagacactggtccggtgccctcgccgcccaggtggagcgcgccgccgcccagcacgtgctcaccacgaccgccgaagagggtcacgacggcgcgatcatgccgcacagcccagccgcgacggatcacgcgctgcggctggtgcgggcgatgatcgccgccaccaaggccgacggcaagctcaccgacgacgagcgcgaacgcctgctcgaccgcatcgggccggcgcagttcgaccccgacgtgcaggactggctgcagcgcgagttccgcgccccgctcgacatcgagcgggtggtcgagggctgctgcgacagcccccgccggtcggtcgagctctacgtcgcgagcctcatggcgatcgacctcgacgcgccggaggagcacgagtggttgcgccggctcgccggtcggctcgggctcgagcaccggctggtggatgcgatccacgccaagcacggcgcgccggcgctgaactggggctgagcgcggctacgggcggcgggcgagtgactgctcgatgcgtgccagccggtcggccagccgccgctggccgatgccgatcgcagcaagcgcgaagagcgtcagcgccgtgaccatgccgctgccagcgtagagcaatcggccgggattccagccctcgccgccgagcgggctcgccttcagcgcgaggtcgagacaggcgagcagcgccagcaccgcgacgacctggagcgcgcgccacgcgatcatgccaggccgcgccgcgccttggccgcaatcagcgtgttctcgagcagcgaagcgatcgtcatcggcccgaccccgccgggcacgggcgtgatccaggccgcgcgctcggcggcctcggcgaaggcgacatcgccgaccagccgcccgtccggccggcggttgatgccgacatcgatcacggtcgccccctcggcgatccagtcgccgcgcaccatctcggcacggcccacggcggcgaccagcacctcggcgcgccggcactcggcggcaaggtcgcgggtgcggctgtgcgcgagggtgacggtcgcatccgcggcggtcagcagcgccgccatcggcctgccgacgatcgcgctcctccccagcaccaccgcgcgcgctccggtgagcgtcacaccggcctcggcgagcagggtcatcacgcccttgggcgtgcagggcaccagggcgggccggccgatcgcgagccggccggcgttcaccgggtggaacccgtccacgtccttggccggatcgatcgcctcgatcaccgcctcgggccggatgtgcttcggcagcggcagctgcaccaggatcccgtccacctcctcatcggcgttgagccgggcgatgatcgcgagcagcgccgcctcggtggtctcggccggcagggcgatggtggccgcgcggaagcccgcggccgcggcggccttggccttgttgcggacatagacctggctggcaggatcctcgccgacgaccaccaccgtcagtcccggcacgagcccggcggcgcgggcctccgccgccacgcgcgcccgcacccgggcggcgatcgcccgaccgtcgagcgtcgcggccgtcatcgcacgcatgccgcgagcctcgccgcaagtgcggccgtatcgccctccacgcggatcagcttccggcgcgaggcagccccgcggagcagcgtgcaggcggagggcgcgacgccgaggcggtcggccagcagccgcagcacggccgcgttggcacgcccctcctccggcgcctcggtgaccgcgaggcgcaggagcggcgcgccgtccttgcccggtgccatcccgagcacgcccgcgcggcgcgccttcggcgtgaccttcacggcgatggtcagactcacagcaaggccggggcgacggtggtggagaggaagatccgcgccgcctgcaggagcaggatcaggatcagcgggctgatgtcgatgccgccgagattgggcaggacgttgcggatcggccgcagtgccggctcggtgacgcgccagaggaagtcgccgaccgtccagaccaggcggttgcgcgtgtccaggatgttgaaggccgtgaggatcgagaacaccgcggcgatgatcagcacccagacatagatgctgagcgcggtgtcgatcagccagagaagtgcgtacatcagggctccggcggggttcctggggggcgcgcggaccctagcggcgagccggcgccgggcgcaagccgggcgtccttgacttccaaggggggccggaagataacgcccgcctcgcgggatggggctgtagctcagatgggagagcgcctcgttcgcaatgaggaggtcaggggttcgattcccctcagctccaccaccatccccgccgcccggaccgccgtcggctccgccgctggcgccgcccccggtcccgcggatcggaccaagcgggcgatgctgcgtgcgagcaggccctgaagtcccctccggcaggtcggcaccggctccagcgccggattgccgccggccgagactgcctctcaccgccatcacgatcgcctcgaccgccagggcgagcccgtcgcgcagggcgcgatgccgctgccaatccgcccggatgcccgatccgccgaggctccgctcgcgcatcgatgattcctctccccgtccgtgcgacgctgacgctcacggcagcttgcaagaccggcatgtccgccgtcgcggtgcggggcgcagggggcaaggagggaggcggaaggaagcgatggcagggcgcatcaacagggcaatcgagctgctcgcgcaaggccaggcggtctactatgccgggcatcataccggccacctgctgaccgccgcgcagggccgtgccgatgggggcacctgggccgactacatcaatatcggcatggaacatggcgccttcgacctggccggcctcgccgagtacatgcggggcctggtcgatgccggaccgacgcgctccggtcaccgcacgccggcggtgatcgtcgaggcgccggtgaacgggaccgacgaggcgacggtgcggcacaacgcttggcagttccgccagatcctcggccgcggtgtccatggcgtgttgctgtgccaggcggagtcggccgatgccgtgcgcgccttcgtggaggcctgccgctatccgcaccagaggctcggcgtcgatccggcactgccctcgccgcttgcgcgcatgcgcggcactccggcgccgcgacctgcgccgggccagctcggcgtgggcacgcgcgggcgcggttcggaagccaccgccgcgccggtctgggggctctcggaggaggcgtatatgcgccgctgcgacccctggccgctcaatcccgagggggaattgctgctcggcgtgaagatcgagagcccggaaggggtggcacgctgcgagcagatccttgccgtaccgggcctcggcttcgccgaactcggaccgggcgatctcggcctcgcgctgctcggcctcctcgacgtgccgcgccagccctatccgcccgagatgcagcaggcgcgcgcgcgcgtcttcgccgcctgccgcgccaatggccttgccttcctggaagcctgcacgcccgagacgatcgttgcgcgcctggacgaaggggggcgcgtgatcgcgggcggatcggaggagaccgcgcggatcggccgcgcccatcagcgtcgcgccatgccggcatgatcccccggcgccgctgcgcccggacggggctgccgggccgcgaacggggatggtcgcagcggcgatcatccgctacccgttgcacgtccggcaccgcgaatgcacccagggagaccgcgcctgatggacttcgatctcatcctcaccggcggacgcgtcatcgacccgtcgcagaacctcgacgaggtcaccgagatcggcttcgccggcggcaaggtcgcgcgtctcggccggtcgctgccgcgcgcacccggcaccgaggtgcgcgatgtcacggggcgcatcgtcacgcccggcctgatcgacctgcacacccacgtctatgtgcacggcacctcgctcggcatcgatgccgacaccttcggacgcaactcgggtgtgaccacggcggtcgataccggcagcgccggcccaggcaacttcgccggcttccgcaagcacgtcatcgagcgaagcgaggtgcgcatcctcgcctatctgcatgtctcgcatgccggcatcttcggattctccgagcgcgtgatggtgggcgagagcgaggagatgcggctgatgaacccgatcgacgcggtcgcggtggcggacgccaaccgcgatgtgatcgtcggcatcaaggtgcgcgtcggcaggcacgcctccggcacgtccggcgtggcaccgctcgacatcgcgctgcaggtcgccgaggaggcgggcatgccgctgatggcgcatatcgaccacccgccgccctcctacgaggaggtggtcgagcggctgcgacccggggacatcctgacgcacgccttccgccccttcccgaacgcgccggtcacgccgcagggccgggtcaagcaggtggtgctggcggcgcgcgagcgcggcgtgatcttcgacatcggccacggcaagggctcgttcgccttccgcaccgcgcgcgcgatgctggcgaatggcttcatgccggacacgatctcgtccgacgtgcacacgctctgcatcaacggcccggccttcgaccaagtgacgacgctgtcgaagttcctctgcctgggcgtctcgctgcccgaggtgatccgcgccagcacggtgaacgccgccgcggcgctgcggcggccggaactgggcagcctccgccccggcagcccgggcgaggcgaccatcctgtcgctcgagcagggccgcttcgactatgtcgatgtggtgggcgagcatctcgagggcgacaggcgcatcgtcgcggacggcgtggtgctcggcgggcggctctggcacgtgcgcgagggtgtcaccttcgcccgcgcctagggccggtccggcctgtcggaaccggctccggcgttttcctggtctgcatcttcaagcgatcaggtgagtccgcctgatcgggggctgcgctagctccccttcagcgtctcgatcagccggtgcaccgtcaggatctcgtcaagcagccgatgcgcatccgccctgaggcgccggacgctccggaacagtccgccgaccctgaactggtccccgcggcgcggcaggagcagcaggaactggtcgaagtcgaaggccgcatcgatccccctccgcccggcggaagccgcgagcctcgccatcacggcggcaagggggggcgtgatcacctgcgcagcctgcgccgggtcggtcgtccagagcgacaagtgccgcgcgaacgcctcgtcggggatatcgatccgctgcatcccctcgagctggccgtcggcaagccgccacggcgtgccgaaccaccgcggacgcccccgcatcaggatcggcaccggaatgcgtcgggggatcgcgatcatgaacatcaggccgcggaaaatggtgtgcgttcgtgtcgaacgcccgcgcctgcccctgctgctggcggtccgcgtcaccctctgcagatgcagctccatcatgacgaaggcgatgccgtcatgcgagccctggaacacgtcgtcgatctcggccgagctgaagggcgtgacaagcttggcgcgccgcagccggtgcacgtcaccgccgcggacattctcttcgtgggtaatcccgccgatcgcctcgcacaccacgggagtgacgacggcgcgggccgcctggtggtagcgcctggcaacgtaggcggcgtgccctggcccgaataccagcgcactgaggccgagaaagatcgcccaagggtcgccgaccgcgaggcacagcccgccgagtacggggccgccgacccccgagaacagcgcccagccccgatagcggcgctgcttcgcgcgcagctcggcgagcttcggcgcgacacggtcgttcagcagctcgtcgagccgttctcgacgtgccgcgtccgcggcgcggcgctcccggtcagcctctgcatccgtcatcggatcattctgccgtgccaaaggacacggtgtcgagcatgcggtcagtcgcggcggatcaggctccagtagcgcgggtggcggccctcgcgcagcgccttcgcctcgtagcgcgtcgccggccagcccgccggccgggcatccgtgaccgcgacgatctcgaacaggcgctgctgcgcgaaggtctcggcgacccaagcctgataggtcggatcgtcggaggcgatgcgccactccccgcccggcgcgagcacgcgcgcgatctcgggcaacagcatcgggtggacgaagcggcggcgggcgtggcgcgccttcggccacgggtcggggaacatcaggaacagccgcgccagcgcccggtcgggcaggagccgcagcagggcgcg

SEQ ID NO: 652 - DNA, 23321 bp, synthetic construct
  source 1..23321: mol_type = other DNA
  misc_feature 1..23321: note = Synthetic
tcgaacgggcgcagcaccggcctgggcggctccgccggtgcggcacagccggcgaggacggcgccgatggcgacaacgagggtacggcgagatgcaggcatcggagagggatcgctcgttccgtttcaggccgagccgctgaccaccgccacatcgtcgcgggcgaagcggaagtcgacgttgcagaactcgcaggtaaccgtgatggtgccgtcctcggccatctcgtcgaggtcggccgcatcgaaccccgccagcacgcgaccgatgcgttcgcgcgaacagcggcagccgtaggagaggggtttgggggcctgcgcgcgcggctcgagttcgtgaaacaggcgccacagcaggcgttccgccggcaggctgtcgtccaggagctcctccagcgtgacggatcctgcgaacagcgccgcctgacgccacgcctcgtcatcctcttccggcgtacgccgccgcccctccccacccgcgaaggcgatgcgctcgcacagcagcgccgaagcacgccaacccgaagcggtgggggccgcggccagaaccaccgcggcttccagctgctggctgaccgagaaccaggtgagcgcgagatccgcgagcgtttcgccctcgagcggcacgatgccctggtagcggtccatcccaggcccctggtcgagggtgaaggcgagatgcccgctgccgagcaacgcggcggcggagggcagagggccgagcgccgccaccccgtcggccgccgcccgcgcatagccccgcaacgcgccctgccccgtgcagtcggcgagcagcatgtcgaccggacctgagccgcgcacctgcagcgagaacgagccctcgaacttcagcgccgccgcaagcccggccgtcaacgccagcgcctcgccgagcagccgtgccaccggctcggccagatcgtggcgcgtgagcagcgcatcggcgagcgggccgaggcgaacgagctggccgcgcacgggcgcgccctcgaggtagaacgggcggaccgccgacgggacggtcaggatgggcggcggcgtgcgcgcgcggggagaagggccggtgccgctcacggccgcgccgagagcggttcgaggcaccaggccagcacgccggcctgggcatgcaggcggttctccgcctcatcgagcacgaccgattgcgcgccgtcgagcacgccgtccgtcacctcctcgccgcgatgcgccggcaggcaatggaggaagatcgcgttcggcgcgtggctcatcagcgcctcgttcacctggtagggacgaaggagattgtggcgcgaggtgccgggtgcgtcgctcatgctgacccaggcatccgtcaccaccgcatccgccccgcgcaccgccgccacggggtcttcggtcagctcgatcgtcgccccctcgttgcgcgcccaggcgatcagctcggccggcgggcgaaggctctcaggggtcgcgaggcgaagcgtgaagccgaagcgggcggcagcgtggatccagctgcgcgcgacgttgttgccgtcgccgcaccaggcgacgacgcggcccgcgatcggccccttgtgctcctcgaaggtcatcacgtcggccatgatttggcacggatgcgactgatccgtcagcccgttgatcaccggcacggtggcggcggcggcgagttccgtaagcttggccgcgctgtccgtgcgcagcatgatcgcatcgacgtagcgcgacagcacgcgcgccgtatccgccaccgtctcgccgcggccgagctgcatctccttcgcgctgagcacgaccacgtcgccgcccaaccgacgcatggcgacctcgaagctgacgcgcgtgcgcgtcgagggcttctcgaagatcagcgcgagcgtgcgcccgaccagcgggcgggtggcggcaggcccttcgccgcgcttgaacgcggtgccgagctcgagaatgcgccggagcgtgccgcgatccagcgcagagacgtcgaggaagtggcgcggcgccgccgcggtggcggaggtcgcgagcggcgacggtcggagggcggaccgcggagccatggccttcatgcggccgccacgggctcgggcagggcggcgcgaagccgcgcgagcgcgcgatccagcagatcgaccgcctcgtcggcctccgcctcggtgatgatcagcggcggggcgagtctcagcacgttctggccggcggcgaccgtcagcaagccctcggcgagggcgcgcgcctgcaactccgtgttggtcgccggttcacgcagcttgagcccgaccagcaacccggcgccgcggacatcctcgatcaggtcgccgtgccgatccttgagcgcgaggagggagcgccagaggtggcgcgcgacgcggtcgacgcgcgcgaggaagcccggggcgaggatgatgtcgagtaccgcattgccggccgcgcaggcgagcgggttgccgccgaaggtggtgccgtggctgccgggcttgaggtgcttcgccacatgctccttggcgaggatggcgccgagcgggaagccgccgccgatgcccttggcggaggacatcacgtcgggctcgatgcccgcccattcgtgcgcccacagcctgcccgaacgccccatgccgatctgcacctcgtcgagtccgaggagcaggccgaactcgtcgcaggtggcgcgcaggtcgcgcaggaactgcagcgaggccgggcgcacgccgccctcgccctgcacgggctcgacgatgatgccggcggtggcgggggtgatggcgtcgcgcaccgcgttcatgttgccgaacggcacctggtcgaagccatccaccttcggcccgaacccctcgaggtatttcgggttgccggtggcggcgagcatggcgagggtgcgaccgtggaaggcgccctcgaaggtgatgatgcgccagcgctccggccgtccggtctcggccatcgtcttgcgcatcgccttgaccatgccctcgttcgcctccgcccccgagttgcagaagaacacgctgtcggcgaaggaggcctcgacatggcgggcggcgaggcgctcggcctcggggatgcggtagaggttggagacgtgcatcacccgcccggcctgctggcaaatcgcctgcaccaggtgcgggtgggcgtgacccaacgcgttggtggcgatgccggagccgaagtcgaggaagcatcgcccgtccgtcgaccacaggcgcgcgccctccccccgctcgaaggcgaggtcggcgcgggcgtaggtcggcatcaggggcgggatcacgggcggtccaccatcctcctctcggttcgccccgcagatcggcggggaagccgagactgtgggtcgggcgggggccgaagtcaaatgacgggcggatggaacggcatcgccacggatgcgggccccaccgctgcgggcgccgcattaaccggcggttgagaggcgcgtgcgaggttcaccgcgaacgcagagagcggggatcgaatcgcccatgaccacactcgaacggctccgcaacgccatcggctccggccaggccggcaccgcgccggtggccgcactcgggcaggccggcggcggaccggacggtggcgtcgcccgcttcctcgacgccgtggcgcgcggcgaattctgcgccgaacccccggctgggccgcatcgcgacgcctgcgcgcgcctcgccgccgcgctggcgcgggaggcggccgagaatgcagcggaaatcgtcgagaccgcgatcgtcgccaacgaggtgggcatcgtcgccgcccgcctcgtcacgccggcgaagagcgtgagcgagagcgcggccgcgatggcggcggccacccaggaaatggtggcgactgtcggcagcatcgaccagtccgcccgttccgccgcgcaggcggcggaggcggcggaagcctcgatgcgctcgagcgtggatcagacgcgcgccaccatcgaggcgatcgagcagctcgcgcgcctcgtgcagaggaacgccgccgaggtgcgcgaactgggcaaggcgtcggaggagatcggcggcatcgtcggggcgatcgagcggatcgcggcgcagacccggcttcttgccctgaacgcgaccatcgaggcggcgcgcgccggcgaggcggggcgcggcttcgcggtggtggcgaaggaggtgaagacgctggcgcagcagacggcgcaggcgacggaggacatccggcggcggatcgacgggctgctctcgcgcgttgtctccgtcgtcgagagcatgagtcgctgcgacgagcatgcgcgcgacgggcgggcgcggatggaacggctcggggcggaggtgcagggagcgggcgagcggatcgactccgcgacccgcagcatccgcgaaatcgcgatcgccgtctcacagcagtcgcaggcgacgaacgagatcgcggaaagcatcggcaaggtggcggcgatggcgcgtgagaccgccgcctcggttgaggacatggcggagtcgttcgaccggctggacaccacgatcggccggcagctgaagcgcgccgccgcggccgagttccccgagaaggtgatcattctcgccaaggccgaccacgtgatgtggaagcgtcgcctgatcgcgatggcggcgggacggctgaagctgaaagcggaggagctcgccgatcaccacgcgtgccgccttggcaaatggtactacggcgagggctcgaaggccttccggtgcgagcccgccttcatcgagctcgaggagccgcaccgccaggtgcacgagcacggcaaagcggccgcccgcctgttcggtgaaggccgaaccgatgaagccttggccgagatcgccaaggtggaggcggcctcggccgaggtgctgcggttgcttgaaaccttgcgccttcgcgcccccgccgtcgctcgggggggctgacgctgccaggcccaactttgggggcggggcctcgcgggcgttgcggtcccagacgggaagtcccgagaccgcgtcggagcatttcgggtctcgtggtccaggggtgggcccgcgtccccggcagcagggctgccgatctggcaaggtgaccgttgccccgtcagtgcatctcgggtgatcgacagtccgccggagccgaggaccggtcccctcgcgtcagggcaagcaagagcgtcaagacggcagcttgagcccccgtgcggcttgcggaggcgctcggccccctcgccgcccatctgcgtctcgcctatcgtcggcgcatgatcctctccggctcggccaggctcgccggcgtgttcggctggccggtggcgcattcgcgcagccctcgcctgcacggcttctggctcgaccgccaccgcatcgacggcgcctacgtcccacttcccgtccgccccgatcgcttcgcggatgcggtgcgcgccctgcgcgacctcggcttccgcggcggcaacgtcaccatcccgcacaaggaagccgccttcgccgtctgtgaccgcgtgacccgccgcgccgagcgcgccggggcggtcaacaccctcgtcttcgacgccgacggcacaatcgcgggcgacaacaccgacggctggggcttcctcgaatccctccgcaccgccatccccgccctcgacctcgccggccgcacggcggtcgtgctcggtgcgggcggcgcggcgcgcgccattgccgccgccctgctcgatgagggcgcgcaggtcgccctggtcaaccgcacgcccgaccgggccgccgcactggcccgcgccttgggcggcgcgatcgccgcgcacgcctgggacgcggtgcacgctctccttccggccgccgatcttctgatcaataccaccgccctcggcatgaagggcacgccctccccggtgctgccgctcgagcgcctgcccgatcacgcgatcgtcgccgacatcgtctacgtgccgaggcgcacggggctcctctgtgcggcggagcggcgcgggctctgcacggtgggcgggctcggcatgctgctgcaccaagcccggcccggcttcgccgcttggttcggcatcgaccccgtcgtcgatgccgaactcgaggccttcgtcgccgccgacatccccgagacggacgaagccgcgtgatcgtcatcgggctgacgggcggcatcggcatgggcaagtcgaccgcagccaaggtgttccgccgcctgcgcgtgccggtgcacgacgccgatgccgcggtgcatcgcctctacgcgaaaggcggggcgggggtggcggcggtcgcccgcctggtgccggaggcggtggtgggtggcgcggtgtcgcgcgacgtgctgcgccggcacgccctcgccgacccgtccctgctcgctcggctggaggcggcggtccacccgctggtgcggcgcgaggaggcacgcttcctcgcccgctgccggcgcgcccgtcgcccgttctgcgtgctcgacatcccgctgctgttcgaaaccggcgccgatgcccgggtcgatctcgtcgtcgtcgtcacggcgccgcccgcggtgcagagggcgcgcgtgctggcgcgcggcgggatgacggaaaaccggctccacgccatcctcgcccgccagatgccggattcggcgaggcgacggcgcgccgacgtggtggtgcgcacggggctgtcgcgccatcacgcccaggcgcggatccggcgcctggtggcgaagttgcgggcgggcgcgatgccgctgcggcggcggaggcgaaggcgaggatgagcgggcgcgaggttctgctggataccgaaacgaccgggctcgacccgctggccggccatcgcatcctcgagatctgctgcctcgagctgcgcaaccacgtgccgacggggcgggtgctgcatcggctgctcgatcccgggcgcgacgtcgacccggaagcggaacgcatccacggcttcactcgggcggcgctgatcggcaaacccgccttcgccgagatcgtggacgagctgctcgctttcctcgccgacgatccgatcgtggcgcacaacgcccctttcgacctcgccttcctcaacgccgagctcgcgcggctcgacctgccgccgatcgccgccgcccgcgcgatcgacaccgtgaagctcgcccgcgaacgcttcccggggcttcccgccagcctcgacgcgctctgtcgccgtttcggcatcgacacgtcgatgcgcaccacgcacaacgcgctgctcgactgccagctgctggccgaggtctatctccagctgcgcggcggacggcagcccgggctcggtcttgccgcgccgcccaggcttcgcctgcgcgccatgtccgccgcgccgagcgagcgccgcacgccgcgcccgatcgtgccgagcgcggcggaactcaccgcccaccgcgctttcgtcgccaccatcccgaacgcgctctgggcgcggctgatgcccgagctctacggcccgcaggcggaaggctgagcgggcgtcaacaccgctccgccggcacgggccccgtggcgaaggcgagaaggcaggcgccgaaacgctcggcgaagcgccagccctggcctgccccgtgcccctcgaagccctccggccgatcgatcagcagtacggcctcgagccggggcgccatccgctcgcgcacgatccgcgcccgcccctccgggtcgagcacgaacggatcgttcgcgaactggacgaaggcgagccgcgccgccggcgcatgcatccgcccggcgatggtgcggagctggtcggtctgcgcgagcaggttcagggatccaccctggccgtgcgcggccggcgcgatcgcgatcgcgacgtcggcaagcccgggccgatccagcacctgcagcgcgttccacccgccgcgcgactgtccgcccaccacgatgtggcggtagccgagggcccgcaggcgggcgagaccgtcgcgcaaccagccggcggcgcgctccgtctcgtcgctgttcgggtggcggtcgaagcggaacacgtcgtagccggcgagattgaaccgccgcacccacgtctgcggctgcagccctcgcgggtcggcatccgcgctgcggccgtggccgaacacgatggcgccacgcgcctcggccgggccacgccagagatagcgtgcatcgggcacgatctcccaccccatgccgccgatgccgatggcagccggcgcgtccttcggcggcgaccaggcccgggcggggtcgacgatggcgagatcgaccgcgagcagccgacacgccgctcccgcccgccgcccgcagttctgcagcgcctgctgcttggcctcctcgagggagcgatggttccaggccgccccgaaggcgccaccggggccgaccgcgaaggcccggtgcacgtcgaaggcgatgaagcgggcccacaacgcgcgcgcctccgccgagagccccggcgggccggcggggtcggcaatcggcggcgactgcccgcggaccgacccgccccaggcgcccaaagcgaccaccagggcgaccatcgccccggccttgtgccacgctgtcctcgctggcatggtcccggctcctcgcaacccacaccccgttccgatcatgcgcaaaccggtgaagaaagtcgtgctcgcctattcgggcgggctcgacacctccgtcatcctgaagtggctgcagacgacctacggggcggaggtggtcaccttcaccgccgacctcggccagggcgaggagctcggccccgcgcgcgacaaggcaaggctcctcggcatcagggaggagaacatcttcatcgaggacctgcgcgaggaattcgtacgcgacttcgtcttcccgatgttccgcgcgaacgcgctctacgagggggtgtatctgctcggcacctcgatcgcgcggccgctgatcgccaagcggcagatcgagatcgccgaagcggtcggggcggatgcggtggcgcacggggccaccggcaagggcaacgaccaggtgcgcttcgagctctcctactatgcgctgaagccggacgtgacggtgatcgcgccgtggcgggagtgggagctcagctcgcgcacggcgttgctcgatttcgccgagaagcaccagatccccatcagcaaggacaagcgcggcgaggcgcccttcagcgtggacgcgaacctgctgcactcctcctcggaagggaagatcctcgaggatccggcggtggagccggacgagatcgtctatcagcgcaccgtctcgccgatgagcgcgcccgatcgcgtcaccgagatcgcgatcgacttcgaacgcggcgatgcggtggcgctgaacggcgagcgcctctcgcccgccaccttgctcacgcgcctcaacgcgctcgggcgggagaacggcatcggccgggtcgatctcgtggagaatcgtttcgtcggcatgaagagccgcggcgtctacgagacgccgggcggcacgatcctgcacgtggcgcaccgggcgatggagagcatcacgctcgatcgcgaggtggcgcacctgaaggacagcctgatgccgcgctatgccgaactcgtctattacggtttctggttcgcccccgaacggcgcatgctgcaggcggcgatcgacgcgagccaggagcacgtcacggggcgggtgcggctcaagctctacaagggcaacgtgatcgtcgcggggcgcgagagcccgtacagcctctacgccacccgctacgtcaccttcgaggacgatcagggcgcctacgaccagaaggacgctgaagggttcatccgcctccaagcgctcaggctccggctcggcgcgatggcggggcggcgcggcggggcgctgtagcggcagcgcaacaggccgccgaaaacacgacccccgcgcgaggcgggggtcgacgggcccgatcgtccgcgggaggcccagcccgcaccaggtgtggacgttttgttttgcctgcggcaagcggccgagcgcgagcggggcgagggttgccttcgccgcgacggccggcgccacaccgggcatcgctacacatccattacactaacgcgtctcgaggccatgtccaagggaggcggcggtgcggacttcgtggggattcgatctcggtgtggcgtcagtcggcttcgccgtcgtgtgctgggacggctggcgaagccccgacggtgagggggagatcctcgccctcggcgtgcgcgccttcagcgagacgcgcgacgagaagagcaaggagccgctgaacgccgagcggcggcggaaacggctcatgcggcgtcaggtgcggcggcggcgctggcgtcgcgtgcatctgcgcgccctgctcgccgaagcggggctcctgccgggaaaggacgccacgccgccgcaggggcaagacccgtacgcgctgcgcgcccgtgggctcgccggcccgcttggcgccgaggaggcgggctgggcgatctttcaccttctcaagcgccgaggctttctcggcagccgcaaggtcggtccgccgacgacggagccgctggccgcgagggaaacgccaaaacgcggcaggcgccggaagacggaggagagcagttcccagtccgcctccgcgggcacacaggcccgtgacagcgacgagcgggaggcggaggagcggggcaaggccctcgccgcgcggctcgcaggtcgcccgcttgccgtctttctccaatcggacgagcacctgagaccgaaaggcgaggaaacccccgtgtgggacctcgctcgccgccgtggcgttgggcagacgcgcgacatggtgcgcgcggagttcgaggcattgtgggcggaacaggcgcgccatcatccagggctcttcacccccgcgctgaaggcgcggatcgaaacggtcgccctcgcccagcgccccaccttcttccgcgcccgctccttcggcgaggacgatctcgaacccggcgagccgcgtgccctgaaggcgcactggctggtgcagcgtttcgagacgctgcagctcgtcaactcgctgcggctcgaaggcggcaaccagcgccgcctcgacgccgaggaacgcgccaaggcgcttgactttctcgagcgcgtcgcgcggccgacctggaaaggactgcgcgatgccatcggcctctcccgcgccgagcggttcacccacgagcggggagcgaaggagacgctgcgcggcaacgccaccgaagccgcgctgcgcaccgcgctcggcgagacctgggatcgcctcgagcccggcttgcgcgatgcgatccgccgcgagatcgggccggcctggcatcgcatcgagtatcggccggtgaagggaggcggcatcctcgagatccgcgactggcagggcatcgcgcaggagagggcgaaactcgccgaacgcgcgcgggcggagtggggcctcgcgcacgaggaggcggagcgtctcgccgcgatctcgctccccgacggcacggcgcggcacagcctgaaggcgatcgaacgccttctccctcacctcgaggcgggcctgacctacatggaggcggtcgagcgggaatacggctcacgccgcgacgcgaccgccccccttcccgccctacccggccccaacgccggagagctgcacaggatcggcgacccggtggtgcgggaacggatgcgcgctctgctcgccggcatccgcaacccgaccgtgctgcgcaccctgggcgagttgcagaaggtggtgaacacgctccttcgcgtttacggcaggcccgacgtgatccggctcgaattcgcccgcgggctgaaggaagggccgaagcagcgcgacgagaccgaccgcgcccaggccgaccgggagcggctgcgcaagcaggcgcgcgaggaagtgcgcaagctcggcaggcccgccgaggggccggaaggggaggagaacgtcctgcgctggctcctctggcacgagcaaggcggggtttcgccctactcgggcgagccgatcggggcggcggaggcgttggatgccgccgccacccagatcgaccacatcttccccgtcagccgcagcttcgacgactcgcaggccaacaaggtgctggtgttggcgggggaaaacgccgcgaagggtcggcgtacgccccacgagtggctctcggccgacgcggaccgctggacccacctcacccaggtggtttggccgaggatggtggaggcgggctggccggaggcgaagcggcggcgctgcctgaaggcggcgctcgaggacccggaggccgacgcggagggcttcaccgcccgccagctcgtcgacaccgcctacattgcgcgcgccgccagggactatctcggtctcctgttcggcggcgggcaggccgggctgaatgcggtgcagccggtgtccggccgcgccacggcgctgctgcgccgtgcctggggcgtggggctcggcaagctgctcggcgggggcgacgagggcgacaaggtgcgcgacgacctgcgccaccatgcggtcgatgccctcgtcgtcgccctgacggaaccgcgcaccgtgcaggcgctgtcgcgctggtggcaggtgaaggagacggggcttcgtccgccgccgttcgacttcccctggcctggcttccgggaggaggcgaaggcgaaggtggcgtcgatcctggtcagccaccgcgtgcaggcgaagctttctggtccgctgcacgaggaaacccgcctcggcgacacgggcgagcgcgagccggacggatcggtgatctacgccaagcgcaagcccgtggcggagttgacggcgtcggagatcctcggtgggcgggacgtctggatcgccgatgccggcgtgcggcaggccatcctcgaccatctcgcccgccacggcgtggtgctggagaggaggaagcgcggggcggagaaggacgccaaggccgagcgcgagctcaaacgcctgctcgcgatggagatccggctgccgctgcgcgaggagacgaagcgtcgttgggccgaccatggcgtggcggcggaaacgggtccgatcatcaagcgcgtgcggctgaacctgcgccgcaaggacggggtgatgccggtgcacaggcacaagaatatccacgccgaactcggccccggcaccaacgaccacatcgccatctaccgggacggggagacggtgcgctttttggtcgcgaccaagcgcgaggcctatgagcgggtgcggcgcggcgagcccgcggttcttcccgttcaccccgagggtgggcggctcgtcatggcgctcaggcccggcgatgtgctgcggcgggaagttgatggggcgcaagccttcgttttggtccgaaagttcaatgcaaacgggcgcatcttctataaagtgctccattcttccaaagaacctagaccagaggtttcgtttggtccgagttgtgtgcgcgatggctggcgcaaggtcgcggtcgaccccatcggccgctggcggttcgccaaatgacgcgcaccgtcgtcgtctcctcccccgcccggctgtcgctccgtcatcgccagctcgtggtggctcgggccgacggctcctcgcccactgtgcctttggaggaccttgcccttcttctcgtcgaggagccgcaggcgacctacacccacgccctgctggcggcgctgatggaggcgaaggcggcgctcgtcgtctgcggggccgatcacatgccggccggcgtgcttctgccctaccaggccaatgcactggccggcgaacggcagcgcgcccagctcggctgcccccggccgctcgccaaacggctgtggcaggcgatcgtcgccgccaagctgcgtcgccaggccgacctgttgcgccgggcggcgggcagcgacctcggcttggccgccatggcgcggcgggtgcgctccggcgacccggaaaacctggaggcccaaggcgcacagcgctattggccggccctgttcggctccgggttccggcgcgaccgcaccggcgagggggcgaaccggcttctcaactacggctacgccgtgctgcgcgccgccaccgcccgcgccgtggtcgcggccgggctgctgccggccttgggcctcttccacgccaaccgcggcgacgccttcgccctcgcctccgacctgatggaaccctaccgcccgttcgtcgacggggtggtgtgggacctcgcgcaagcgggccgcgcggagggtgcgctcgatcgcgaggtgaaggcgcatctcctcggcgtgctcaacctcgcggtcggcatcgaaggcaaagccatgccgctcggcctggcactcgggcgaagtgccgcctcgcttgcggcgagtttcggtgcccgccgagtgctgctgcgcctgccggaaaacgcggagggcctgcctgccgccgacggcggagatgacggagggtccgatggcgacgctaccccgcccgaagcggcccccgctccttaacccaatcgcctggcgcaccgtgtgggtgttcgcgatgttcgacctgccggtggagacgcagaagcagcgccgcgactatgcccgcttccgcaaggacctgctggcggatgggttcaccatgatgcagttcagcatctacttccggcattgtgcgagcctcgattcggccgaggcgcacattcgcaagatgggcgcgcgggtgccgcccgagggcgaggttcggttcctggtggtgacggatgcgcaattcgcccgcattcgggtgttcgctggaaaacggcgcaggccgcccgagacgccgccggcgcagctcgagttcttctgagctgcgccggcgatttctcctgccctctcaacagcttggccggagggcagtgtagcgatgcccggtgcggccgcaaaccgcagccgaaatgttccatcatcgcgacaaataactagtgtagcgatgcccggtgcggccgcaaaccgcagcacaaagccccgcaccaagagcaagctccgcagtgtagcgatgcccggtgcggccgcaaaccgcagctgtcgccccacgggatgggcgcgccgcgccagtgtagcgatgcccggtgcggccgcaaaccgcagcctccagccgctccgccaacagcacgtccacagtgtagcgatgcccggtgcggccgcaaaccgcagcagacttccgagtggcacgctgcgcgcgcggagtgtagcgatgcccggtgcggccgcaaaccgcagctttcaggttgatcgagcgcgggccgaattcagtgtagcgatgcccggtgcggccgcaaaccgcagcatccccgagctggtgcgctacgtgcgtgacagtgtagcgatgcccggtgcggccgcaaaccgcagctccgcgcaacgtgccgtcggacagcatgaagtgtagcgatgcccggtgcggccgcaaaccgcagccagaacgggagtgttctttcgaaggaacgaagtgtagcgatgcccggtgcggccgcaaaccgcagcgcgtcgcctgcggcgatgcgggtcctccatagtgtagcgatgcccggtgcggccgcaaaccgcagcggcagatgacccctgggtcgacgcccggtgagtgtagcgatgcccggtgcggccgcaaaccgcagcgcgtcgcctgcggcgatgcgggtcctccatagtgtagcgatgcccggtgcggccgcaaaccgcagctggccgtggtcgctatcgcggtcgggcgcgagtgtagcgatgcccggtgcggccgcaaaccgcagcccgcccgaaccgtgcccgaggcagcgcgacagtgtagcgatgcccggtgcggccgcaaaccgcagcttccggagagattcacccggaattggtagcagtgtagcgatgcccggtgcggccgcaaaccgcagcccggggcaattggtggtccagaatggaacaagtgtagcgatgcccggtgcggccgcaaaccgcagctgcgggcatcggcgggcggcgcggggaaggagtgtagcgatgcccggtgcggccgcaaaccgcagctgatcgaggcggcggcactcgccgccttcgagtgtagcgatgcccggtgcggccgcaaaccgcagcgcctgtcggcgggggatcgtgccaccatcgagtgtagcgatgcccggtgcggccgcaaaccgcagcccaatcggggcatgcagtcatgaacgcggaagtgtagcgatgcccggtgcggccgcaaaccgcagccgcggccgccgcttcctgcgcctcgaggcaagtgtagcgatgcccggtgcggccgcaaaccgcagcgagagggatagaggtcgagcacccgcgccaagtgtagcgatgcccggtgcggccgcaaaccgcagctacgcggagcggcgccagctgatcggctgaagtgtagcgatgcccggtgcggccgcaaaccgcagccatcgcggcggtctcgttctctgccatcgtagtgtagcgatgcccggtgcggccgcaaaccgcagctcccaggcggggtcgccgctgcaaggggcaagtgtagcgatgcccggtgcggccgcaaaccgcagcttgttttgttcgatactcccagcccggcggagtgtagcgatgcccggtgcggccgcaaaccgcagctggcacgatgacaagcgagtgcagcatcaaagtgtagcgatgcccggtgcggccgcaaaccgcagctcggcggtcttgttttcgtctaatccccaaagtgtagcgatgcccggtgcggccgcaaaccgcagctggcacgatgacaagcgagtgcagcatcaaagtgtagcgatgcccggtgcggccgcaaaccgcagctactatcggactggcacgcaggggaggtcgagtgtagcgatgcccggtgcggccgcaaaccgcagccagatcaagtagcaaacgcgttcgcgatgaagtgtagcgatgcccggtgcggccgcaaaccgcagccaacgtggtggatcgccaatcttgatacgcagtgtagcgatgcccggtgcggccgcaaaccgcagccgaactcgaagatcgtgggcggccacatcaagtgtagcgatgcccggtgcggccgcaaaccgcagcgtgaaacgctgaaaggagtcatgacctatgagtgtagcgatgcccggtgcggccgcaaaccgcagcggcgcggcggcggatgaatacgttgctcgtagtgtagcgatgcccggtgcggccgcaaaccgcagcgcaccaaggcttccatcttttcggtgcgccagtgtagcgatgcccggtgcggccgcaaaccgcagcgcaagcgagggcggctgagatgccggtcggagtgtagcgatgcccggtgcggccgcaaaccgcagcgccccaggctcgggcgaacgcaccgaactgagtgtagcgatgcccggtgcggccgcaaaccgcagccgagaggatggtgagggcctccgccgcagcagtgtagcgatgcccggtgcggccgcaaaccgcagcgtggcagccgcagagcccttcgggcagcggagtgtagcgatgcccggtgcggccgcaaaccgcagcttggcgcagcgggcggcgcctcggcggcagagtgtagcgatgcccggtgcggccgcaaaccgcagctgggggtctcgacgaagtcgcgccagatccagtgtagcgatgcccggtgcggccgcaaaccgcagcaagcaacatctcatcccgatccgtcgcttgagtgtagcgatgcccggtgcggccgcaaaccgcagctcgtcggcccctgggcgcggcgcaagctcgagtgtagcgatgcccggtgcggccgcaaaccgcagctgcgcgcgctcggccgcctgcacgacgaggagtgtagcgatgcccggtgcggccgcaaaccgcagctgcgggcatcggcgggcggcgcggggaaggagtgtagcgatgcccggtgcggccgcaaaccgcagcggccggtccggcaggccgccggtgcggcccgccagcccggcagggcgctccgcgccccggcaaccacggcagccctacagccccttctccaacacctcgacgatctgccgcgtccagtacggcacatccgccgcgttggttcatgcccgccagcgcaacgacagcacgccgttctcgaacagcgggtgctcctcccacggcttgtaggccacgacgacgcgcttcaacccggcccgcagcgcatcacgccccatctcatcgcggtcaatcgccttcagcgcctcgatcaggggaaggaagtaaatcgcggtgaagaactccggttcggtgaactgctcgccctgaccgataagcggctcgaccaccacgttctcccagtcgatctccaccggaagctcgaacccggccacgcggtggatctcccgcagcaaccccggcagcacgcgctcctggtaggccgcgatgccgcgccgatccacgagccccaacctctgctgaccagcggccggcccgaccactgccagggacagaatgcgcaccatcatgccgcgtcgtgcaatcatcgcctcgctccttcccgccacgcctgtcaccgaacggcaacaaatcggcacggacgtggaatgaccgcacgaagcgaggcgcaggaccaaggggccacgtgtgcgcctgactcaaatcaaggccgacccgaagccgccgccgcagtgtggtggaatgagggaggacgatccgatgaacagcgccacccctgtcgccgcatccttggcgggccgcatcgccgaacgcgcgcgccacatcgtcgccaccgagcaggcggaaggccacgacggcacgctgatgccgcacgggcctgccgccaccgatcacagcttgcgcctgatccgggcgatgatcgcggcggcgaaatgcgatggcgcgctgacggaagccgaacgggaacgtctgctcgatcgcatcggctctgccgagttccaccccgacgtgatggactggatcgagcgcgaattccgcgcccccctcgacatcgaagcggtggtggagggctgctgcgagtcccgcctgcgcgcggtcgagctctacatcgcgagcctcgaggcgatcgatctcgcgcatgccgaggagcacgcctggctgcgtcgcctcgccggccggctcgggctcgagcgggcgctgatcgacgccatccacaccaagcacggcgccccgccgctcgactggggctgacctgccttcccctcagccccgcgagtcgtcgcggtcgcgacgctcaagcaaccgctcgagcttctccgcgagccgtctctgcccgatgccgatcgcgccgagcgcgaacagggtgagcgcggtgaccatgccggagccggcgtagagcagccgccccgggttccactccgggccgagaacgggggtcgccttcagcgcgagatcgaggcaagcgatcagggcaacgaccgcgatcacctgcagggtccgccagccgatcatgccgcggaccccaccgcgcccccccgtcgcgcgagcgcggcggcgagggtgttctcgagcagggaggcgatcgtcatcggccccaccccgcccggcacgggcgaaatccagcccgcgcgcggcaaagcctcggcgaaggcgacgtcgccgaccagccgcccctcgccggtccggttgatcccgacatcgatcaccgccgcccccggcgcgacccagtccccccgcacgagctccgcccgcccgaccgcggcgatcaggatctcggcccggcggcactcggtggcgaggtcacgggtgcggctgtgcgcgagggtgaccgttgcatcggcgagcgtgagcagggccgccatcggccggccgacgatggtggagcggccgagcacgagggcgcgcgccccggcgaccggcacgcccgcctcgcgcagcatggtcatcacgcccttcggcgtgcagggcacgagggcgggtttgccgatggcaaggcggcccgcgttcagcggatgaaacccgtcgacgtccttcgccgggtcgatcgcttcgatcacggcctggggcctgatctgcggcggcagggggagctggaccaggatcccgtccacacccgggtcgtcgttcaggcgccggacgacggagaggagggcggcttcggaggtgtcggcggagagggcgatggtctgctcgcggaagcctgcttcggcggcggcgcgcgtcttgttgcgcacgtagaggcggctggccggatcctcgccgacgatgaccacggccagcgagggcactacgccggcggcgcgggcctcctcgcgcacgcgggcccgcacccgcgcggcaagtgcccggccgtcgagcacgaccgcggtcatcgtgtgagggcctggaagcgcgcggccagggcggtcgggtcgcccgcaatgcgaaccagcttgtcgcgagcgctggcccctcgaacgacgcggcaggcggcggacggcacgccgaaggcgtcggcgagcaaggcgcagagggcggcattcgcccggccctcctcgggcggttcggtgacggcgacccgcagcgcgacactgccgtcgggcttcactgttcggccgaggacacccgccttgcgggcgcggggcgacacgcgcaccgggaagaaaaacgcatcgggcaaggtcaccgcagagccggaacgatggtggtggcgaggaagatgcgcaggaattgcaggagcaggatcaagacgagcggcgagaggtcgatcccccccaagttgggcaaaaagcggcggatcggcgccagcagcggctccgtcgcccgatgcaggaaatcgcccaccgtccagacgaaccggttgcgcgtatcgagaatgttgaaggcgagcagaatggagaacaccgccgcgatgatcagcagccagatcatcagctcgaggacggtgtcgatcagccagaacagggcatacatcgggtggagtccggcggttggcgggcgggcggaccctagcggcgggggctcggccgatgcaaggcatgccgggcggagggcatggcgtggcggcagacgaggcagacccgcggtgttcttgacttgttgttcgctccgcccaatacaccgaggctcggaggcggggctgtagctcagttgggagagcgcctcgttcgcaatgaggaggtcaggggttcgattcccctcagctccaccacccgcccaagccgcccttctttcacccggttggccacgggccttcccgcttccgccgcaatggacgaccgacgcctggaccggtgcagggacggcaacgcaacgcgccggcgcattgctcgacagcaccgcgcccggcgggcgtgagcgtcgggatcagccgagggcgcgctgcgccaccgcagcgagggcatcgccaaaggcgtcgaggaagaacccggcctcctcttcactgaggcagagcggagggcggatcttcaccgtctcgccgtaacgccctgccgccccgaccagcacaccgcgctcgcgcagcgcatccacgagtgcctccacccgggcgggcgcgtcgtcgcccgcgagttcgaccccgatgaacaggccggcgccacggacagcggcgatgagcggcgagcgttgcgccatggcgagcaggccggccttcagctggtggccgcggcgggcggcattggcgatcagcccctcctcctcgagcacgtcgagcacggcgttcccgaccgccgccgccaccggcgtcgcggcgaaggtgttgaaataccccgcccgctcgcacagggcggcgaggagttcgtgccgtgtggcgacggccgccatcgggtaaccgttgcccatcggcttgcccatggtcaccacgtccggcacgacgccgtggcgggcgaacccccacatcccctgccccgtccgcccgaagccaggctgcacctcatcggcgacgaacaacccaccatgccggcgaaccatcgccacggcaggagcgaggaagcccggcggatcgacatgcaccccgtccgaggagaagactgtgtcgcagatgaaggaggcgaggccgtagccggcttcctcgaggctccgcgcagcgagcgcgatcgcctgcgcgaagccggtggcgacatcatcgccggagtgcgcggccgacggcgcgggaacgagacgaacgaacggcggcggcccaccgcgcttccaggacgccggcgaaatctccgtcacggccgcagtgttcccgtgataggccgtctcggtgacgatgacgccctggcggccggttgcggcacgggcgatccgcagggcgagatcgttcgcctcgctgccggtgcagaccaggaccacgttctcgagggcggccggcagggtggccttgaggcgttccaggtagcgttccgtcgtttcgttcaggtatcggctgttgatcgcgatctcgcccgcctggcgcgcaagggcggccacgacccgcggatgggcgtgaccgagcgggaagacgttgttgtaggcgtcgaggaagcgccgaccatccgccgcctcgacccaggcaccgcggccgcgcaccagaaccagcgggtcgcggtagaacagcaccgtcgccgcccctgtgttggcgaggcggcgggcgagcagatcgtgcgcctcgccaccgcggaacgcgttcatctccaggatcgtcttcggccgcgcggtcattccccgacatcctcccgctcgacgcgctccctggcgaaggctccgtctcaccgccgctgcaggtagcgctccgccagcatcaccgtgcccgccgtgtagcgctcgagcccggcctcgcgcgccgtcggcgtctcggcgtggctcgcgatccaggcggtgagcaggatccgccgcagcatgacgaaatcttccagcatggcgcgatccgcagcctccagcggagcgacccgagcatagccctcgacccaggcctccatcagcgcgggcacgatcggatcgtgctcgaggaaactcaccgcggcggcgaaatcgtaggcgaaccagccgtagccgcagtcgtcgaagtcgatgacgccgatcctctcctcgtcgacgaggagattggccagccgcagatcggcatgaatgaggccgaaccgatcctcccccgtgccgtaggcggcaagtcgctcggccagccgggcgacggcacgggcgagtaccgcttcgccctcgcgctcaaggcccagggcagcgcgccaggggccccagtgcggcgattcgccgagcgtggtggcgaagtcccagcgcttgcgccgaaaccctgccggcggccgccaggcgcgggcgtgagcgtgcagccgggcgctgatttcgccgagggtgcggaacccatcgaccagcgcctcgtcggccgacggctcccgaccgggcaggaaggagaaggccgccagcgcccgcgtctcgccgccgtcggcgaccgcgatcacgcgttcgcccgcgcgcgtgcgcagcacctcgggcgtggtcacgatgcggtcgcgccgcaacgcctccagccaggcgagttcgccctcgatctcgtcgagcgtgtggtagcccgggcgatagacgcggatgatcacgggctggtcgcggtcggggtcgtcggcgcggaaggtcgcgttctccgacaccgtgatcaggctgacgcgcgt

SEQ ID NO: 653 - DNA, 6858 bp, synthetic construct
  source 1..6858: mol_type = other DNA
  misc_feature 1..6858: note = Synthetic
cagacaatctttattcttttcgacttgcaaagataaggaaaatagagggaaaatttgaatgcgatgggctattttttgggctatttttagttgtgttctttataccgtacagacgactttagccgtccactttatgagacggctaaagtcgtctgtacgggagattatttttctaatttttgtttaatttttaggactttttctaatgaaatattcagtatttccgatatttcttgtggacttatgtttctatttaataaatttttgacagatgtattggtttgttggatgaattgtagttggacttttccttttgcctccctttctttttctttagctttaattgctctttctttagcccgaattgcttcttccttttctttcattgaagtattgtacatgacggctttcacgatttgcctttcggcgtattcgcgttccataggtgccatcttgctgaggtcaagctccttgattgcttcttgaatccattcctccgaccaaaattcgggcggattgaaggtgtctgtttcttttaatgtatgtgttactttcataacgtatatcaatttatctaaattggttttgatgtcctcaacaggtttgttccatttgcccatttcaaacataatttgggtgatttcatcgcccattaattcgccatgttggttgcgtaactttcctatatgatgcagttctgacgaattgggatagacgatgccattcaaaaaggaaatcatatatattttcttgagtttgtcaaaataaaaatctcctttcttggtaatcaacccatagcgatttgccgcataaaaggtgctacgcttgataaacttcttgagttcatcaagctgcatatcaatgatgtagttttcaccattgccatctatacaactaagatcaaacacaccgcctcggttctcctttgtcagtcctgctatttcacttctgtcaaattctactttggctatcggtacttcggatttgatgagggcttgtatggatgtccgtaaaaaagtgtagtggtggtattgccaaaggtctttttgaaaccgtaatccgataatatcgaaataaagcgttttttgctcatgggtatcgtttggtttatgtatctgtaaatttacggttttttggtaaggtttacaagtaacttgttttttgggattaaattttaaggttttttgttgggtttttaattggaggggaatgttggcggagtaaagaaatatattgcataagtagtgggacaaaaataggcttacaattttgacatgattattttttcgatattttttcttacaaaaaccgcacatagcctacgctacgtaaggatttttataggtaaaaatagcggaaaaagaaaccgtcaaaaagtaaggatatttttgtcccactacttaaacaaccttaaacctctactttttgaaagcccaaatttggtaaattaagaaagtaagaaaagttattttttataggttaattatctccgataaataaaattaatattttatatttacgggttcataaaaacgaagcagttcagttttttgcaaaaaaaaagacaagccgaaacctgtcttaatgttttcacaacagaataatctttattgtgattagcttaaaattgtactgcaaatatatttctttaaaacgacaaaaccaaattatcatgaaaaaaatccttggattagacctcggcgtagcttctattggctgggcctacctcgaagaaaacaacgaaaaatcacgtattgtgcgtgcaggtgtacgtatcgtacccgtagccgaccaggaagacgacttcagagctggtagatccgtttctatcaatgccgaccgtacacgctatcgcggtatgcggcgaaacaaccaacgttggaaaggaaggcgcgataaaattgtgacgcttcttgaatcaatcgacatgtacgatgaagccttgattaatttgcacaaaaccgatttgtacgccttgcgagctcgtgctgttgacgaaaaaattactttgtcggaacttgggcgagttattttgcatttgacccaaaaacgtggttacaaaagcaatcgaaaaacggatgcttcgcctgatgagacaacggaatacttggataaaatcaaggaaaacagcgaggcactcgaaactaaaggacaaactatcggacagtatttccatgaaaaatttaaaactgagccacatacgaaagtcagacagcagattttttaccgccataattatcaagatgaatttgagcaaatatggacgcgacaacacaaagaatatcccgatattctgacggatgaattgaaacatgaaatcggtacgcgaactttgttttatcagcgtccgctcaaatcgcaaaagggtttggtgtcgcgttgtcaatttgaacaaaatatgcgtgtcgccccaaagagttcgccttattttcaagccttccgtatttggcaaaatattaatcatctcaaaattacggatgatgaaacgcgaaagtttgacctcacgctaaaggacaaacaaaaattgttcgcttttttgaataaaaaagacagctcaaaaaaatcgggcattctgaaagaattgggttattcttccaaaaaatttgaccttaattttgatgaagttcaaggcaatcgcaccaagagtcgtttgctcaaaatctttaaggacaatgacattcaagatacaagcattcttgattttgacgctcttgctaaagatcccgaaaaccaagccgcttaccgcctttggcatctcttatactctatcgaagaacccgaacatttgtataaggctttggtagaaaaatttggttttacacgcgaacaggcaatagccgtaagcaagtgcaaacttgaaaaagactacggaaaccttagcgcgaaagcgattaaaaagatattgccacatttgatgaatggcgacaagtatagcgatgcgtgtggacgtgtgggatacaaacattctgactccatgactaatgaagaaaacgaaaatcgcagactcgcggaatatatcgaactcatcaaacgcggtgatttacgcaatcctgtagtcgaaaaaatattgaatcaacttgtacaccttgtcaatgaaatcatagcagatgaagaactcggcaaacccgacgaaatccgcgtagaactcgcccgtgaattgaaaatgaacgctaaaaaacgacaacaagtcaacaagtcctatggtgagcggaaaaaagcaaatgacaagattaaagcattacttcaagctccccctttcaatttcaaaaatgtaagcagaaatgcgcttgaccgttacaaattgtgggaagaaactggcgggatttccgtttataccggagagcctatcaaacttgcccatttatacgataaaagcctttatgacatagaacacatcattccgaaggcaagattattcgacgattcattcctaaataaaactatctgcgaatcaagtattaacaaagataaagatgcttctacggcgcacgattacatggaaaagaagggcgaaaaagcctatcaatcctacgtacagcgtgtcaaacaaatcaaaagcaagcccaagcgcgaacgcttgatgatggcagagaaagacatccccgaaggttttattgaacgacaaaaaaaggacagtcagtacattgctcgtactgctatgaaaatgctcgaaaccgtttgtcgaaaagtaaatagtacaactggttcggtgacggatgtgctgcgtcatcagtggggattgacggatatgatgaaggaattgaattttgaaaaatacaaaaaacaagagcgtatcatctggcgtgagcgtccgtcgggtgagcgatattttgtgattgaagattggtcgaaacgagatgaccatcgacaccacgcaatggatgctatcgtagtggcttgtacgaaacaaggttatatccaacaacttaataatctcaataaaacattcgtcaacgataagactcaacgtgtcttacgcacgagttcgcgcaagttcgcgctcccgtggacgaacttccgtcaagacgctcgtaaagccctctccgatgctttgatttcatttaaatctaaacagcgtgtagcaaccaaaaataaaaataaaatcaagcatagggacaaaaaccgcgagccacaagcggtactcactccgcgcggatttctgcacaaagaaaccgtttacggaaaaatgaaacgctacgccgaaaatagagtagcactcaatggcaggttttcattagagacaatagaaaacattgcacatccgattgaaaaacaagccgtcattcaacgccttgcagcgttcgataatgacccgaaaaaagcatttaaaggattggataaaaacccgataatcgtagaaggcaagcgcaagccgcttacacaggttgttgtttgggaaaccatttataccataaaaaaaacactcaatatgctcaataaaaagcaaattgaaaaagacatccttgatgtacgtatcagtcgattggtcaatgaacgcctcgccgaacatggtggcgacctcaaaaaaatggttgcttcgctcgaagaacagccgatttgggtcaatgaagcacaaaaaatctgtgtaaaatccgtcaaacttaaaacagatttgaaagacctcaaacccctacacgaaaacgaacaaggcaaaccgattgacttcgtgaatctccgtaataaccatcattttgcggtctatgaagacgaaaaaggtaaatttcagtttgaaaaagtctcgttttgggaagcctttgagcgtaagaaaaatggtttttcggtcataaaaactcaacacgaaaaaggttggcgatttgtcgtctcattggctattaatgaaatgattgttttcccgaagggaaatgaagaaatagatgaaaattttatactgaatcctgataattatgctgttgtgagtgagcatttgtatagggtgcagaagttatcgtcaactgctaaaggtgctccgaatttatcatttagacatcatttggctactacactaaaagacgacaatcagctcattcatgttcagagtctcggacggttgtacaacatctacaaagtcagcatcaaccgacttggcatgattactgatgtacaaaaaatagcacccgccaaaaaataatatttggcataaacatacggtcaggtagcactgaaactacctgaccgcttttttacaaaacagtattcgccccacacacgaatacccaaacgacgagacccaatatggtaaagagaaccctttacttcggtagccctgcccgattgaatatccatttggaccaattggtcatcaaaaaacccgaccaagcgagcttcaaacacaccgtcccggtagaagacatcggtatcgtgctgctcgacaatccgcaaatcagtatcacccattcggtgatgcagcaattgctaaaaaacaatgtggcatttatcacctgcgacgaaaaacacctgcctacgggcttgctgctgctgctcaacgggcatacgaagcaaagccaacattttcgccatcaagtgagtgcttccgaacccctcaaaaagcagctctggcaacaaaccattgtctctaaaatcgacaatcaaagccgccaccttgcacggcttggcattccgaaccaccaattcgcgcccctcgtgcgtaaggtgcaaagtggcgacacgaccaatgtggaaggacatgccgcgaagctctactggcagttgctttttcaagattttactcgcgaacgttttggcgattaccccaacaatcttctcaattatggctacgccatcttacgtgctatcgtggcgcgtgcgctgacggcttcgggcttgctgcctacgctcggcattcatcatcgcaatcaatacaattcttattgcctcgccgatgacatcatggagccttaccgcccttatgtcgatgcgctcgtggtgcaaatcatggaagaacacggcgaacctgtcgaagacctcacgcaggatatgaaggcgcaattgctcgaaatcgctaccgtagacaccgtcatacaaggcaggcgcggaccgctaatggcgaatgtaactcgcacgacggcttcgctgcatcagtgctttgccggagaacgccgaaaaattctctttcctgaattttaaccgtacaggcgacttcagtcgccatgtgtagctatgacatggcgactgaagtcgcctgtacgagctacgtaatcattcaattttatgaataattctaaccgtttaaatcaataccgtattatgtggataattgtcttatttgacctaccgaccaatacaccaaaagaacgcaaagctgccaacggatttcgtaaaaagctgctcaaagatggctttacgatgttccaattttcggtgtatatgcgccactgcccaagccgtgaaaacacaaaggtgcatatagaccgcgccaaacaaaatctgccgccttatggcaaagttgcctttatgatgtttaccgaccggcaatttggcatgatggaagtttttcatgccacaaaaaaaaccgatacgccgcgcggaccgcagcagttggaaatgttttgacctattttcggcatgatatatcgtagggacagggcatgccctgtccctacgatatgcagatatatgaatatgaaaaaaggcttaccaattttaaaaaaattggtaagcctttgtgtttttctcattccgaaacgtagcgtttgtgttacgttagaaatgaaaaattggtcatcgcatatatgcgtaggtacaaaaactggtcattttctaaatcctaacaagttcgctaagttgctgattaataattcgttacaaggctgacaatgtttatgaccaatgtaaagatacaatttgaaagctaatcacaac

SEQ ID NO: 654 - DNA, 4273 bp, synthetic construct
  misc_feature 1..4273: note = Synthetic
  source 1..4273: mol_type = other DNA
cagacaatctttattcttttcgacttgcaaagataaggaaaatagagggaaaatttgaatgcgatgggctattttttaggggatttttgagtgggtttttgtcgggattttaattggaggggaatgttggcggagtaaagaaatatattgcataaacaaccttaaacctctactttttgaaagcccaaatttggtaaattaagaaagtaagaaaagttattttttataggttaattatctccgataaataaaattaatattttatatttacgggttaataaaaacggagcagttcagttttttgcaaaaaaaagacaagccgaaacctgtcttaatgttttcacaacagaataatctttattgtgattagcttaaaattgtactgcaaatatatttctttaaaacgacaaaaccaaattatcatgaaaaaaattcttggattagacctcggcgtagcttctattggctgggcctacctcgaagaaaacaacgaaaaatcacgtattgtgcgtgcaggtgtacgtatcgtacccgtagccgaccaggaagacgacttcagagctggtaggtccgtttctatcaatgccgaccgtacacgctatcgcggtatgcggcgaaacaaccaacgttggaaaggaaggcgcgataaaattgtgacgcttcttgaatcaatcgacatgtacgatgaagccttgattaatttgcacaaaaccgatttgtacgccttgcgagctcgtgctgttgacgaaaaaattactttgtcggaacttgggcgagttattttgcatttgacccaaaaacgtggttacaaaagcaatcgaaaaacggatgcttcgcctgatgagacaacggaatacttggataaaatcaaggaaaacagcgaggcactcgaaactaaaggacaaactatcgggcagtatttccatgaaaaatttaaaactgagccacatacgaaagtcagacagcagattttttaccgccataattatcaagatgaatttgagcaaatatggacgcgacaacacaaagaatatcccgatattctgacggatgaattgaaacacgaaatcggtacgcgaactttgttttatcagcgtccgctcaaatcgcaaaagggtttggtgtcgcgttgtcaatttgaacaaaatatgcgtgtcgccccaaagagttcgccttattttcaagccttccgtatttggcagaatattaatcacctcgaaattacggacgatgaaacccgaaagtttgacctcacgctaaaggacaaacaaaaattgttcgcttttttgaataaaaaagacggctcaaaaaaatcgggtattttgaaagaattgggttattcttccaaaaaatttgaccttaattttgatgaagttcaaggcaaccgcaccaagagtcgtttgctcaaaatctttaaggacaatgacattcaagatacaagcattcttgattttgacgctcttgctaaagaccccgaaaaccaagccgcttaccgcctttggcatctcttatactctatcgaagaacccgaacatttgtataaggctttggtagaaaaatttggttttacacgcgaacaggcaatagccgtaagcaagtgcaaacttgaaaaagactacggaaaccttagcgcgaaagcgattaaaaagatattgccacatttgatgaatggcgacaagtatagcgatgcgtgtggacgtgtgggatacaaacattctgactcgatgactaatgaagaaaacgaaaatcgcagactcgcggaatatatcgaactcatcaaacgcggtgatttacgcaatcctgtagtcgaaaaaatattgaatcaacttgtacaccttgtcaatgaaatcatagcagatgaagaactcggcaaacccgacgaaatccgcgtagaactcgcccgtgaattgaaaatgaacgctaaaaaacgacaacaagtcaacaagtcctatggtgagcggaaaaaagcaaatgacaagattaaagcattacttcaagctccccctttcaatttcaaaaatgtaagcagaaatgcgcttgaccgttacaaattgtgggaagaaactggcgggatttccgtttataccggagagcctatcaaacttgcccatttatacgataaaagcctttatgacatagaacacatcattccgaaggcaagattattcgacgattcattcctaaataaaactatttgcgaatcaagtattaacaaagataaagatgcttccacggcgcacgattacatggaaaagaagggcgaaaaagcctatcaatcctacgtacagcgtgtcaaacaaatcaaaagcaagcccaagcgcgaacgcttgatgatggcagagaaagacatccccgaaggttttattgaacgacaaaaaaaggacagtcagtacattgctcgtactgctatgaaaatgctcgaaaccgtttgtcgaaaagtaaatagtacaactggttcggtgacggatgtgctgcgtcatcagtggggattgacggatatgatgaaggaattgaattttgaaaaatacaaaaaacaagagcgtatcatctggcgtgagcgtccgtcgggtgagcgatattttgtgattgaagattggtcgaaacgagatgaccatcgacaccacgcaatggatgctatcgtagtggcttgtacgaaacaaggttatatccaacaacttaataatctcaataaaacattcgtcaacgataagactcaacgtgtcttacgcacgagttcgcgcaagttcgcgctcccgtggacgagcttccgtcaagacgctcgtaaagccctctccgatgctttgatttcatttaaatctaaacagcgtgtagcaaaatgtttatgaccaatgtaaagatacaatttgaaagctaatcacaacaccaatagacgcagctccattatatgagaaaatgtttatgaccaatgtaaagatacaatttgaaagctaatcacaacacttgaatggtgaatcgtccgacaatatgaatgtttatgaccaatgtaaagatacaatttgaaagctaatcacaacatcatcataacaatatccctactattcgcaaatgtttatgaccaatgtaaagatacaatttgaaagctaatcacaacctaacacggttgggtttgattttcaagaagaatgtttatgaccaatgtaaagatacaatttgaaagctaatcacaacctattttcagttgcttgttccagggcttcaaatgtttatgaccaatgtaaagatacaatttgaaagctaatcacaacatgatataatcgttccaaaaaccaacaataaatgtttatgaccaatgtaaagatacaatttgaaagctaatcacaactagcctgtggaatgttatactattcgcttgaatgtttatgaccaatgtaaagatacaatttgaaagctaatcacaacatgaatcgttggtaaactcacaattatcgtaatgtttatgaccaatgtaaagatacaatttgaaagctaatcacaaccatcgtagaatgatgaataatacctatataaatgtttataaccaatgtaaagatacaatttgaaagctaatcacaacaagccgttggttgattcgttccgtcgattgaatgtttatgaccaatgtaaagatacaatttgaaagctaatcacaacgtatgggttacgagtgttataaggaattgaaatgtttatgaccaatgtaaagatacaatttgaaagctaatcacaacaactcagcggtatttaattcctttatgaaaaatgtttatgaccaatgtaaagatacaatttgaaagctaatcacaacggcctccatggcccatgtctttctccccaaatgtttatgaccaatgtaaagatacaatttgaaagctaatcacaacgtatctcgcgtatccaatagctgtgcgcccaatgtttatgaccaatgtaaagatacaatttgaaagctaatcacaactatgcaccatacacaggtgtggcccaacaaaaatgtttatgaccaatgtaaagatacaatttgaaagctaatcacaacggcttctactcgcgtagcctttaaatgcctaatgtttatgaccaatgtaaagatacaatttgaaagctaatcacaaccacgcgctacgtgtcggtcaagctttcacaagttctaatttagccacagcttcctcatgcgccttatcatatcgttgctgcatattcaaccaagaacgggctgaaatattgagatgtttttcgagttcttcggcgaggttgcgactcatggtgctttctt

SEQ ID NO: 655 - DNA, 23189 bp, synthetic construct
  source 1..23189: mol_type = other DNA
  misc_feature 1..23189: note = Synthetic
cgaagcctgcataaagcgccaaaagaataaccacagtcagctcccaggtatgatacaatgtttttttataataacttataaatcctgcgccatacccatactgctctagtttctgtttggactctttaaaatctgccattgattgtcccttgagcaattctgtcacgatatcaatagaaagctttccctcattttgctgttccagcattacatatagaattttcaccttctcttcatagctgcgccattcaaaatacatcagaaccccagccgtcaaaacgacgacggccaatccaacaattgcagccgtataattccttttcataggctcctccctgctgttacatatccgaagttttgcgcagaatatatcccatccctctgacatttttgatatactgcggccttgcagggtcttcctcaatcttttctcgcagacggcgaatcatcactgcgatggtattttcttctacacagtctccctctgcatcaaacagttgttctatgatctgatttttagataaaatttgattggggtgatccaaaaaaaccacccatacccgccattctgttttggtaaaaaatatttcttctgtttccttccatgctcgcatttcatcacgattcacccgaatcctaccaaacattatttcgctgctgaatgatttttgggcacgcccaaaatatgcctgaacctttaatgtcagcaccgacaaggaaaaaggctttgccatatagtcatctgctccggcaccatatcccatcacaaaatccatttcactgtccaatgcagtcaggcaaagaatgtaactgttattatgcgcctgccgcacatcttttataaaatccaatccatttccatctggcaaagtcaaatcacaaatatacatctgcggctgatgcttttttagcacttgccttgcttcctcaatactgacacatgcatatacctgataacctgccttttccagcgtaaaacatattcctcgatttacactttgttcgtcttccaataacaatatctcattcatactctattgccaaattgttttattttaaaatacttgcattatttacaatggatactccatacaagaataaaatatcagcgtctgcaaagtcaacatactcccctagcaaagacgaactgatgtaccgcaagtccaccagtacaatctcactgtatgcctccaaaaacaacgggactaggctgctggtataagaatctctgaaaataatcagtttcttgtcagaagcggcatttgggcttttgattctctgcagtgatgccgccccgcccacatacgcatcatacttatcaagacgcagggttccttcaggcacatctaactgatagatcggttctaatagagctccctcctcctctggcagaatcacagtcccattccgcatatttttctccagattccacacagacgctgcatgtatggtttcattcgtcaaataagaaatcgtatctggagccatcggaagcgccgcctggccataatacactccgtaaaaatcattgattttattgatttcaaaattgttttcctgcaaattcagatattccttaacgcccaaggcatctgcaatacaggcggctgtatcaaaaagattttcttgtttccaatgcgtatctgtatgataataatcatcaatctccaaactcgaaaaaatatcgatatattgaaattctccatcttgtttaccaagttcttcatgcaggctgctcaccatcaaattataatctatcgaaggataaccattcaccgcggcaagaaaataattcttatctggtatcatggcataccaggtattttgtcccgcaaaatactgctgtttcagcgtagtcattttctgcgccaaacgcttgatagatgcttcatttaacggatactcaagttttgatgcatgcccattgacaacataaattccattgttttccttctgcctcaaaacatcatatgcaaaatatgctttgatacgtcttaatttctcccgaaacggaaagtggtccaacaagtacgcttctgtatcctccataaaggatttatcaagcaaactttctattgtaagcactggtcttgcggcaagttttctgcgttctgactccgaaactgtttttttgggataaagcataatcattatcataatgcctaacataaaaaggacaaaactataaatggtaatttcctgtttccatcttttatttttcattgtcttgtgtcacctcccgctctgattttcagcaatcttaaaatcgaaaatatagaaatggattaaacgatccatctatcaggtatgctgtacacagaatcaaaagtactactgcaaatccccctctaaaaagatgcagtgcaattgctccaagtttatgtcctctaagcatattttgaatcttttcccacagcagcagtggaataggcgtcgaaccaataacgcctatgcataagatacccatactatttcgcagcaaataactgcaagtcattcgctgcatggcatctgcttgtgctgcgatatggctgccgcagtttgcaagtgcctggatatcagaaaccatctctggtattttctcatcatgaaataccaaaaaacttacaagaactacaagaactacatagatatgctgcaaaatttttatcaaaaactgcatagaatgattcttttttccgataaacagccttctgcaagctttttctgccaccagaagcactgcaaacataagcccccacaatataaagttccagcctgctccatgccacaaaccagtaaaaagccacaccacaaaaatattgataatccaccgaaacagacgcactcgatttccgcccatcgggatataaacataatcgcgaaaccatgctcctaatgtgatatgccatcttctccagaattcactgacactctttgatataaaaggatatttgaaattttcaggaaaatgaaaaccaaaaatgcttcccaaacctattgccatatcggaatatcccgaaaaatcaaaataaatctgcaaggacactgcaagcgcatacgcccaagaaagcgcaagcccccgcacttctagttctgctacttttgagacaaactccccaatcacatttgcaatcagtacttttttgcccaaaccaaccgcaaaacgaacaacacccttttcaaatttcacatagatgtccgaaaaactgcttccatttaccaatgtttgttcgatctcactgtatcgaacaatcggtcctgccacaagctgcggaaataatgtcacatatgccgcatatgtaacaaaatttttctgccttttgacccgtttgtggtatacatcaatacaatagctggcaatctggaaggtgtagaatgatatccctattggaagcagaattgttttggttttgatgccaaacagtgtttccataaaaaagctgaaatacttaaaataaaacaatgcagcaaatggaaaaagaacagacagaatataaaatatcctgcctgctctgttttctcggaaattgtccataagccaaacaagcagaaaagacgctgttatctgtgcaatcatcaaaagcacatagataggttctccccacgcataaaagatgatggacattataagcagcacaaaatttctgcctttttgcggagcaaaaaaatacaaaaagattgtcagtggcagaaaaaaatataagaagataatactggaaaaaagcatcacattttctccttatccgcttttagataggatttgacttttcaagcgtgtcagaaaccttcatatctctcttttttgctgcctctatagcttgttctatcactgcgtctgcggtgtctgtaaatcccattacaaaaaagacatcatttccaaggatgacagcactttgcttttctgcggtaacacaaacccattttgctggattaacactgtccataagctgctgtctgattgtttctgcatccacttcatcatttgttcggatgtatatggcactgtatgcggtggaagtaatcatagattctgacaaataaatccccgctatgccatcaggtgctacaagacccgtatgatactctaccatatcattttgactcagatcaagttctgtcgttgtgacgttcatagggagcagatcctgccctactcccccataaacttcatccatgaactgcgttacatcttctgcactctcaagatgcaccattccagccgggtctgctgcttcctctgtcgaaacttcatctgcgtttctgtcactggtgtttccacagcctgccagcatcgccatagaaagcgctaatgttacaacgataattccaaatttgtttccaattgtttttttcttcataagagattcttcctttctttcctatgacatattaatcgtccgtgtcagagcagtatactgtgacaaaacatatcgcaaattacaagttaccgactacgttccatgctttaagctctggcacgaattaccgactgtcaaaaccagctttcgagctgatttttcaatctattattatttcaaaaactaaacttaatatacatacacgttaccattttgctcctcaaaataacatatattttgatagcgctactgtgttattagcgtaggttccataaatacctcacagtaccgttccgcccgctcccatatcacgacatctggtttgtacttatcatacatactgtactggaaatctctcgcatcttcccagtaaacctctttgtaatatcccttgcagatccatgacaaaaaccctccgaaggaatctccaacatacaaaagtgtctggtcatggtattgtgccttatctgctgaatccagttcaaatacataatacttgtcaatattgtactttccagtcaatcctgccatcattaccaaatcgcccgaaaacgcaggatcatctatccgaaattcaacagaatcaatatctgcatgtgtattataaaccgtccggaaaaattcctgcatattcacaaaagcgccaatctgattgctgtgtgaatctgtgctaaaataaagctgtgccttttgcttattttccatcaatgcatctttgggataaacgaatacaaggtctgtattttcttctatatactgtgcaagttgttcgccccgcgatacctcattgactcttgcaatcgtatccggcatattttctgcatagataatctctttgttgggaatacacatggtatagaattcaatatttcttgccgccagatgctctcttgtcgccgcgagatttgccgcaatcgccgccatctcctcctgcgtaaaatgattgatgcccatatagtcccaaatcggatgtccgtccagctccgtcttgtagaaaaacatattattttttcccatgagcgtctgcgtggactcaatataagtccctccggtgagcagcgaagtcagctctgtattaaagccgatcagcttcgtccgcccaaataaagagtccgtaaattgattgactgccttctgtagtctgacaaatccagtctccttcgacacagtaccctgccccgtctcgtcctttgtgtttgtctgtgccccattggccaaggttccgttttgctctaggactgcctgttcctcgtccgtcagcgcactctcctgctggcttggcagcagcgtgcgcaccacagtcacaagcggtatcaccagtataaaaatgagaaaagcaatcgtaatccatctgtccctgttcttcatttcatctcctgtcctttccaacctttccaaatcagatataaaatcaaaaacttctcatttaacctatattgaaagatgagatttctgtcaagtgcaattttttttgttatatcgataaattttgttttaggatgttttattcatgaaaatattttttgatatatcggtggagtgtactccagctgcagtcgaattggcgggcaatttcggcctttgacagtttttgtgccagcatttgctcaatttgcagatgatattttgccagtttttgatagttaaatccataagggcgtcccaaatgatatccttctgatttcaggcgtttcagtgattctctggttctttgcgaaatcaactgacgttcaatttctccggaaagagaaaaggcaaaggcaagaactttcgattgaatatcggctcccagacggtagttttcttttaacgtccatatctgacactctttttccaaacatttttgtaaaatgcccataacttccagcatattgcgccccagtcttgatatctcggtagcaatgatgatatcgcctgcttttattttctgcaaaagtttgcttaatttgcgttgtttaagttccttgcgggatgaaatcgtttcgataatccatgtgttgatttcgagctgtttctgttttgaaaattctttgatttcgtgatgttgatttttgacgttttgacgatcggtcgaaacgcgtacatatccgtatatcatggtctgttcctcgttaaaaatttttatcggaggtgaccatatcatttaaaccaccgtttatttgctttacttaaaagtattagcataaattttatctaatatcaatatttttttaaatttctttagtttctgccccgcggcaaacatcataacgcatcttctcttttctggtttttcttccgccataaacggtggtttatggctggctccgcaacatcaggaaaggaaaatcaaaatgacgaaattacgcaattcaactaaagaaaatcccatttctcaggaagaagcattggagtttatgaccaaaaatccggaagcggtttttgaagttgaaaaaataggtattgcagttgaactgaccaaagctctcggcggcgaagaagttcgtaccgttgttctggcgcgtgacggtcggacggttgaagaaaccacaaacgttgccggcgaaggctttgcaattgacagccgtcgctgcatcaacggcggtaaggatcaatatgccaaaaagccggccaaagcaggtccaaacaattatacggttgacgacggtcgtacctttgaggaattgaagcccggggaaacagccaaagctcacaccgtcggcggtgaagtccgcaaagcgattgctgctcaggaagatatgtatctgagtaccagttggggagaagttcagtttgtggccaaaggcggtttggtaacttttatgggtgatgaggcaatcggcaacaacaacccgtgtgatctggtgctgcgcgaaggcgacaaaaaagcctccatggtgctgacggcgcccggctacaacatccgcaaaaattatgaggccgttttcggcaaaaagcctgagggtgccgttgatgaatttttgcaaattgctgtcggagaagatcgcaagaatccgtacattcaacgcggcatgtcgaacaatttccaacgctaagccatagctctgctaacttttgacggaaaggactgccgatgtctaatgagtattttgttgattatccggaattgctcaatctgaatattgactacgcaaaggatgtttccttggcaattgacagagttggagaacgtttcgttccggtcatgtcttatcgcggacaggatcggcgggcaggtgaaaatatcatccgcaatatcgaaaagatgatttccatccgacccgatgaaaacaacggtttgcggttgtttatcggtcaggagcagtttgcacgttttgtcgaagacaagtaagccggagagatccgtctggataccgaagcgccgcaaaaacatttgacatcttttgaaatgcggatgctggcgcgacgggaacagcaaacgatcttttcgcgtgacgaaatcagcggtcttgctcacagtacggatctgcatactcattttgccggttgtctttcgccggaagatttaatcgaagccgggttggagcataacatatccatcccggcagatctgctgaaaaaagcgggcattgatttgtccccttacaagacagacggtcataacaacgttttgttaaacgatttggcagccaaccgcgcggatattgaaaaatatgcgatggccatgcgtattccgcttgaacagcaggagacgtttaatacaatggaagaaatttacgtcatgcgcgggccttttaccaaaaacgcggagatgtttccgactctcctgcgcagagtcgcgacttctcatgcggctgccggcattaaatatgccgaattctcgctttcttcggttatcggcgatcttcgggtgttggaaaccttgcataaggaattgccgcagattgaatgcgatacaggctgcaaaatgcgttttttggcggcgatgtggcgccattcggacaaggaatggaatcaggatgaagtagatcgcattaaggcggtagcggccagtccttatgtggtcggaatcgattttatggggcatgagactaatccgaccgaggcctttggcgacgaattgaaagaaattgccaaatgggcggcccttcatgatcccgactttgttatgcgggttcatgccggggaaaacccgctgtttcaggataatgtaaaagacgtcttgaaagttgttcgggcggcaaccaaagaagcagaagccgaaagcggccgccgtctgaggtgtccggcggttcgtatcggtcacggcttgtacggtgttgatgaagagtgccttaatctgtgccgggaaaccaacgcggtgattgagtttaatatggcttccaacctttctcttaataacatcgataacattacggacgtgccgttgaaaaaatatgtggaccacggggtccgttgtgtgcttggttcggatgggatgggactttattccacttcgccgcaacaggatgtgattctggcgcatgcagccggccttacccgcgatgatctgttgcaaataaacaagtttgaagaaaggctgattgttaaggccgatcgccgttttgaggaaaaacaaaggttgctggacagccgcttggcgggcggtgccgcctatgcttccgtctttaagccggtttattcgaccgcggacggtttgccgcattataccgatgaggtttcaaaacgcaaaaatgaagaaaaggctaaactgcaaaagtttttagattccgaaatttcgcgtatcggtgcccaaacggataaaaacgttgtttatgacgtgttggaaaatcgggttccgattttggtaaccggcgcttcggtaaaagcatggccgaacatttcggccgaaaatcaggatgagatccggaccgcaatgcaggtgctggtgaatgttattgatcccgaaaaagcttgtattctcaccggcggaaccaaccacggcgttgaaaagcagttgcatgaagcggcgcataatcgaaatcaaaaatcggataaaaaactggccgttatcggaacgttgaccgaagaagccgcttataccgaacgggcaagcattgaaaacaacaccattacccatgccgttgttttggaattgaacggacgtccggccaaaaaatggtttgacctgccggatacggttttggacattgttgaaaaacgcggcggtgaaatgattgccgtcggcggcggcggcgttgtccgtgacatgatacagcgcgcccataacatgaagctgggtatcaatctgatggacggtcccgaaggcgcttcaaccgataaagcggcaattatgccggaatacgccttcaaaggcgctcagggcttgattaaaaagctttatgccgggcatccggaaatctttaaccgagattttgatccggcccaagtcgatgagtatgtgtcttcggcgcgcaggcagcagagatctctggccaatataggtcagctgaaacaacggatgggaatcaggaacaaaagtgcggccgatcattgcggcattgatgccggagtggtttcttttctcaaaaaagatcatgagaaacaataagatgtcaattttctgaacttaaagaaccaaaatcagagaaatcttgcataatatgttttatatgctaaggttttagtatgctgcaacttttaggactaataccgtgaaaaaaattatttttggttttgatttgggaattgcttccgtcggttgggctgttattgagtatgacgatgaaaattttgatccggaaaccggagaagttattgaaggaaaaataatcgcttgcggcgtacggtgttttccggtggcggaaaatccgaaagacggttcttcgttggcgctgccgcggcgggaaaaacaactgttgcgccggattacacgccgtaaagccagaaggatgctgggtattaagcgtctttttgttgccaaagggttggcggattcggttaaagaactggagcaggtttatgccgctcaaagcggcggagatgtctggaacttgcgagtcgaagcttttgaacgcgagttaaacaaaaaagaactgatgcgggttctcacgcatctggccaaacaccgtggctttaagtcctatcgtaaggcggcagaaaaagccgacaaggaaggcggacgtattttgtccgctatcagagagaattgcaatcaggcctctgcttttcagactttggcgcagatggttgtcgaaagagccaaaaattccgatcatcataaaatgcgcaactatacccccaaagaaggtaaggacaaaaatgtagcggtttatgttaattccataccgcgagaggaaattgaaaaagaaacggcattgatttttgccgcgcaacaaaaatacggtgtatttacagaagatctgtatcgtgatttttgccgaattgcttttcgttaccgcgaggcgggaagtgtcggaaaaatggtcggcaaatgccggtttgaaaacgatgaattccgggcacccaaggaagccccctcggcggaactttttgttgcaatgagtaagattaataacctgaaactgacgattgacggggagcatcgttttttgaacgatgaagagcgccaagcgctgcttgaattgctgaagaataccaaagaagtcaaatattctaccgtccgtaataagttgtttaaaggacggcaggtgttttttgatgatgtcaattacgtctctaagtccaaaaaagataagaacggcgaagaaaaagccgttaatccggaagatgttaaattttatgccatgaaggggtggcataaactgaaagcggaattctcaccggagcaatggaaggaagtctgtttaaatctgccgttgctggatatcggaatgacagcggtcgcctgtgagaaaaacgatgacgggatagaacgttttctgagcgaaaagggaattgcttcggaataccaggaggttttcaaacgactgaccagcagcgagtttattaatttgtcgttgaaagccctgtacaagatcaatccctgtctggccgaaggaatgaaatatcacgaagcttgcgaaaaagccggttatgattttcgtgacagcggtgaaagattagtggaagaaaaaagcttgctgctggcgccgattgcggaagaaaagcaaacgacggtgccggtggttaaccgggcagtggctcagttccgcaaagtatacaatgcaatggtgcggacatacggtgcgccggatcaaatcaatttggaagtcggtcgggatctgaaaaaaaatcatgacgagcgaagacaagttgagcagcgtcagaaaaaagcggaagcagaacgttcggaggctaaagacgagctgacaaaagaaggagtatcggccagcaataaaaatgtgttaaaataccgcttgtatcagcaacaaaacggaaaatgcgtctattcgggaaaggcaattgaccttcgtcgtctggatgaaaacggttattgtgatattgatcatattattccgtattccagatctttggacgacagccaaaacaacaaggtgctttgcctggcggaagaaaaccgcaaaaaaggcagccaaacgccttatgaatatttgcagccgctcggccgttgggaagagtttgaaacgatcatcaataccacgccgtcaatcaaccgtttaaaaagaaacaatttgttgaacaaaacttataaggaacaagaagaggatgtggcatttcgtgaaagaaatgctaacgataattcgtatattgcacgatatgtgaagcaatatttggaagacggcattgacttttccgccagtcagtggccgataaaaacacgtatccaggtgcgtacgggcagtttaaccgattatctccgtcaccagtgggggctgatcaaaaatcgcgacgccggcgataagcatcatgctcaggacgcgattgtcattgcctgtgccactcaggggatggtacagaaactgtccggactctctgccgtgtttgaaaacaaggaggcgtttcgcaaaagaaaggcggaagaactcgggcacgaaaaggcggaggcctggtacaaatatatcaaacggcagattcaggagccatggagtggttttcgggcagaagtgctgaacaaactggatcaggtttttgtttcccgcccgccacggaaaaatgcaaccggcgccgcacataaagatacgattttctctaacaacaaaaataaaggcagtttgccgattcggaacggaatggccgagaaggaaaatatgttccggttagatgtttttcaaaaagaaggacgtttgtatattgttccgatctatgttgtcgatctggtgagcgggaaacagtttgtcgatgcgcctcagcccaatgagtattcggatgattgtcttgtaacaataaatgcagattttaattttaagtttagcctttacaaagacgattatgtggagataaacagcggcgatgagcacattaaaggatatgtcaatcagtataatgcgcaaagcggccagttgtatataggcagtacggataattctcggctttataaaataaagacctctacttttgagcagggagatcatatcatcttagaaatcaacggagaggagcgtataggagaaataggggcttttgatgccgaaaaccaaaaaattatcatcgaggggatgggaataagttatgccatagacggtgtggtaaaagtaaacaaaaagggagaagctaccaagaacatcaaaacttctcaaggttatgtcaaattatccgcggaaaagaaaattagtttgaatgtgattgaacgtttacgaaaataccaggtggatccgctgggacggattgtagaagtcaaaaaagaaacccggctgccgttgacaatgatgaaaaagaaaccgcatccaaagagcaaaacgggagaataaatatgggctggcggattttgcagataaccaaaccttgtaaattatcggtcaaaaaccgccaacttctatatgaaccgtttgaaaacgatgcattgacaattccgttggaagatatttcggttatcattttggaaaacaaacagattttgctgtctaatgcgttgctttccgaactgccggaatatgatgttgtactttttacttgtgacttttcgcatcttccttccgcagtattatttccctttcatacccactcgcgctattcgcagatcgcttggctgcaacaggagatttccgaacctttcaaaaaacgtttatggcaagaagtcgtcaaagcgaagatcaacaatcaggcagcggcgttggaaattctaaacaaaccgaatgctgctaaattgagagaaattgccaaactggtgcaatcgggcgatgctaaaaatgcagaagcgtttgccgccggggtttattggaaaagcttttttgaaaaatttaatcgcaatgatgacaatgacatccgtaattccgcgcttaattacggttatgccgtgttacgcggctgtatggcacgcagtattgtcggtgccgggttgttaccttgttttggtattcatcatgccaataaactaaatcagtttaatttggtggatgatatgatcgagccttttcgtccgtttgtggattatgtggtggctaaattaagtttgagcgaggcctcacaattgaatgcggaaatcaaaaatcagattttaaaagtgttgggaatgaattgccggatggggaaagaagatattaatttgttgaaaagctgtgagatggcagcgtcatctttggtaaaagcaatggataacaagaagatctccgaattaaaataccgatcatggaaaaagaaatgtttttgctttaagggtgtggataagtggccagggaaggagaaagatatatgcgcatgattgtcttttttgacctgccgaccataactaaaaccgatcggcgcaatgcgagtcgcctaaggaatttcttgattaaagacggttatacaatgttgcaactctcagtctattcacggatttgtaaaggtcaggatgacgttgaaaagcatgccaaacgtttgaaatgcttgattcctaagaccggaagcgttagactgttaacagtaaccgaaaaacaatatgcttcgatggaaattctggtcggaagtttaaaaaaagaggaagaaataggtgataaacaacttattttgctttgaattttttatctgtgaaatcaaaaaagccgttgaatatcaacggcttttttgaaatgtagtatagcatatctgatttggaaaggaagctataaccgtttcaaaatataggcgttgcagaggttgagtatagcatatctgatttggaaaggaagctataactaaccaaagaagggtttactgcacttgagcagtatagcatatctgatttggaaaggaagctataaccccacaactcgatgtatgaagatgatgaggagtatagcatatctgatttggaaaggaagctataacggttgtattcatttataatagtcccttttaagtatagcatatctgatttggaaaggaagctataacgctttcatttgcttaaagtcttcagcaaaaagtatagcatatctgatttggaaaggaagctataactcgtcttttccgttttgagttaaaagttatagtatagcatatctgatttggaaaggaagctataactatattatttgataccgctgtcaaccatggagtatagcatatctgatttggaaaggaagctataactctatatccataggttcaagcatatcaacaagtatagcacatctgatttggaaaggaagctataactagtggttacacatcatgcgccaagcgaacagtatagcacatctgatttggaaaggaagctataactattaaaaagctttgaagaatatccgccggagtatagcacatctgatttggaaaggaagctataacgttcttcgggtgactccgctcaaatcagttagtatagcacatctgatttgaaaagaccggttatttcaatttctgtcgcagatatttggcggtatagctgtgaggagactgggcaacttcttccggggttccttcagccacaattctgccgccgccgtcgccgccttcggggcctaaatcgacgatatagtcagccactttgataacatccagattatgttcaatcaccaccaccgtgttgccttggtcgcctaaggtctgcagaaccttcaacagacggttgatgtcttcaaaatgcaatcctgtggtcggttcgtcgaggatgtaaagcgttttgccggtagcacgtttggaaagctcttttgaaagtttgattcgctgcgcctcgcctccggacaaagtggttgccggttgtccgagatgaatgtagccgagtccgactttgcgcagcagttcaagccggtttttgattgacgggattgcgtcaaaaaaggcatgtgcttcgtcaacggtcatatccaacacgtcggcaattgattttcctttatatttgacctccagcgtttcgcggttaaaacgtttgcctttacagacatcgcaggcaacgtaaacgtcgggcagaaaatgcatttcgattttggtaacaccgtcgcctttgcaggcttcgcaacggccgccggcgacattgaacgaaaaacgcccggcgttgtatccgcgtgctttcgcctccggcaacccggcaaaccaatcgcggatataagtaaacaggccggtgtaggttgccgggttggaacgaggcgtacggccgatcggcgactgatcgatgtcgatgaccttgtcgatgttttccagtccgctcagttgatcgtatattcctgccggttcgcggctgccgttgagttccttgttaacggccttaaacaaggtttctaaaatcaaagacgattttccgccgcccgaaacaccggtgatgcaggtcatggtgccgagcggaatttgcaggtcgacatttttaaggttgttggttcgaacaccgttgatgccgagaaaatgaccgttaccgcggcgtctttgacgcggaacctctatttctttttttccggtcagatattgagcggtcaggctttcgggatttttcaaaacatgtgcaacggttccttcggccaccacgtgaccgccgtgttcgccggcgccgggtcccatatcgaccagataatcggcagcgcggatggcgtcttcgtcatgctcgaccacaatcaccgtattgccgatatcacgcaggcgggtcagcgtttccagcagacgatcattatcgcgttgatgcaatccgatcgaaggctcgtcaagcacatacatgacgccggtcaatcccgaaccgatttgcgaggcgagacggattcgctgcgcttcgccgccggacagggttcccgattgccgggacagggacagatattccagcccgacgttgttcaaaaagttgagccggtcggtaatttccttgagaattttgcgggcaatttcctgcttttgcggactgagttgttcctcggcatgcccaaaccattcgcgcgcctgtttgatggacatggcggaaacgtccataatgtcagcgccgccgatcttgatcgccaatgcttccggtttgaggcgtttgccttgacaatgctcgcacattgcggccgattgatattgagaaaattcgtcccggatcgcctgagagtcggtctccataaaacgccgttccaaattgttgataaccccttcaaacggtttgtgggtaacaaaacgggaatagtacatcggcaccgtttgcgaaccggaaccgtacagaataacgttgcgtgcctgttccggcagttccttccacggcgttttcatcgaaatgccgaggtaacggcataacgattcgagcgtatcggtgtaaaaaccgtgcttgcggctgtaccacggtaaaatggcgccttgtgccatcgaaaggttttcgttgggaacgatcagttcggggtccatatacagccgtgcgccgataccgtcgcaatgagggcaggcaccgtaggggttgttaaacgaaaacagccgcggttcgatctcctcaatcgtaaagccgctgaccggacaggcaaacttggaagaaaaggtgatgcggctgcccgaggcggcgtcctcggcaaacagcagtccgtcactcagtttcagagccgtttcgaccgactgggccagacgggtttcgagtcccggtttaatcaccagacggtccacgaccacttcaatatcatgtttttgatttttgtttaactccggcagttcttcaatggcgtaaacggtaccgtcgattttaaggcgctggtagccctgacgctgcaaactttcaaattcttttttgaattcgccctttttgccgcgggcgatcggtgccaacaacaggattttgcttccttcgggcaaagccgcaatgcggtcgaccatttgcgaaaccgtctgggattcgatcggcaagccggttgccggcgagtagggggtgccggcgcgagcccagagcaaacgcatataatcataaatttcggttacggtgccgacagttgagcgcgggttgtgagaagtggttttttgttcaattgaaatggccggcgaaaggccttcgatcgagtcgacgtccggttttttcatcagttcgagaaattgacgtgcataagaggacagactttcgacatagcggcgctgtccctcggcataaacggtgtcaaatgccagcgacgatttgcccgaacccgacagtccggtaatgacggtcagcttgtttttcggaatgctgatatcaatgtttttgaggttatgttcccgggcgccccggatttcgataaaattgttttccgccatctgttttctccaatcggacaatataaccgcgaaagaacaaaaaggcaacaaaaaagcttgtcggagcgaagtttcggatgggaataattttaaaattataaccttggttgaaagattttttagttttatgtcaataaaaagagatcattgcttgcaggttataatttattgtataaactgaatactgaactttattttataaatcagaagatggttatgattgattgtaagtacacttttttgctggcctgtggtctgctgtggtctttttcggtgcgggccgaccttaatattgcgctgattgcccctaccgacggtgattttaaatattttagcgaggaactggtcaacggcgccaaagtggccgtggacgagattaatgagtccggcggtttgctggggaaaaaaatcaatctgattcaaattgacgatccgtgcgacgataccctctcgctgacgacggctcagatgatggcggtcaatcgttctcaggaagataaaatgcatttggtgttgggcccgcattgcagcaatcaggcggaaaaaatcgccgatatttttgccgcggcggaaatttttcagattctgccgatcggcggcagtccggccgtttacaaaaaaaattatcgcaatctgatcgaatttgtcggctcgccggaacaacaggcggtcgatttctttcgctattataccgaaacttatcccggacgccgtctggcggtggcctataacgggcaatatcccgaaatgcttgcggtggccaaagaaattcagcatctgtttaccaaagcgggacaaggcagctatttgaaagcttttgataccggcgagtttaacggtaacgcccgtcggatcgcgcaaacggttaagaccggcaatgccgaaattttgtttatgctggaccgggccgaaccgacaatggaaaccgtacgtcagttgaaaaccgacaaccccggttttgttatttttaccaaccgctatttcagcagccgcaaatttgcccgcaagctgggaaatgttgccgaaggaacgtaccttttgtccttgccgccgctgcagggaaatccgaattttgccgaagatctggtgaggctgcgtttatgggggattgaaccggaaggactgatggcgtatggttatctttcggtaaaactgtggggacggacggtcaatcaggcacaaagctttgcccccgcaaaactggctcgcagcctcaataaaaaactggtgcagaccggatggggcaacgttgtttataccgacggcattcccgatcgttcgttgaaatatgccatttaccgttttgaaaacggagaatatgcacaagtctattgattttttgcttggatgataaaatattttcccctatagtcgtgtcagtgatcaattttttaataaaggtataaaataatggttggaagtatcaacaaggtaattttggtcggcaatctcggcgccgatccgcgtgtcaacaccacccaaaacggcagcaaagtcgttactttgagcgttgcgacgtcggacagctggaaagataagctttcgggcgaaagaaaagagagaaccgaatggcatcgtgtggttgtttttaacactcaattggctgacgtggcagaaaaatatcttcgcaaaggttcaaaagtatatctcgaaggtcagttgcagacccgcaaatgggaagatgccaacggtcaggaaaaatataccaccgaagtggttttgcaaaacttcagttccaacctgattatgctggacggccgcggtgaaagcggcggtgacgtgttctccggttccgcctccgcttccgggtgggattctgcgccggctgccggcagttcgtccgatttggatgacgatattccgttttaggaagataataaaaatttcaccccggatttccggggttttttatcggccgatccgagattgcgcatcggcacattttaaaccgcccgaattgaaggcggtttttaaatgcctatattatacaaaatcgcaataggagtgctttttgatggattatgcgctgatttcctttcggatgcttcttgtctttacgctggttttgatattttttcagttttccggcaataaacgccagtttacccagatgaccagtttcgatttgatcagcaattttgttctcagttcgattctgggcggttatttgtttaatgccaacctgagctggatcgattttatctacattgttacgatctattttgttatcagcggcgtgataaactatttggccaaaaatacggtgtggggccgcggagtggtgatcggtacgccgacggtcattattaacaatgggtgtttattgcctgaaaatctgcaaaaaatgaatatgaacatgttggatttcatgtcattgctgcggaccaaaaaagttcattcgctggaagacgtgaagttggcgcagatagaagtcggcggtgaattgaccgtggtgttgcggggagaaaaagacttttcttcagtgttgatcgaaaacggtaatattcacaaagaaaatttgaaaaaaatcggaaaaagtaacgactggttgcaacaacagctgaaaaaacgaaagcttgtcataaaagatgtcttttttgccgaatggtttgaagatgacctgtatgtgataaagttcaaatagcaacggtctctcaaagaagtgtcggccggaataagaaaatcccctgaccgttgcggccagaggatttgtttttagattgtcagagttcaacggcgcgatttacggggaacataccgcggaacatatcttaattgactctgaattgaatcatttaagttttgtccgcgcatattttccagtcggttgcacagatcaagagtatctgccggaaggcttcgtcccatgctgtaaataccgcctaaagcgcattccgcaaaattgatggcgttttcgagactcagttcgccgttattgtcgagcagaatatccccgaacataacgcgttcttccaagtcacggcgtttttgcaactgcggcagaatttttcctcccgagcgcactttttgatccatcaattttttcaaagtttgtttggcctcgtcgctgtgggtcacgaaataggcgttggctgcatttgccagttcggacggtgaaccgtctttttggcgaagaatgccgctgccgcagttgtaaaggaagcttcccattgcaacaatttcagcattggacatggaatccatttccaaataaaccgtcatatcttcgaacattttgccttcgatatgagtggtgaaatagtgcatgagttcttcctcacttttgatgcggtcgcctcggcgaaccggttttccgtccgggcgaacggtatttccgaatccgatggtccatactcttccgtgaggatcccagtaagctcttgctttaacaccttcgcagtgagcgatcaggcacaacatatcgtactcggcggcacgaaactttgcgagccttgcctctgccggcgagacggtgtcaagtgcgaggctgtcattgacaagagagtcgctgacgatgctgtcacaagaaacgctgtcattgatcaaagcttctgcagaaacggcgatggtatcaattttttccaaaggaacattgatactgtcggttacggaagcccgagttttttctccgccgaaagcaaagagaaaaatgaaaacaacgagactgatgacagaaaaaaactttttctcgtccatataaataattttttaatttttctataaaaatgatttgtaaaattactatagcaaaagtaggcggttaggtcaagctgttgatgaaaatattttttgttttcgaccgaatttgtattctgtttgtcaaaaaaaggagaatttgggcatcataaaaaaaatccaaccgtaatacggttggattgagagaagggagttgtcaactaatccgcatcgccttcccagggaagaacaatcggatcaaagccgatcgcttcgcgcggagacttgatctccactttgctgacagctgtgaccgttctgccttcactttccgcgacaacgctgcatttgagcaaggtacggctgaacggttttccgtcgatgatttcgtcttccagtgatacgaattccggatcctgcggcagaaaacgaacttcggcggccggcatcggaagtttttgtccgttgcacagaacagaagccttttcggtgatgaaggatacaggtacggaaaaagttgcaaatttgaagatataatctgtcctttgtttttcggtagcgatgtttccttcagttcggcaatcaagcagcgtttcctccgttgcggtggaaaacagtgccgatttttctcttcggatgtcggtcgacagcaggctgtcggttgcggtgacatacgcgaggtcggtttcgaaaacgtgttttcgattaagatgccgaacttccagccaactggtgtagctggtggccgtagatgccgtaatgccggatgcttcgatacacatttccgccgggaattcaatctcgggttcttcggtgaagacacaactgctcatcattgcacccagtgcgataaataagccaaatttaaaaaatctcatagttaaaataattaaagtttaccgttctcatattaccacaaaaatgaaaaatttaaataaaaaattagcaaaaaatgaaaaaacgaaaaattattgcataataacatgttcttatctgcgaaagccgcttttgaaaagagaaaaggttaatagaaaacttgacaaaaacagggtgttgctttatacttgattttgtaaaatctaattattaaaaactatgaaaaaaattattgttagcctgaccattgccgttgttgtcgttttgagttgtatatcctgtacccagcagtacagagccagaaatttcggcggaaatatgaccatcactcttcagccgggagaaaaactgatgatggcaacctggaaagatgataacctgttctacctgaccgaaccgatggaagaagactacgtccccaagacaaagattcttcatgaaagttcgtcttttggtgtcatggagacaacgattaagttcgttgagcagcgatagccgggtatattaataccaaataaaaaagaaccgtctctccggacggttctttttttgtttctcgaaaaccacacgtta

SEQ ID NO: 656 - DNA, 23156 bp, synthetic construct
  source 1..23156: mol_type = other DNA
  misc_feature 1..23156: note = Synthetic
caaatcaaaacaaatgatttatgaacgttgtaaagatggaatatttttatttgtcagtgattttggtaaataagtcgaaacagacaccaaacgcgttttgccataggtgcatttcattgtcaacgggtcaaatacaaaatcatttttctttaacggataaggttttcctttacaaatgacttgcggtattcccgtagggtcgcaaagggaggcttttccgaaataataacgcgggtaatccgaagtcgtgtccttttccaaacgcatttcaaacgccgtcggttgatatttgtccaataaaaaagaaatgactttgccttggtgtttttgaatttcagcggcggaaatgtgagctgttttggtaattttttccccttcaaacaagtgaatgacaatattgttcgtatatgtgtttattttgttcataacttctccgatataacaagctgaatgacagtgcatcataaggaaaagcgggcaaaaagtcaataaaaaaatcggctcgcaaaacacgaaccgattgattggccaaatggttagaaattaagccgccaaatgtttgcgccgcaccacaaatttttcaatttccaccatcaacgtgataatcatcccaaaaccgattgcaatcaaccaatccaataagtcgggattatgtgttttaaacgcgatttggaaccaaggcgtgtatgaaaataaaatttgcaatacaatcatgccgattgcccccaaaatcatatacggattatttaaaacaccgcttttgaaaatggatttatcaaatgatttacatgagaacataaagaaaatgcccatcatcacaattgcattgacaaccaacgtgcgggattcggccaaattgtcgccttgggcttcagcggcttcaaacgcggcaaagcttaaaatcgtcatcatgcacatcaccgaaatgattcggtataaaacggcttttgtcaaaatcggcgtggatggtttgcgaggggctcgttccataatgcctttttcaatcggttcaaatgagaacattgccccaagcaaaatcgttgtgaccatgttaatccatagaatttgaaccggcaaaatcggtaccgttaagttaaaaaagatagccaacatgacgaccaatgcttcggcaaaactaatcggcaaagtccataaaatgaatttaatcaagttatcaaacacgccgcgaccttcttcaacggcggcttcaatcgtcgcaaaattatcatccaccagtacgatggcggcggcatctttggctacatccgtgccgttcatacccatcgccacaccgatgttggcttgttttaaggcgggcgcatcgttcacaccgtcgcccgtcatggccacgatattgccgtgtttttgcaacgctttgacaaggcgcaatttatcttcgggtgtgacgcgggcgaaaacatccactttgggggctaattgatacaattgttcatccgtagcatgtgaaatttcatcgccgttcatcacgaccggatcaacatccgtgcctttgccgtgcaagttcatttgcttggcaatggcttttgccgtgaccaaatggtcgcccgtaatcatcttgacgcaaataccggctccataacacgtttcaatcgctttaatcgcttccggacgcggcgggtcaatcatcgcttgcaatcccacgaaaactagacccgattgcacatcgccgtgggataaagtttccccgtcatgttttttaatcgcaaaccccaaaacgcgcaatcctttagaggccaatatttccattttatgcaaaatttcttttttatcaatcggtgacacatcgccgttttcatccatcatgtatgagcaaaacggcaaaatggcttccgtagcacctttgacatatatcataccgtcttgatgaaaggttgccatatattggtattgcgcttcaaatggaatttctgcgatttggggatgttcatgaatataggttttataatcaaatccgccttttttcgccgataccaacaacgcaatttcggtcgggtcgccgatgccttcgccttttgacaatttggcggtattgcataacgccccgacaatcaagcaggcttccaaagatttatctgccgttttcggtgtaatgtcgcctttagcatcataaccgatacccgataatgtatattcgccgccgcttgtgatgattttttgcaccgtcatgcggttggcggtcaaagtgccggttttgtccgaacaaataatggatgtgctgcccaatgtttcaacggcgggcaatttgcgtacaatcgcgttgcgttttaacatccgattgacgccgatggaaaggataatcgtcacggcagcgggcaatccttcgggaatggcggccacagccatcgcaacggcggacataaacgtgccaacgattggtaacccttttatccacccgacgacaaacgccaataccgacataacgacaatcaaccacaataatttttggctgaatgcttcaatcttttcggtcagcggtgtttttaaatcgtccgcatcgctaatcatttttgaaattttgccgatttcggtgtgattgcccgtttccacgacaacgcctttggcggtgccgaatgtgaccaaagtggaagaataggccatattttgccggtcggccaacaatgttttttccgccaaaatgttggcatttttttgagatgggacggattcgccggtcaatgccgattcatcgatttttaaatctgtgacttgtattaaacggatatcagccggcactttttcgccggagcgcaataaaacgatatcgcccggtacgacttcagttgacgaaatttccaccgtatcggcatccctgatgacgtgagccttgatatcaatcgcgcgggtcaacttttccaaatcttttaaggccttgtcttcttggaaaaagcccatcagcgcgttaaccaacacaactccgtaaataacggcggcatcaatgtattcgcccaaaaataacgcgatggttgccgataacaataaaacgtaaatcaacggttggtgaatttgcaataaaaaacgcacaagggcgcttttgccttttttcaaagtaatggtgtttaacccaaatttttccaaacgtttttgaacatcttcgtttgttaaccctttgaatttatcggtatttaaggattttaacagattgtcttgagattggctgtgccacggggaattgttcattgatactcctttaaattataaaccttatttaagcataacttaattttgcaatttgtaaaggggcaaatatataattaaattatacttttaaaaaatgtacgtcctgtgtctgagttcattacaaacttatttaaaaaatcccctctaaataaggggattttaaatttatcaacctttgacggacgtatcaacggatgtatcgggacacatagccactttgcccgagcgcgccaattcgcgaatgccaagcggtttgacaaattccaaaaaagccgaaatttcgctttgggtacctgacatttgtaacacggcagttttgccggttatatccaaaacggaagctttaaacaaatctgcgatttttaaaatttcaccgcgcgtttgggtgttgatatgcaccttacataaaacaaattcgcggataaggttttcgtcctttgtcacttcttgaacttttaaaatcggaatcaagcggttaagttgtttcataatttgttcggccgcgcgctcgtcacatgttgtttcaaccgtcacgcgggcaaaagcttccgatgtggatgtgccggcgctgatggaatcaatgccgtagccgcgccccgaaaacaaatcgcaaatgcgcgataaaacccccggttcattgtgtgctagaatggaaatgacgtgtcgcatcttattctcctttatctttcatattttcgggaagtaacatattgctgagcggttggccggccaatacccatgggtaaacggtttcaaaagcatccacgcgcgcatcaataaacacgggaccgttatggttcacagccttttcaatcgcgggttcgatttcgtcttctttttcgatacggataccaagtgctccataagcttcggcaagcttaacaaaatcgggtcccgatatttcggtttgcgaataatgtttgtcatacagttgttcttgccattggcgcaccatgcccaaataaccgttattgataattaataccttaacgggaatattgtaatggacgcatgtagccagctcttgaatattcatttgaatgctgccgtcgcccgcaatgacaaaaaccaattcatttggtttggcaatttgggcgccgatggcggcggggaacccgaaacccatcgtgcccaatccgcccgatgtgataaattttcgtgtttgggcgcgcctgaacaattgagccgcccacatttggtgttgaccgacctccgttgtgacaatcggatttttgccgtcaataagttgatacactttttggataacggcaatcgggctgagcttgtccgatttgacgcgctttaaagtttttttgcttttccaatcggcaatgagttcaatccattcttggcgcggcttttcattgattttaaaatcggtgtgttttaattcgttgttcatgacttccaaaacatttttggcatcgccgacaatcggaatatgaacggggacatttttgctgatagagcaggggtcaatatcaatgtgtatgatttttgcattcttggcaaagtattttaaattccccgttacgcggtcattaaaacgtgtgccgaccgctaaaataacgtccgcatggtgtacggcatagtttgaccaatatgacccgtgcatgccgataagccctaactttttatcatggtcgccttcatatgcgccaatgcccatcaaagtgctgaccaccggaatattcatcaaatccgccaattctcttaaattttcctcggcttttgaagcaataacgccgccgcccgcaataataagcggtttttcggcaccggccaataatttaagtgccgccaaaatttgtttgtggtgccctttataggttggattatatcccggcaaatcaacggatttgggatattcaaattttgttttggcatccaacatatctttgggcatatccacgaccacggggcccggtttgcccgttgtggcaatatggaaagcttccttaatcgtgcgtgccaaatccttgacatctttaaccaaataattgtgtttgcaacaagaccgcgtaatgccgacaatgtccgcttcttgaaacgcgtcgttgccaattaatttggaaccgacttgtcccgtgaaaacaaccaacggatacccgtcatagtaagcattcgcgatgcccgtgatggcattgcaagctccggggccggatgtcaccagcgcaacacccgctttgcccgatacgcgtgcatacccttcggcggcgtggatggcggcttgttcatggcggacaaggtaatgtttaatttgttttgtatgatataattcttcatataaaccgatgaccgaaccgccgggataaccgaaaatatcggtaacgccctcagcaattaaagattgaatgaaaatttgcgaaccggtcagtatttcaccttcatgaagaggctgaaaacctgcgtcatttttatggggattttttgttttttgttgaggttgtttttttaattgacacattgatttactccatatttttaagtcgcttatcctacataaaatcctatagtgtgtcaagcattcataacttacaaataatataaaaagtaaataaatgtggttttttatcaaaagttgtgtataataacttaaacattgtataacttaagaaattatctttttcatcaaggttaaaaatatgaaaaggcattttaaatgactagggaagaattcatcaaaacagcggcatttttgttggaaaaaattgataagcgcggcggctctgccaacgaaattatcagcaaatataccgcgacgcataaatatatcgcgggggatgaccgcaaagaattgttgaatttggtttgggcgctgatacgccataaagcccgtttggaatttttgtgcccgaatgcttcatgggcggataaaacggtttgctttttatccgtgatgggggatgattatcaaactcaaaattttgatgaacttgcaaaagttcaattatcccatgcacccgatgccgttaagtgggaagtacccgcatggattatcccccatatccccgatgccgaaaacgaattgccgcggatgaaaaataacgctccgatagtgttgcgcgcgaacggaaatcgtgatgaaatcatgcaaaaattacttaatgaagggattgaagtatcaaaaacaactaactcaatttatggattaattttaaaaaattatcaaaatttaactgagacaaaattttataaaaagggcctcatagaaattcaagatgagggcgcccaaatggttgctttggatatcggtgtcaagccgcgcgaaagtgtttttgatttttgcgccggtgccgggggcaagacccttatttttgctcagatgatgcaaaacaaaggatttattcaagcctatgatgctttgccgaaacggttgtttgaattggttaaacgtgcacggcgtgcgggcatcagtattgtaaaaaccgtaacgcgtttgcccaaccccgataaaaaatttgaccatgtggttgtggatgcgccttgtacaggaacgggtacatggcggcgcatgccagatatgaaatggaaattgaacgaaaagcaactgaaaaaaacggttcaactgcaaagcgaaattttaaaccgtgcagcggattatgttaaaccgggacattttttatcgtatatcacttgttcattaaccgttgatgaaaacgaagcgcaagttgaaagctttttaagttcacatccgcgttataaaaaagtatttgaaaaacgttattcgccatatgggacgggtactgacggtttttatttgtgtatgatgcaaagacgttgacatggtttttaaagtgttgcatcttttaagataaacacggtgttggggaacatttttttattttacctgattttagcgcattggcgacagcgagctaaaaaattcatcaatttcgatggcttttgaatggctttggcgcgataagcttttggcgaaacagcgggtaaatatttatagtaggtatcgttcgaatctttatggatttcaaaaccgcgtatattatattgagataaataaaaccgtttttgccatgcaatataatctctaggtttcggttccatcaaatccccgtttgcatctaatggatggtccgggacagtacaacacgttttaacttttttacggtccagcaaaaataattcatcagctttagataacacattacaggccgtgtcgtcaacacccatccagtaatcgaatatgcgtacatgttcttgggtcaaatcggcaatcatatcggacagccccatccctttttgtgttgtatagagcgtcattgaatggtgttttaaataaagatgttgatttttatcataggtaccacaagccatcacatatgcgtctatccctttttgacgcaataaataggcgcccataaaagctgtctcgacacaagtaaacatgcgcgatttttgaatgtgtgttaattttgtttgataatcaattgaatcatgaattaattttaccatattgtcttgattgtcaagccataacaacaaaccttttgccaccactgctttttgtgcaggcgttaacccgaagtgattgccaaattcataataatgtcgcaacagggatggtgaaatcattgattcccatggtagtagggcgctcattttgtgcataatttctgccccgatactgtttggtacaacgttttgattttcgggcaacagttgtttaatcacaggataaatatcatgtgagatgatttcttgtatagggcgcttatcatttgatgtctgtgtcataataaagagtataaatcaaattttctttattgtaaaggaaaaaattgacagaatttaagattgtgattttttttataaaaacggatgatgtttatttaaattgatattgaacgaaatggaatttttgaaaagtttatatttcatagttaaatgcctgttgccaaatgaattttcgggacaaaagtgtttccatcggtatattttttaaaaagtaatctaacgcataatgcgtcgcgcggtgcccgatgattaaaactttaccattcggatagttttgttttaagtcttctaaaaaggatttcatacgggcattcgtttgtatataactttccccgtttgcaaatggtgtatgcaacctgtttattttttcgggctcaacgattgaattgggataacacgtcaaatccccataatcgcattcgcgcaaacgtttgtcggttaaaatgggaatctgacgtcccttaaatgcaatggttgccgtatcaatcgcgcgacttaagtctgaagtaaaaataacatcatagtgttcgtttttttgtcgttcgcccaattccattgcttgttgttttcctaaatctgacaatttgacatcattccaacccgaggcgagtttggcttcattgtcaagggttgttgaatgagttacaaaagttatttttaagggcataaattattctttcatttttagttaatcaaaaataacctgccaattgggattgtgggcggcttcaaaacacatttttaattgattgagagatgttttttcttcggcgatgggcgagggtaattcgccaaccccaaaaaaaccgattccttgggtttcaatattatctttaaattccccgcccaatagttcgcataaaacaaaaactttgcaaataccgaatgcaagcggtggcatttgttgtacttttctgtcatttaaagcaataaggcggacaggtttaacatccaagcccgcttcttcttttgtttcttttatcgtattggcgcgaatggaagaattgacatctatccaaccgcccggtaatgtccaacgtccgtcatgctcttgaaccattaacaacttattatccttaaaaacaactgcacgagtatccattttgggtgtttgataaccgctttcacaacaaaataagtcttttacttttttgaattctaaatcgcttatctgggttatcatttcggcagaaatatcacggatacgattaaatcgttctatgtcaaatttgtcctttgaataagccaacccattttgcgccaatgcttgcagttcaatagcccaatcaattaatttatccattccacactcctttttataaatattttatgatagatttaaagaaattacaagcacgattggcttatgttgaaggataggtgtgtcaaaatatttaaggtataaaatggtgcttttttgttgacggaatttgaaactcgatggataatgatgcctacagtttgaaattaaaaccgttaaaagcacatatgacagaagacatttttggaaaattagcgcattctaaattccgcagccgttttcatttaaacgcaaatgacaaggcgtatgtgacgcaaaaaggcttggatgttatttgtgctcatgccgctgatttcattgcaaaacgtttagcgccggctgttatccccaatgatggcaaacaaacgccgatgcacggccatcctgtttttattgcccagcatgcttgtgcctgttgttgtcgtggatgtttaaacaaatggcatcatatcgaaacgggtcgcgccttgactgatgccgagcaagcttatatcgttgatattttaatggcttggatacaaaaagaaatgaaattttaaatcaagttttacccggcgcatcagctaaattatttattttgaattcaaaaaaaaggggggatgacaaaatgtcagagccccactcgaaatttctcgattattatagcttgctttccaaatctgatacaataataaaaaattccttgcctttagtatataatttgataaactatatgtcaagggatatttttcaattagggagatataaatgcaaaaaataatttttggatacgatttgggtattgcttctatcgggtgggcagctattaaatttgatgatgaaagttttaacccagatacgggagaagtctttgaaggacgtattctgggagccggtacaagatgttttcccgtcgcggaaaatccaaaagatggaacttcgttagctgaaccacgcagaatgatgcgtttgtcacgtagggcttgtcgtcgaaaagcacggcgcttgttaggtcttaaacaattatttgttaaaaaaggattggcagagtctttagaaaggattaaaaaaatctattctcaaaaaggcaaagtggatgtatggacattgcgcgccgaaaaagcttttaacgaagaactgtcaaaagatgaacttattcgagttttgattcatttagccaaacatcgcggatttaaatcttatcgtaaagcggttgaagaacaggataaagaaggtggcaaggttttaagtgctattaaagccaataaagcattattgacagataataaaacattagcacaaattattgtggaacaagcgggaatatcgggtaaaaaaagaaatagagccataaaagacagtaaaggcaaggttaaggagatcatttataataattctatttcacgcgacgaaattgaaagggaagtcgagtgcatttttgacgcccagaaaaaatatggtattttcacggaagaattgttagaagactataaaaatatagcttttcgtcatcgtccggtgggaagtattgccgatatggtgggtgtttgccggtttgaaaagggtgaaaaaagagccccgaaagaagcgccatccagcgagttatttgttgctttgacgaaaatcaataacttatccgttattgaaaacggcaatatgcgccaagtaaccgatgaagaacgtaaacgcattttagaagtattaaaaacaaccaaaaaagtgacttataaaactttaaaaagcaaagttttcggtaaagatattagtatcaaaggtgacactgatacaaagaatttgattttttatgaaatgaaaggttggcatcaattaaaaagccaatttgataaagaacaatgggcggaacttgaaaaagatataccccttttaaataaagttgttgagataatagcatgtgaaaaaaatgatgaaaaaattaaagaagaactaaaaaaagtaaatataagtgatgaaaatataaaggtattttgcggttataattttagtaaatttattcatctttctttaaaagccgtggataaaataatcccttttatgatgcaaggtgacagttatgataaagcatgcgaaaaggcgggatatgattttcaagaaaatgtgaataaattggtttctaaaaaaagtaaatttttagagcctataccccaagaccaaatgacaaccgtaccggtagttaatcggacaattgcacaatttcgtaaagtttataacgctatggtgcgtcgctttggcgtgcccgatcaaattaatattgaaacggggcgcgaccttaaaaagaatcatgatgaaagaaggaaaattgaacaagaaatcaatcaacatcgtgaagaacgcagcatcagtgctgatgaacttaaaaatatggggatggccgataatgcaattaatattttaaaatatcgattgtatcaagaacaagacggaaaatgtatatattcagggcactccattgatttaaatagattggatgaaaccggctatttggatgtagaccatattgttccgtattcaaggtcgttggataattctcaaaccaataaagttttatgtttatcatccgaaaatcgtaaaaagggcaataaaacgccttatgaatatttcaaagatttaaaaacgatgcaacaatgggatgaatttgttgcgcgtgttaacttattgcgaaattataagaaaaaagaaaaattgcttattgaaaattatgaagagagggagcttaagtttaaagaacgcaatgccaatgataacagctatatagcgacgttcgtgaaacgatactgtgaagaagggatagatttttcgctaagttcacgtcaagacattaaaaatcgtgtccaagttcgcaatggggctttaacagattatttgcgtcatcaatggggattgcaaaaagatcgaaatgaaagtgatttgcaccatgctcaagatgccattgtgattgcctgtgcgactcaaggaatggtggaaaagttatcacggctttcaagtatttttgaaaataaggaaaaatacagagaaagaaaagcgcgcgaattgggacatgaagaggccgaagcttggtataaatatataaaatcaaccgttagggagccttggtgcaatttccgtaatgaagttcttaaaacgttgaaaaacatatttgtttcaagacctcccaggaaaaaagctacgggttctgcgcataaagagacaatatattccaaacgtcttggcaagggcagtttaccaattcgcggcggtatggcggaaaaggaaaatatgttccgtttggatgtctttaaaaaggataaccaatattatattgttccgatttatgtcgttgatttggttaaaaaggatggatttcaagatgctccgcaaccatacaaatatgtggacggaaaactagttttaattgatgaaacgtatcaatttacgttcagcttatttaaagatgattacgtggaagtttttaccgaaggggaagtttttaaaggatatattaatcaatacagtgctcaaacgggtcagctttatttaggaagcgtggataattcgacgtgttataaaattaaaacagatacgtttattgttgacgataaaattttattgcctaaccaagaacatgattgtgttgcaactgttaagttatttgataaaatgaaacaaaaaatgattgtggcatgtaatggaaaagatttggagttagatgcttcactcaagcttaataaaaagggggaagaaacaaagaatattcaaacccttataccttatattaagttagcacgcgaaaagaagattagcttgccagttatgcaaaatctcaaaaaataccaagtcagcccattgggcgatattcatgaggttaaacaagagacgcggttgccgttgtcaatcaaaaaaaataaagggaaaaaggctaacaggtaatgggatggcgtattttacatattggtaagccttgtaaattatccattaaaaacagccagcttatttatgagacacaagaaaatgaggctttatcattgccgttggaagatatttcggttattattttggaaaacaggcagatttcattaaacaacacactattgtcacaaatagccgattataatattgtgttgtttacgtgtgatgcatttcatatgccatcgggtgttttattcccgtttcatcaacattcgcgttattcggatatggcgtggcaacaaattgccgtttccgaaccattaaaaaaacgtatttggcaagaaattattaaggccaaaataaataaccaagctatatgccttgaattgttccaccgttaaaatgcattgaaattgaaagaagttgctaaattggttcaatcgggggatgcaaaaaatgccgaagcatttgccgcgaatttgtattggaaaagtttattcaataattttagtcgtaacgatgataaagatattcgtaatgcagctttaaattacggatatgctgttattcgtggttgtgttgccaggaatgttgtcggagcgggtttattgccatgttttggtgttcatcatgctaataagttgaaccagtttaatttagttgacgatttaatggaaccgttgcggccatttgttgattatgtggtgaatttgttggattttaatcacgtatccgaacttaaaccggatataaagagcgatttggttggtgtttttactcaaaattgttgtttgaatgatgaaattatgactgttttaaaggcatgtgagttaatggcctacagtttagctaatgtgattaaaaataaggatgtaaaatatttgcaattacccacttttgatttgagtaaggttttttaaaatggcggtaatgggagaaagatttatgcgtatgttagtcttttttgatttgccaacattgacaaaaaccgatcgaaaaattgcgagtcgctttcggcatttccttattaatgacggatatataatgttgcaattgtcggtttattcaagaatttgcaaaggtaatgatgatatggaaaaacatgcaaatcgccttaagtatctgattcctaaggaaggaagtgtcagattgttgaccgttaccgaaaaacagtatgcctcaatgtcaattttagtcggtcagataaaaaaagaagaaaaaataggggaaaaacaacttttattgttgtaaaaataatataaaaaaagagcaatatatgaaataaatcaatatattactctttatctaattatagcatatcagatttggaaagcaagctataactcataaacctgagaatttttaccagtttgtaattatagcatatcagatttggaaagcaagctataacttaacgattggattcgtgacgagaatttgaaattatagcatatcagatttggaaagcaagctataactattcccgacgtgttggaccatgtcaattcattatagcatatcagatttggaaagcaagctataacctttccccgttcggtatcaaaatggtggacattatagcatatcagatttggaaagcaagctataacttattatgaagtgtacttcgccttttaaaaattatagcatatcagatttggaaagcaagctataacgccgaaggcttcgtctagtgtgatttcaacattatagcatatcagatttggaataataaggtgaaagatagttatttaattacggaaattaataaaatataattcagatattatataagccagataaaaaacgttgtatacttctgaagttgaaaggttaagttaaataattaaagaaaaccagtttgctgactgaaactgatgtgtatagcaagctgattaataatcagtatatataataaaaatctatcaagagattattgttgtttaatggtgtgagaagttttcgaagtaaatatttatgtaacatgcagttattcaacccagtctaataattttgagtctttaattattaaaaaaaagatattattatatataaaattaatttttttagggatgttttaatatgagcagtttttggtttgcgttttcattgacattgttggcgggattggcaacaggtatcgggtcagtccttgcctttttcacgcgtaaatttgatacacggtttttgtcagtggccttaggattttcagcaggtgtgatgatttttatctcttttactgaacttctgcctgcggcggtttcttctttaagtttcagtcatggaaaaacggcagaattgcttgtatttggcgtattctttttagcgattggattaaccgctcttattgacatgattgtgcccgaatcggaaaatcctcatgaactacataaagataaagttgatatgcaagaaatgaaagaagcacgccatcagccgcgaaagctttttcgcttgggtgtttttacggcaggggctttagcattgcataatttgccggaagggttagctacctttgtcagtgccttacaaatgccctcacttgcttatccgattgcacttgccattgccattcataatattcctgaaggcattgccgtatctgttccgatatattatgcgacgggcagccgcaaaaaagcatttgcctattcatttttgtcaggtattgctgaacccattggtgccttaattggttatgccttattgatgccgtttttaagcgacggtttgtatatgctgattttcccgtttgtagcgggtattatggtttatatttcttttgatgagttgttgccggctgccagggagtacgggcaacatcacttgtcaattttgggtttgtttgccggtatgctggttatggcgttcagtttggtattattgtaaaaattcaaaataaattatctgagaagctgtcaattttacccttcagcttctgagaattggattattacagactaaactttattttttctgtttttagctaacagataactttcatcgatacgagcgaaaatttcttcaagcgggactgagccatttagaataattgttatccaatgttttttgttcatatgaaatccgggaaaatattttttataatcttgaagtgctctaattttttccggcaacattcgcagattaataacttcaactattccatcgttggataaacccaactttttttgattaattgccattagaacaccataccatttttgattatcttgacgtcttacgatagcatttgaaggaaatttttcccacaggtactcaaaatggctttgatactttttataaatgtaggaaatgattttatttgcacttacgcttttaaaaactttcgtttcaaaacaattattggcgatttttgttagaatattttcaatatctgtgcgtattttcccaatatacggaccgcaggcatcggtcaaatgaagggtatattcttcatcaaaatcggggtcaataacttttacgttgattttattatcttttgaaatcttaattgttaagataaattctccatccgctatatttgattgataattatatatgttaccttcttttataaaaccaaattgcagtaactttttaaaatccacaactttgtttttaaatatggaaagataagacattgttttagtccttgaaagcgccgttagatacaatttgcacatgcaaagtgagcggattattaaaaataaacaattaattaataaaaatacccgctgtaagggcgggcattttctattggtcggaatagcgggattcgaacccacgacctttcgccccccagacgaacgcgctaccaggctgcgctatattccgaattcgatattcttatatgtcaaaaaaaataaaaaagcaagcatttttcttagtgtttttgaaaaaaaacaagcaatatacgtcgaatataggcacttaatcgtttttttaatttatgcatccgaatataaaatcaataattttgtcaagtgcgcaaaaaaagacttgcaaatttttaaaaaaatatgtataaacaatcaccttgttccaaagggtgcaagataaggattaattcacccctggaggatttttcctttaaaattaactaaattttatagagagattaaaaatgaaagcaattcaattaaatgctacaaagcgtgaaaaagctggtaagggggcctctagagcaattcgccgtacaggcgacgttccggccgttatttatggggaaaaacaagctcccgtaatgatttctttgccagaaaaagttattgttgcccaaatggctcaacccggaatttggacgcgtcaatttgatattaacgttgatggtcaaagacaccacgttttgtgccaagatattcaaaaacacccgatttcaaacagaccggttcatgcggactttttgcgtatttcgaaaaatgccgtgttgacattggatgttcccgtacattatcaaaatgaagaaattgcacccggtatcaaaatgggtggtgtgttgaacattgttcacagaacgattgaagttaaatgtaaagccgataatatgccggaagctttggttgtcgatttgacaaatgccgaaatgggcgattcgattatggcatctgccatccaattgcctgccggtgttgaattgactgaagacgaagatttcacaattgccacaatcgtgggcgcttcacaaggtgatacggctgaagatgttgctgctgatgaagctacggcggcggctgcttctgcggcttcggcaactgaggcaaaataatatgattttgttggtgggattaggcaaccccggacgggaatatgctttgacccgccacaatgtcggttttatggcggtggacgaaattgtccgccgctattcgtttgattcataccaaaagaaatttaaaggtttattggctaaaggagcaattgaggggcaaacagttttggtcttaaaacccgaaacttttatgaatttgtcgggcgaatccgttcaggcggcaatggctttttataaaatcaagccggaaaacgtgattgtgtttcatgatgatatggatttgccgctgtgtaaaatcaaagttaaaaagggaggcggagcagggggtcataacggtcttaaaagtattgactctcatgtgggacaaaattattaccgcgtgcgtatcggggttgggaaacccgccagtaaagagcaagtcgtttcttgggttttatcggatttttcgggtaatgatatggtctgtatcagagaagttttggaaaaaattgccgataatgtgccattattattcaagaatgatgaccaaacatttatgaacaagttagtcataaaattgcccaaagataaagaattgtaaggcttgttatcttgttttaattcgtgtattataaaaattaataacatgtttctttcgggcacaagaacaaacatgtgcaaaatgtgcataataaatattttatatatagaaggataaaaaatgggttttaattgtggaattgtgggattgccgaatgttggtaaatcgactttatttaatgctttgacatcaacggtaaatgcccaggcggctaattatccgttttgtacgattgaacccaatgtcgggcgtgttgccgttcccgatgaccgtatggaagttttacgtaaaattgataattcgcaaaagctggttccgacacaattagaatttgttgatattgcaggtcttgttaaaggggcttcgcgcggggaagggctcggcaatcaatttttggccaatattcgtgaggttgatgccatcatccatgtgctacgttgttttgaaaatggcgatattgtccatgtggaaggttccgttgacccggtacgcgatgcggcaacaattgaaaccgaattaatgttggcggacttggattcattggaaaaacgcattgtgccggttgaaaaaaaagccaaatccggcgataaagaggcaaaggccatgctcgcggttatgcaaccggctttacaggctttgcgcgatggcaaattggccaaaacggttcgtccgacagatgcggatgctgccaaattgttcgaccagatgtacttgttaacggccaaacccgttttgtatgtttgcaacgtggatgaagaacatgctgccacgggcaacgaattttcaaaagcggttcaaaatatggcgataagccaaggaaatgcctgtgtcattatttcggctaatattgaagctgaagtggctcaattgaccgatccggatgagcaaaatgaatttttgcaaactttgggcttgacacaaacagggctaaaccgtattattaaagctggatacaccttattggggttggaaacttttttcacctgcgggccaaaggaagttcatgcatggactatgaaaaaagggacatctgctccttctgcggccggtattatccattcggattttgaacgtggttttattcgggccgaagttgtatcttatgacgattatgttgcctttaatggggaagcgggggctagagaaaatggtaaactcagacaagaaggcaaatcgtatattatgcaagacggggatgtggtacacttcttgtttaatgtataattaaaaagggggaagaatgccggcaattttgtggcgtgaacagatggaattgggctataagccgctggatgacgaacataaagaattcgtcgaggtggttcaaaaatccgttgaagctgcaaatgtgggtgattttgccactatggaatgggtttttgaaaaagcttatgattatgcccgtgaccatttttcacatgaagaagaagtaatggaacgtatcggtttccccgatttggaaaatcatatgaaaagccatcaggtttttattaaaaatatttccgaattgcgtcaacagtatgaagtgtctgcttccgaacatgaaaaacgccaactggctatgaaaacggcggattttttaagcgtttggctgattggccatattttaagccgcgataaggtttataagccgtatttggtgcgtttgcgcaatatgccgccacgcatgaattattaagtcatatttcttttgtcgttataaatttgttaaatcatcttcatataaatatttgttagaatgagataatttatctaaaatcaaatttattataatttttccctttcctcttgacgttgtctgacaaacaccttatactctttttgttgaggagaacacatgcaaaagaaattaacatttttgcgtttagttttaaaggcctattttaacggcatgttttcctatgccaattctttttgttattcctttttttggtattttgccccaaaagggcaataattatataactttcatccatatctttgtatctatatctcatttttttaatttaaaagggaataactatgtctacattagcggctgtaagacagcaaaaagcgcaaacaacattaaaaaaacaaccgattttatccaaattactcgctctttacacggctttgggcaaactaaaaacgcacagcaatactctgaaagaggaaaacatggtcttgcgcctccaaaacgaacgtttaacgcaaaattgtgcattaatggaagaacaggttttgcaactacgcgaaattgtaacaattcaagccaatgaacagatgcaattgaaaaaaacaattacagaggcaaaaagcaaagaaaaatattaaattaatttattaaaatcaatttgttatttttacatctttgacagatttttttgtcttggaatacttatggtatgaaaaaaggcatcggacggttatacactgaaatcgaaatcaaaaatacaactgcttcaagaatggcaaagggaaaaagacggcagcttgaagaacgtcgcaatcaattgtttgctttgcgtaaggtgcctcaatcccaaacagaaaattcttttttcaaatcacagaaagatttcgtcgaccgcatggttccacttgcaacctaaccgaatatgaaggccgatagattgaaacagtgccatgattcatgccatttcaataaagccaaaatgaaacaactgacggttttgcgtaatgcacatcgtttatcttaagtggagatagaacggctggtgagatgtctcgggaaagggctgcaatgccaaatggcatctcttgtttttttgcgcaaaaagacagtctttgaaaaaatgcgtagcagtcctggtcagattcatgatagggcgtggcgctaaataatcgttattcgtttttttaaaaaacattaataaaaaatgggttttaatgcactaccattttgatgctccgagcatatctttttatgcgaaatcatgaaaggctattggcgccccggcaatgtatgacataagtcagaaacaataaaattcaaaaataaaatgaatgggttgttgtcaaaaagagctttgtaaataattaattacctactgaatttttatgaaaggtaaaggcacactttttgttaaaaaagtgcaaaaaaaagttgtatttatttttcaagtagtgtatgaatcaataaaggtttcaataatttttgcatttaagaaaggttcatcatgcttaaaggtttttctttaaagaagttacttaatatattttcatcggatatggccattgatttgggtaccgctaacacattggtttacgttcgcggacacggcgttgtactgaatgaaccttccgttgtggctttggccgaagcgcgcggcaaaaagcatgtgattgccgtcgggaatgaagccaaacaaatgctcggtcgtactcctggacaaatccaagccattcgaccgttgcgtgatggcgtgattgccgattttgatgttgccgaagaaatgattaagcgttttattcaaaaggctttggggcgtagtacgttaactcgccccgtaattgttgtttgtgtgccgtccggttcaacagcggtggaacgccgtgcgattcaagaagcggccgaaaattcacgcgctcgtaaagttttcttgattgaagaacctatggctgccgctattggggcagggttgcctgtgaacgaaccgtcgggcagcatggttgttgatatcggtggtgggactactgaggtggcagtgatgagtttgggcggcattgtttatgcacgttccgtacgcgttggcggcgataaaatggatgaagccattatttcgtatatccgcagaaaccacaacttgcttatcggcgaagcatcggccgaacgcattaaaaaggccattgcggccgcttccattccggaagatggggagggcaaaaccatttcggtcaaagggcgcgatttgatgaacggcgtgccgaaagaaattatggtatccgaacgccaaatggctgaggcattggccgaaccggtcagccaaattgttgaatcggttaaggttgcattggaacataccgatcccgaattggcatctgattttgttgatcgtggtattatgatgaccggtggcggcgcgttgttaaaacgtttggatgaagtgttgcgcgatgcgactggattgcctgtatcagttgctgaaaatccgttgcagtgtgtggcggtcggcactggcaaaacgggggaagaaatcgataagttcgaaaatttattaaccagcatgtattaattgccatttaaggaaagaagaacgttcaatggaaaatagattttttcggttgaaaaaaattaaggcgcaagttaaacagtttgcgcccgttctttttttattaatagctttgggcttaatcggtatcggtgtatccaaaaatccatatttgattcagacaaaaatcgcggtagcggatgcatttgtaccgattgttaacattgttacaaagccgatagattgggtcaaagccggcgttaatgaagtcagcaacatttttaaagtccacgcattgaataaaaaactgatggatgaaaatgaaaaattaattgcgtggaaaaatatcgcttataaattggctgctgacaaaaaagaattggaaaaacaactcaattatgtcccgtcaaaggatatcagctatttaacggcgcgtattgttgccgataacggtggtaa

SEQ ID NO: 657 - DNA, 19758 bp, synthetic construct
  misc_feature 1..19758: note = Synthetic
  source 1..19758: mol_type = other DNA
cgtcagctcgtgtcgtgagatgttgggttaagtcccgcaacgagcgcaacccctgctatcagttgccatcaggtagagctgggcactctgataggactgccggtgacaagccggaggaaggtggggatgacgtcaagtcatcatggctcttacgagttgggctacacacgtgctacaatggcagctacagagaggagcgaagctgtgaagcggagccaatcttaaaaagctgtctcagttcggattgttctctgcaactcgagaacatgaagttggaatcgctagtaatcgcggatcagcatgccgcggtgaatacgttcccgggtcttgtacacaccgcccgtcacgccatgggagtttgttctgcctgacggcgttgagctaacctgcttgcaggaggctggcgaccacggtagggtaagcgactggggcgaagtcgtaacaaggtagccgtaggggaacctgcggctggatcacctcctttcaaagaagaagagccttaggttgtactgtccacatatcctttagtgattgcgagagcgggtttgtagctcaggtggttagagcgcacgcctgataagcgtgaggtcggaagttcaagtcttcccagacccaccacttaattgggggtatagctcagctgggagagcacctgctttgcaagcagggggtcaggagttcgaacctccttacctccaccaagagattgagtgggggtaagcaatcgggatagttataacaaagagtaaataggaagagaagcaaaaagaattagatgaaaatctaatggagtatataagagtagaaatacacctttttaatctatgtagacataggataaaaagcgggtagattttactgagtatacggtatagatgagcttaaatgaatttaagtttatttatacgttaagaatcaagcgataggtaagggcatctggtgaatgccttggcaatcagaggcgaagaaggacgtgatacactgcgaaaagccgtggggagctgtgaataggcattgatccgcggatctccgaatggggaaacccacagagtaatctgtatcaatatctgaatctatagggtattgaagcgaacgcagggaactgaaacatctaagtacctgtaggaaaggaaatcaaccgagactccgagagtagtggcgagcgaaatcggaccagccaatttgcgattagataagaaccggaagtgtctgggaaggcacatcatagagggtgatagtcccgtacgggtagaaagtttaattgtaagagagtagggcggagcacgagaaattctgtctgaagataggtcgaccacgatctaaggctaagtactactgattgaccgatagtgaaccagtaccgtgagggaaaggtgaaaagcaccccgacaaggggagtgaaagagaacctgaaaccggatgcctacaagcagtcggaggggcattaagccctgacggcgtaccttttgtataatgggtcagcgagttagtttatgtagcaagcataagccgataggtggatgcgtagcgaaagcgagtgttaatagcgcgttaagttacatgaattagacccgaaaccgagtgatctagccatgaacaggttgaaggttgggtaacaccaactggaggaccgaacccactcccgttgaaaaggtaggggatgatttgtggctaggggtgaaaggccaatcaaactcggaaatagctggttctccgcgaaaactatttaggtagtgcggtaggcgaacaccatgaggggtagagcactgaaagagctaagggggagcgatccttactaaactttatcaaactccgaatactcatgagtgatacttaccagacagacagtaggtgctaaggtctattgtcgagagggaaagagcccagaccgtcaactaaggtccctaaattatggctaagtggtaaaggaagtgggatatccaaaacagtcaggaggttggcttagaagcagccatcctttaaagaaagcgtaatagctcactgatctaaataagacgtcctgcgccgaagatgtaacggggctaaagccatataccgaagttacgggattgtattgcaatagatacaatcggtagcggagcgttctgtaggcctgcgaaggtgaaccgtaaggtttgctggaggtatcagaagtgagaatgctgacatgagtagcgaaaagaagagtgagagactcttccgctgaaagtccaaggtttcctgcgtaaagctaatctgcgcagggttagtcggcccctaaggcgaggcagagatgcgtagctgatgggaacacggttaatattccgtgaccagttaggaagtgacggatacagtagtttgtacatgcttaatggattgtgtgtgcaagtgatgtgtcccgggaaatagccctaacgaagaccgtacccgaaaccgacacaggtggacaggtagagtataccaaagcgcttgagagaactatgttgaaggaactaggcaaaatgcttgtgtaacttcgggataagcaagcccggttttaaggcaacttaaggccgggggcacatactagggggtagcgactgtttaacaaaaacacaggactctgcgaaattgaaagatgaagtatagggtctgacgcctgcccggtgccggaaggttaaggagagatgtgagagcattgaactgaagccccggtaaacggcggccgtaactataacggtcctaaggtagcgaaattccttgtcgggtaagttccgacctgcacgaatggcgtaacgacttccccgctgtctccaacataggctcagcgaaattgaattctgagttaagatgctcagtacccgcggttagacggagagaccccgtgaacctttactatagctttgcagtggtattaggtaagacatgtgtaggataggtgggatgctatgaaggtaggacgctagttttactggagcagacgttgaaataccacccttgtgttatttgatatctaacctacttccgtaaaccggaagagggaccctgcatggtgggtagtttgactggggcggtcgcctcccaaagagtaacggaggcgcgcgaaggttggctcagattggtcggaaatcaatcgttgagtgcaatggcataagccagcctgactgcgagagcgacggttcgagcagagacgaaagtcggtcatagtgatccggtggtcccgagtggaagggccatcgctcaacggataaaaggtactccggggataacaggctgattccgcccaagagttcacatcgacggcggagtttggcacctcgatgtcggctcatcacatcctggggctggagaaggtcccaagggttcggctgttcgccgattaaagtggtacgcgagctgggttcagaacgtcgtgagacagttcggtccctatctgccgtgggtgtaggatacttgaaaggatttgtctttagtacgagaggaccgagatgaacatacctctggtgtaccagttgttctgccaagagcaacgctgggtggctaagtatggaagggataaccgctgaatgcatctaagcgggaaacccaccttgaaacaaggtatccccattagaaccgtgatagacgatcacgttgataggcagggtgtgtaagcgcagcaatgtgtttagctaacctgtactaatagttcgattggcttgattttttaacgtataaataagcttaaaagcgttaagcctttaggttgacatttaattctttggagtgtttagatgatccggtggtcatagcgaaggtgtcccacacgatcccattccgaactcggctgttaaacccttttgcgccaatggtactttgtcttaaggcacgggagagtaggtcgctgccggatcttctaaacattccgatctcctcctaatgttgttatagttaagcctctttcttttagaaagaggcttttttattatatatctgaaaaatattccgagtttgcccgcggccgaatgctttgccgtcggggcagcgccgtccctcatctttgatcatgggcaaactgtttgatacttcgttaacaagccctttggacaactcagttccatgcctttgattacgcttgaaccgtagctttgccgcagtttcagaagccccgctttaccgggggacagtgcttcaaactgacgggacaaggaatggtaaaaggaaaaagaagatgatgatggttgggaggagaggttgacggttgtttcgggcgggaggcttacaattgtttccgtgagcggaaaatgcggacgggggcggtattttttaggtaatataaaagaacggacggtaaaaaaccgtccgttctccctttttaaacaacatatgaatatcaaaaaatattgtctgctgttaaaaagtaaccactttgacaacaaacaatatttgatatcctttgccgtctttgtgataacattgatatggatacgatatttttatcttcaagccgggtagaaccatttgccgtgccgggtgtgaagataacagaactttaggatcgtgggcaggtgctgcgggaaagcggatgggaaggagggctgagaggggggccgtttcgtccgatgccggcgaaaaacgggaaggcaggccggagcggggagccggggaggagtaaaagtaggtgataacgggtgaaagacggcaaaggcgccgggcggagaaaatcgttgaaccgggaaaaggcggcaaatgagagaacagggaaactgacaagggggagaagtgctgaacatagaaaagaacggggagctttctttgaaaacctgcacggaaaattgacggcaaaaaatggcggacgattgccgggaaagcggatgttggaaagggaaaaggtaataataatttgcgatcagataaatatcgggacagaaatgacggaagcgtgacaaaaatgcagcacaggcccggataaatgaaaacaaggcggggaagacggatccgggactgcggccagatgccggatattggaagttctttgatgtcaatgggtggcgccggaaggttggatttttggtgtcgtcgaccggcggacggcggatgcggctgccgtcagtcaaaaagttaggagattgtccgagaggagacatggcggcggcaggttaaaaaataattgctcgaagcgggacttcgtccgatgtccggaaaaacaggttgtgtatcgtgaagttgagcttcggaacgtgaatgtgcgatgataaaaaaataagcttaacaattttagcagaaaatattacttccagccgtgcgtttataaaaaatatccacacaaaaaaaagaaatatgcaatggatatggcaaggactaccctgtgtatgggcgataaatggaaaaataaaatgcggaaataggaaatttacataaaaaaaaggatgacgtcccatataaaatatgaaacgtcagagccctactcgtaaagaaacattcgattattatagcttcctttccaaatcagatataaaatcaaaaaagtttctttaccaaaaggatattacggaatgcagtttccgtcaagtgtaatttttactttcggaataaaacgcctaggattgcggtttttccggacagtgaaagaaaaagcgcaaaactgccgtttttaagaaagtccgttttaaggttgaaaatgtttttttatgtatcggtgcagcgtactccagctgcattcgaattcccgggcgatttccgcttgtgaaatgttgcgggccagcatccgttcgatctgccggtgatgttttgccagtttttggtaattgaaaccataagggcggcccaagtgtcgtccttcggatttcagtcgtttgagagattctctggtcctttgcgaaatcaactggcgttcaatttccccggacagggaaaaggcaaaagcgaggacttttgattggatgtcggctcccagtcggtaattttccttcaatgtccaaatttggcattctttttccagacatttttgcaaaatgcccatcacttccaacatgttgcgtccaagtcttgatatttcggtggcaacgatgacgtctcccgcttttatcttttgcaggagttttcccagtttgcgctgtttcagctctttgcgcgacgaaatggtttccgtgatccaggcgtcgattttaaggtgctgccgctttgaaaattctttaatttcgtggtgttggttttcgatgttttgatggtcggttgaaacgcgcacatatccatatatcatgatcagttcctcgtaaaaagtttttaactcggaaagaccatatcatttaaaagagcgtttattttcttcacttaaaaataataacacaagttttgtccaaaatccgcaggggcggtgccgccaaagaaagcatgtatccggagatcggccggggagaagcgcagttcgcagccaaaggctgtttggcaaccttgggagaagaggggcagtgacaatccgcgcggtccggtgttgcgtgagtgcggcaatagtccgttcgcttttcagccggttggcgaaaaacaaaaatttcttgcataaaccttttaatatgctaatgttttaatatattacaatttttaaggctggcgggatgaaaaagaaaatttttggttttgatttggggattgcttcgatcggctgggcggttattgatcatagtgatgaaaattttgatccggaaacaggagagattattgaaggaaaagtcgttggctgcggagtgcgctgttttccggtagcggaaaacccgaaggacggttcctcgctggcggcgccccggcgggaaaaacgcttgttgcgccggatcacccgccgcaaggccaggagaatgcttggtattaaacgtctgtttgtcgccaagggactggtcgcttcaacgacggaactggaagcgctttatgccgagcaaacaggcggcgacgtttggaatctgcgtgcagaggccttgcggcgtccgctgtcaaaagaggaactgctgcgggttttgacccatctggcaaaacatcgcggtttcaagtcttaccgtaaggctgctgaagaggcggacaaggaaagcggccgcatcttgacggcgattgcggaaaaccggaaggaaacggtcggttttcaaacgctggcgcagatgatcgttgaacgggccaaacattccgatgatcacaaaatgcgcaactatacgccgcaaaaaggcccaaacaagggcgtagccgtttatgtcaattccattccgcgggaagaaattgaaaaggaaacaaaactgatttttgagtatcagaagcaattcggtttgtttaccgaggacctataccgcgatttttgcaagattgccttccgttaccgggaagcggggagcgtcgggcacatggtcggcagatgccggtttgaatcggaacagccgcgggcgccgaaagaagccccttcggcagagctctttgttgctttaagcaaaattaataacctgaaagtgaccgttgacggcgaacgccgtttcttaaacggagaagagcggaaggctttgcttgaattgctgaaaaacaccaaggaagtcaaatattcgactatcaaaaacaaattgtttaaaagccgggaagtcttttttgacgacgtcaactatgcgcaaaaaacaaaaaaaggaaaaagcggggaagaaaaagcggttaatcccgaagacgcaaagttttacgccatgaaaggctggcataagctgaaagctgctttttcgccggagcagtggaaagaggtcggctcgaatttgccgttgctggatctcggcatgaccgcggtcgtctgtgagaaaaacgacgccggaatagagcgctttttaagcgaaaaaggaataccggaggattatcgggaagtttttaaaaagctgaccggcagcgagtttattaatctgtcgctgaaagccctttataagctcaatccttatctggcagaaggtttgaagtataaccaagcctgcgaaaaggccggatacgacttccgcgaggacggcatcaaactggcggaggaaaaaggtctgctgctgccgccgattgcaaatgacaaactgacgacggtgccggtcgttaaccgtgcggttgcccagttccgcaaagtatataacgccatggttcggacatacggtgcgccggatcagataaatctggaaatcggccgggatttgaagaaaagccgtgacgagcgcaatcagatcatgcggcggcaaaaggaaaacgagaccgaacggaaagaagccgaggacgggttggaaaaggaaggccttgccgcaaacggtaaaaacatgttgaaataccgtttgtaccggcagcaaaacggcaaatgcatctattccggaaaagcgattgacctccgccgcctggacgaaaacggttattgcgacgttgaccacatcattccttattcccgttcgcttgacgatggtcagaacaacaaagtgctttgtctggccgaagaaaaccgcaagaaaggaagccaaactccttatgaatatctggagccgctcggacgatgggaagagtttgaaaccgtcgttaacaccacgccgtcgattaaccgttacaaaagaaacaacttgttgaacaaagattataaagaaaaagaaaacgatttggaatttcgcgaaagaaacgccaacgacaactcctatattgcccgttatgtcaaacggtatttggaagatgccgttgatttttccgccagttcctgcgcaatcaaaaaccggatccaggtgcgcaccggttcgttaaccgattatctccgtcaccaatgggggctgataaaagaccgtaacgaaagcgacaggcatcatgctcaggatgcggttgtcgttgcctgcgccacacagggaatggtgcagaaactgtcaaaactttccgcgatttttgaaaacaaggacgattttcgcagaaagaaagcggaaaaactcgggcacgaggaggccgaagtctggtacaaatacatcaaacagcaaattcgggaaccttggagcggttttcggactgaagtgctggccagcctggagaaggttttcgtttcccgcccgccgcgcaaaaacgcaaccggttctgcacataaagatacaattttttctaagagcgaaaagaagggaagtttgccgattcgttatggaatggcagaaaaagaaaatatgtttcggcttgatgtttttcgaaaggaaaatcatttttatattgttcccatatatgttgttgatttggttgactgtaaagaatttattgatgctccgcagccatatgagtatgtaaatggttcgtttataaaaatagatgaaagctttaattttatgtttagcttgtataaagatgattatgttgaaataaccagtaaagatgagtgtattaaaggatatgttaatcaatataatgcacaaagtggccaactttatataggtagtgttgataattcaccgatttttagaattaagacctctacttttttgcgggacgacaacattttgttgaaaataggtgatcaggaatatattggaaaaataggtaagtttgataatgagaaaaaacaagtcgttattaatggattaaaaaataattttatgataaatgcacttgttaagttaaataaaaaaggagatgaaacaaaaaatatccaaactgaaaaaagttatactaaaatgtcaaatgaaaagaaaatttgtttaaacgttgttgatagtatcgaaaaatatcaggtggatccgctgggacgtattgccaaagtcaaaaaagaaacccggttgccgttgacgatgataaaaaagaatcggcataaaaagggggagtgaaaaaatgggctggcggattttgcaaataagcaaaccctgtaaattatcggtcaaaaaccgccggcttgtgtatgaaccttttgaagaagcttccctgacgattccgttggaagacatatccgtcgttatcttggagaacaggcagattttgttgtccaactcattgctttccgaattgccggaatatgacattgttctttttacctgtgatttttcacatctgccgtccggtgtgctgtttccgttccatacccattcccgctattcgcagatagcctggctgcagcgggatatttccgagccgttaaaaaaacgcctgtggcaggaggtgataaaagccaaaataaacaaccaggccgcggcgttggaaattttaaataaatccaatgccggcaaattaagggaaattgccaaactggttcaatccggcgacaccaaaaattcggaagcttttgccgccggaatttactggaaaagcttttttacggattttaaccgcagcgatgatgacgatatccgcaatgcctcactcaattacggttatgcggtgttgcgcggctgcatggccagaagcgtcgtcggcgcgggattgttgccttgtttcggtattcaccatgccaacaagctcaatcagtttaatctggtagacgacctgattgagccgtttcgtccgtttgttgattatgttgtcgccaaactgtcgttgtccgaaaacaagcaattgaatgttgaattgaaaaatcggatcttgcaggttttaggaatgaattgccgattgaggggagaagacgtcaaccttttgaaaagctgcgaaatgacggcggaaagcctggtcagggcaatgaccgtaaaaaaagtttcagagttaaaattgccggccatggaaaaagaaacgtttttgttgtaaggttgtggataagtggccagggaaggagaaagatatatgcggatgatcgtctttttcgacctgccgaccttaaccaaaaccgaccggcgcaacgcgagtcgcttgaggaatttcctgctgaaggacggttataccatgttgcagttgtccgtctattcccgcatctgcaaagggcaggatgacgtcgaaaaacatgctaaacgcttgaaatccttgattcccaagaccggaagtgttagactgttaaccgtaaccgaaaagcaatatgcgtctatggaaatcttggtcggaagcttaaaaaaagaggaagaaataggtgacaaacagctccttttgctctgaatttcctgtttttaaaaacaaaaaagccgttgatattcaacggcttaatttgaatctattatagcatatctgatttggaaaggaagctataactcaataatccggatggacacgcttttcgctattatagcatatctgatttggaaaggaagctataacatgtaccgccgccgattcgacaaaatcggcattatagcatatctgatttggaaaggaagctataacctagtcacatcgtcgacagattcgacacttattatagcatatctgatttggaaaggaagctataactcaatgacccggatggacacgcttttcgctattatagcatatctgatttggaaaggaagctataactgccgtgtcggattatatccgggctttaatattatagcatatctgatttggaaaggaagctataaccctatttgacatcgaaaaggctggcaaatgattatagcatatctgatttggaaaggaagctataactgtttacacacaagaagcaatcgacggctattatagcatatctgatttggaaaggaagctataacttaaagtaattaagagtaaatctgtaaccgattatagcatatctgatttggaaaggaagctataactgaacatttttgaacaagataatttcatcaattatagcatatctgatttggaaaggaagctataacatatgaaagatggacaactgcatacctcttattatagcatatctgatttggaaaggaagctataactaatataagtggatttggcttcgccgcgggattatagcatatctgatttggaaaggaagctataactcaaaaggatattatccgcctcaaccgagaattatagcatatctgatttggaaaggaagctataacgcgctttagaatgttgcagcaaatagaaaaattatagcatatctgatttggaaaggaagctataaccttaaacgcgttgagcaatctgaaaatgcaattatagcatatctgatttggaaaggaagctataaccttattatttaaggctttttattatttagaattatagcatatctgatttggaaaggaagctataacgcatgaggcgttagccctgtatgccgaggaattatagcatatctgatttggaaaggaagctataacttgatgcaggaggggcgtttatgaagccggattatagcatatctgatttggaaaggaagctataacgtcaaaaccgtacgacagagctgccgccgtattatagcatatctgatttggaaaggaagctataactatttcaatgtctttaactccacaggtttgattatagcatatctgatttggaaaggaagctataactcatgatattttgcaaccttgcaaacctgtattatagcatatctgatttggaaaggaagctataactgtttttttctattatacatggatataaatattatagcatatctgatttggaaaggaagctataaccgcttgttgcggcaataggtacaaggtcgcattatagcatatctgatttggaaaggaagctataacgatttatatgcgctacagctatcttcagcgattatagcatatctgatttggaaaggaagctataactcggagaatacggagcaaaacaagcagcagattatagcatatctgatttggaaaggaagctataacaaatgcgaagcaatcaatgacattaacggcattatagcatatctgatttggaaaggaagctataactgataactcggtcgatctgaacttttccggattatagcatatctgatttggaaaggaagctataactgataactcggtcgatctgaacttttccggattatagcatatctgatttggaaaggaagctataaccgttccatcggcgtcaccgtcaaggacagcattatagcatatctgatttggaaaggaagctataaccaatctccttgacaagttcactctattatgattatagcatatctgatttggaaaggaagctataacttggtgttacatcgattccattaaagaacaattatagcatatctgatttggaaaggaagctataacgatattttgctactttgcaaacctgtccgcattatagcatatctgatttggaaaggaagctataacaaaagaaaactatattgccgacaaaattctattatagcatatctgatttggaaaggaagctataacattgaattgccacaaatacgaacgttggcgattatagcatatctgatttggaaaggaagctataactcaggcagtgcgaaccgttggccgcttcccattatagcatatctgatttggaaaggaagctataactacaattgtataatatcaaacttcataagcattatagcatatctgatttggaaagaacgttacaataaaatcatcaagctggttataactaacatttttaacttttacagaaacttattataacatccattttttaaaaaagaaataacaaccattggttatttaaaaatccggaacaatctgaaaaccatgtcatgcaggggcatggtctgccgcagcttatgcggatgttgcctgcacaaccactcatctgccggtcaggatcgttccggacggcgcaattataatcgaaattaatcttctttagaagcattttcagaaagttcttgcgctttttgctcaagttgctttttttctgaaagagctttttcgattccttctttggaaaagtctttgggcagtacttcgtagattatatccatggttattctcctcatatttattatgaatttttaccaaaatgtccgtttgaaagcaataaaaggtttgatattcggggaagtctcaggtgtattttccgggcaaatgcggcaaaattctcatacggaaaataaaggccgacggtaaatgctgcggccgttgatacggggaatttatgttttatcggattcggacaaacggatattttccggcaagtcgattttatttatttaagtttctcccgcagatattttgccgtatagcttttttccgattttgcaacttcttccggcgtgccctgagcgacgattcggccgccgccgtcaccgccttccggtcccaggtcgacgatataatcggccactttgatcacgtccaggttatgctcgatgacaaccaccgtattgccttggtcgaccaaagtttgcaacactttcaacagacggttgatgtcttcaaagtgcagtcccgtggtcggttcgtccagaatataaagggttttgccggttgcccgtttggaaagttcttttgacagcttgatgcgctgggcttcgccgccggacagggtagttgccggctggccgaggtgaatgtagccgaggccgactttgcgcaaaaggtccagccggtttttgatcgacgggatggagtcgaaaaagtcaaaagcctcgtcgacggtcatgtccaaaacgtcggcgatggatttgcccttatatttgacttccagcgtttcgcggttgaagcgtttgcctttgcagacgtcgcaggcaacgtaaacgtcgggcagaaagtgcatttcgattttggtcacgccgtcgcctttgcaggcttcgcagcggccgccggcaacgttgaaggaaaaacgcccggcgttgtatcctctcgccttggcttccggcagaccggcgaaccagtcgcggatgtaggtaaacaggccggtataggtggccggattggaacgcggcgtgcggccgatcggcgactggtcgatgtcgatcactttgtcaatgttttccagcccggtcagtttgtcgtaaatgccggccggttcgcggctgccgtttaattccttgttgacggctttaaacagggtttcgagaataagcgaagacttgcccccgccggaaacgccggtaacgcaggtcatggtgccgagcgggattttcaggtcaacgtctttgagattgttggttttgactccgcttaaggtgataaagccgccgtttcccttccgccgtttgcggggaacggaaatttccctttgcccggtcagatattgggcggtcaggctttccggcgtgttcagcacttcttcgacggtgcctttggccactacatggccgccgagttcgccggcgccgggtcccatgtcgaccagataatcggcggcgcggattgcgtcttcgtcgtgttcgaccacaatcaccgtattgccgatgtcgcgaagccgggtcagggtttcgagcaggcggtcgttgtcgcgttggtgcaggccgatggacggttcgtctaagacatacatcactccggtcagtcccgaaccgatctgcgaggccagccggatgcgctgggcttcgccgccggacaaggtgccggactggcgggaaagcgacagatattccagtccgacgttatttaaaaagttcagccggtcaacgatttcctttaagattttgtgagcgatttcccgtttttgcgggcttagtttttcctccgcgccggcaaaccatccgagcgcctgtttgatcgacatggcggaaacgtccatgatgtccagtcccgcgattttaattgccagcgcttccggtttcaggcgtttgccgccgcagtgctcgcagacggcggcagactgatactgggcaaattcgtcgcgggtggcctgcgagtccgtttccataaaacggcgttccagattgttgacgacgccttcaaacggcttgtgggtgacaaaacgcgaataatacatcggcaccggttccgagccggaaccgtataaaatgacgtttttggcgttttcgggcaggtctttccacggcgttttcattgagatgccgagatattggcaaagcgattccaacgtgtcgttgtaaaagccgtgtttgcggctgtaccagggcagaatggcgccttgggccatcgacaggttttcgttgggtacgatcagacacggatccatatacagccgggcgccgatgccgtcgcaataagggcaggcgccgtacgggttgttaaaggaaaacagccgcggctcgatttcctcaatcgtaaaaccgctgaccgggcaggcaaatttggaagaaaaggtgatccggctgccggaagccgcatcttcggcaaacatcaggccgtcgccgagtttgagcgccgtttccgtcgattgtgccagacggctttccagtcccggtttgattaccagccggtcgaccaccacttcaatgtcgtgtttctggtttttgtttaattccggcagttcttcgattccgtagacggcgccgtcgattttcaggcgctggtaaccctgccgctgcaggttttcgaattcttttttgaattcgccttttttgccgcgggcgatcggcgccagcagcagaatcctgcttccctccggcagggcggcgatgcggtcgaccatttgcgacacggtctgcgattcgatcggcagaccggttgccggcgaatagggggtgccggcccgtgcccacagcagacgcatgtaatcgtagatttcggtaaccgtgccgacggtcgaacgcggattgtgcgaggtggttttctgttcgatggaaatggccggagaaagcccttcgatcgagtcgacgtccggttttttcatcagttcgagaaactggcgggcataagaggaaaggctctcgacgtagcgtcgctgcccttccgcataaaccgtgtcaaacgccagcgacgatttgcccgaaccggacaggccggtgatgacggtcagcctgtttttgggaatgctgatgtctatgttttttaaattgtgttcgcgcgcgcctctgatttcgataaaattgtgttccgccatcttttttctccggtctgacaatataaacacgaaagaacaaaaaggcaacaaaaaagcatgtccgccggcgtttgaccggaacggaaaacgagggcggcgcaatgcaagatttatgtcaataaaaagctgtccccgcttgcgaagcggcggttaaagatgtaaaataaacattaatttttcttatgaatttagaagattgtcatggttgattacaaatatgtctgtttatttgccgcaagctggctgacgtctttttccgtccgcgcggatatgaacgtggcggtcattgccccgaccgacggcgattacaaatattacagcgaagaactgattaacggcgccaaggtggcggtggacgagattaacgaaaacggcggacttaaaggcaaaaaagtcaatctggtgcagatcgacgacccctgcgacgacactctctcgctgaccaccgcgcagatgattgccgtcaaccgttcggaggaagacaagatgcatctggtgctggggcctcagtgcatcaaccggacggaaaagattgccgccgttttttcgggcgcgaagatttttcagatccatccgaccggcagcagccgcgccttgtatcagacggcgcatcgcggaccggtggagctggtaggctattcggaacagcaggcggttgattttttccgctattatgccgataattacgccgatcgcaaactggcggtggtttatgacggcagcagtccggaaatgaccggtattgccaaggaaattcagcaccattttaccaaagcggggctgggggaaaagctgaccgcgttcagcctggagccttttaacggcgacgcccgccggattgcgcaggcggtcagggccggcggcgccgaagcgctgtttatgatgggcggcggagaagtgacgatgcaggccgtgcgttatctgaaggcggacgaccggaattttgttgtcttcgtcaaccgttatttcagcggcagtaaatttatccgcaaaatgggcgaatatgcggacggcatttatattctttcgctgccttcgctcagcagcaatcccgattttgccgaagacctggtcaggctccgtttgtggggaattgaaccggacgggctgatggcttacggttatttgtcggtcaaaatgtgggaggaactggttaaccgggccggcggcttcgtttatgaaaatttgcagaaaagcctgaacaaacagctgattcgcgccggctggggaaccgtcgtctataccgacggagaaccggaccgttcgctgaaatatgcgatataccgttttgaaaacggagaatatgcacaagtctactgattttgcttggatgatgaaatcttttcccctatatttgttgaagttgttaattttttataaaggtataaaataatggttggaagtatcaataaagtcattttggtcggaaatctcggcgcggatccgcgggtcaacaccacgcaaaacggcagcaaggtcgtcaccttaagcgttgccacttcggacacttggaaagacaagctttccggcgagagaaaagaacgtaccgaatggcaccgggtcgtggttttcaacgcccagctggcggacgtggcggaaaggtatctgcgcaaagggtcgaaagtgtatattgaaggccagctgcagacccgcaagtgggaagatgccaacggacaggaaaaatataccaccgaagtggtgctgcaaaacttcagttccaacctgatcatgctggacggccgcggcgacgccggcgccggagcagacgtgttttccggttcgtcttccgcttcttccggctgggattccgcaccggcagcgggcggtgctgccgatctcgacgacgacatcccgttttagccgttttttcctgcaatcgaaaaggccccgttttgacggggctttttttgtatattgtgtgcggtaatccggtcgcggaaaatcttttttggggtgcaatcggcaagccgtctgacaaaagaaaaataaattttctgtcatgacttgcaataatggacaaaaaagcgtatgattgtttctgcaaagaagaatcgggaaaaattgaagaaaaagaggttgttatggcagaaaaggaaatcaacgaacgcagacgcggtctgctcaaacgggtgctggaaagcaaaaccctgaaccgtacgctgaaaacggtggtgctcagcgcctttctttccggcaaggcgatgagttccaaagcggtcgaaccgcaggtaaaagacgcggcggttgacgccgtggagcagaagacggaggcgatgccttcgcagcggctgagcgaaaactatgccaaactgcaaaaatttgccgattttccggaattgtcgccggcgcaggcggcttttgtcgatcatacctacatcgtggaccacgatctctggatcgaacgcgacagcattgcggtcaaatgcgtggacagccgttatgtgcaggatttgtcgctgacggacgttgcctgtgcgcgggagtgcaaagcgctgccgaaaagcgaacagagcgcggacggctatatttcgtttcggcgcgatccgggcgtgatcggcagcgacggcaagtcaacctataacggaattatatcaaccgatttcaacgcgaccaaacaatctattgtactgatgtattgcagcaacaacgaacaggttgccgctctcggcagacagatgataaacggcgatcatgcggaaacggcggaaaggattcgccggcagatttaccgcgaggacgggacaatcgtcggcccggaggaactggcaaaggttttaaacggcagggattttttgtcgctgaaaggaaaaatcaagaacctgggcagccggtcggcctttaaccggatgtatcagcgggtctgccgttccgattatgaaaacagcgtcgcttttcaggaggattatgcgctcaagttttacggcatcgggcgcaagggcaaccttaacacgc

SEQ ID NO: 658 - DNA, 16331 bp, synthetic construct
  source 1..16331: mol_type = other DNA
  misc_feature 1..16331: note = Synthetic
ctcccccaagagtccacatcgacggggaggtttggcacctcgatgtcggctcatcacatcctggggctgaattcggtcccaagggttcggctgttcgccgattaaagtggtacgcgagctgggttcagaacgtcgtgagacagttcggtccctatctgccgtgggtgtaggatacttgaaaggatttgtctttagtacgagaggaccgagatgaacatacctctggtgtaccagttgttctgccaagagcaacgctgggtggctaagtatggaagggataaccgctgaatgcatctaagcgggaaacccaccttgaaacaaggtatccccattagaaccgtgatagacgatcacgttgataggcagggtgtgtaagcgcagcaatgtgtttagctaacctgtactaatagttcgattggcttgattttttaacgtataaataagcttaaaagcgttaagcctttaggttgacatttaattctttggagtgtttagatgatccggtggtcatagcgaaggtgtcccacacgatcccattccgaactcggctgttaaacccttttgcgccaatggtactttgtcttaaggcacgggagagtaggtcgctgccggatcttctaaacattccgatctcctcctaatgttgttatagttaagcctctttcttttagaaagaggcttttttattatgtatctgaaaaatattccgagtttgcccgcggccgaatgctttgccgtcggggcagcgccgtccctcatctttgatcatgggcaaactgtttgatacttcgttaacaagccctttggacaactcagttctatgcctttgattacgcttgaaccgtagctttgccgcagtttcagaagccccgctttaccgggggacagtgcttcaaactgacgggccaaggaatggtaaaaggaaaaagaagatgatgatggttgggaggagaggttgacggttgtttcgggcgggaggcttacaattgtttccgtgagcggaaaatgcggacgggggcggtattttttaggtaatataaaagaacggacggtaaaaaaccgtccgttctccctttttaaacaacatatgaatatcaaaaaatattgtctgctgttaaaaagtaaccactttgacaacaaacaatatttgatatcctttgccgtctttgtgataacattgatatggatacgatatttttatcttcaagccgggtagaaccatttgccgtgccgggtgtgaagataacagaactttaggatcgtgggcaggtgctgcgggaaagcggatgggaaggagggctgagaggggccgtttcgtccgatgccggcaaaaaacgggaaggcaggccggagcggggagccggggaggagtaaaagtaggtgataacgggtgaaagacggcaaaggcgccgggcggagaaaatcgttgaaccgggaaaaggcggcaaatgagagaacagggaaactgacaagggggagaagtgctgaacatagaaaagaacggggagctttctttgaaaacctgcacggaaaattgacggcaaaaaatggcggacgattgccgggaaagcggatgttggaaagggaaaaggtaataataatttgcgatcagataaatatcgggacagaaatgacggaagcgtgacaaaaatgcagcacaggcccggataaatgaaaacaaggcggggaagacggatccgggactgcggccagatgccggatattggaagttctttgatgtcaatgggtggcgccggaaggttggatttttggtgtcgtcgaccggcggacggcggatgcggctgccgtcagtcaaaaagttaggaaattgtcagagaggagacatggcggcggcaggttaaaaaatattgctcaaagcgggacttcgtccgatgtccggaaaaaacaggttgtgtatcgtgaagttgagcttcggaacgtgaatgtgcgatgataaaaaaataagcttaacaattttagcagaaaatattacttccagccgtgcgtttataaaaaatatccacacaaaaaaaagaaatatgcaatggatatggcaaggactaccctgtgtatgggcgataaatggaaaaataaaatgcggaaataggaaatttacataaaaaaaggatgacgtcccatataaaatatgaaacgtcagagccctactcgtaaagaaacattcgattattataacttcctttccaaatcagatataaaatcaaaaaagtttctttaccaaaagaatattacggaatgcagtttccgtcaagtgtaatttttactttcggaataagacgcctaggattgcggttttcccggacagtgaaagaaaaagcgcaaaactgccgtttttaagaaagtccgttttaaggttgaaaatgtttttttatgtatcggtgcagcgtactccagctgcattcgaattcccgggcgatttccgcttgtgaaatgttgcgggccagcatccgttcgatctgccggtgatgttttgccagtttttggtaattgaaaccataagggcggcccaagtgtcgtccttcggatttcagtcgtttgagagattctctggtcctttgcgaaatcaactggcgttcaatttccccggacagggaaaaggcaaaagcgaggacttttgattggatgtcggctcccagtcggtaattttccttcaatgtccaaatttggcattctttttccagacatttttgcaaaatgcccatcacttccaacatgttgcgtccaagtcttgatatttcggtggcaacgatgacgtctcccgcttttatcttttgcaggagttttcccagtttgcgctgtttcagctctttgcgcgacgaaatggtttccgtgatccaggcgtcgattttaaggtgctgccgctttgaaaattctttaatttcgtggtgttggttttcgatgttttgatggtcggttgaaacgcgcacatatccatatatcatgatcagttcctcgtaaaaagtttttaactcggaaagaccatatcatttaaaagagcgtttattttcttcacttaaaaataataacacaagttttgtccaaaatccgcaggggcggtgccgccaaagaaagcatgtatccggagaccggccggggagaagcgcagttcgcagccaaaggctgtttggcaaccttgggagaagagggggcagtgacaatccgcgcggtccggtgttgcgtgagtgcggcaatagtccgttcgcttttcagccggttggcgaaaaacaaaaatttcttgcataaaccttttaatatgctaatgttttaatatattacaatttttaaggctggcgggatgaaaaagaaaatttttggttttgatttggggattgcttcgatcggctgggcggttattgatcatagtgatgaaaattttgatccggaaacaggagagattattgaaggaaaagtcgttggctgcggagtgcgctgttttccggtagcggaaaacccgaaggacggttcctcgctggcggcgccccggcgggaaaaacgcttgttgcgccggatcacccgccgcaaggccaggagaatgcttggtattaaacgtctgtttgtcgccaagggacaggtcgcttcaacgacggaactggaagcgctttatgccgagcaaacaggcggcgatgtttggaatctgcgtgcagaggccttgcggcgtccgctgtcaaaagaggaactgctgcgggttttgacccatctggcaaaacatcgcggtttcaagtcttaccgtaaggctgctgaagaggcggacaaggaaagcggccgcatcttgacggcgattgcggaaaaccggaaggaaacggccggttttcaaacgctggcgcagatgatcgttgaacgggccaaacattccgatgatcacaaaatgcgcaactatacgccgcaaaaaggcccaaacaagggcgtagccgtttatgtcaattccattccgcgggaggaaattgaaaaggaaacaaaactgatttttgagtatcagaagcaattcggttggtttaccgaagatttatactgcgatttttgcaagattgccttccgttaccgggaagcggggagcgtcggacacatggtcggcagatgccggtttgaatcggaacagccgcgggcgccgaaagaagccccttcggcagagctctttgttgctttaagcaaaattaataacctgaaagtgaccgttgacggcgaacgccgtttcttaaacggagaagagcggaaggctttgcttgaattgctgaaaaacaccaaggaagtcaaatattcgactatcaaaaacaaattgtttaaaagccgggaagtcttttttgacgacgtcaactatgcgcaaaaaacaaaaaaaggaaaaagcggggaagaaaaagcggttaatcccgaagacgcaaagttttacgccatgaaaggctggcataagctgaaagctgctttttcgccggagcagtggaaagaggtcggctcgaatttgccgttgctggatctcggcatgaccgcggtcgtctgtgagaaaaacgacgccggaatagagcgctttttaagcgaaaaaggaataccggaggattatcgggaagtttttaaaaagctgaccggcagcgagtttattaatctgtcgctgaaagccctttataagctcaatccttatctggcagaaggtttgaagtataaccaagcctgcgaaaaggccggatacgacttccgcgaggacggcatcaaactggcggaggaaaaaggtctgctgctgccgccgattgcaaatgacaaactgacgacggtgccggtcgttaaccgtgcggttgcccagttccgcaaagtatataacgccatggttcggacatacggtgcgccggatcagataaatctggaaatcggccgggatttgaagaaaagccgtgacgagcgcaatcagatcatgcggcggcaaaaggaaaacgagaccgaacggaaagaagccgaggacgggttggaaaaggaaggccttgccgcaaacggtaaaaacatgttgaaataccgtttgtaccagcagcaaaacggcaaatgcatctattccggaaaagcgattgacctccgccgcctggacgaaaacggttattgcgacgttgaccacatcattccttattcccgttcgcttgacgatggtcagaacaacaaagtgctttgtctggccgaagaaaaccgcaagaaaggaagccaaactccttatgaatatctggagccgctcggacgatgggaagagtttgaaaccgtcgttaacaccacgccgtcgattaaccgttacaaaagaaacaacttgttgaacaaagattataaagaaaaagaaaacgatttggaatttcgcgaaagaaacgccaacgacaactcctatattgcccgttatgtcaaacggtatttggaagatgccgttgatttttccgccagttcctgcgcaatcaaaaaccggatccaggtgcgcaccggttcgttaaccgattatctccgtcaccaatgggggctgataaaagaccgtaacgaaaacgacaggcatcatgctcaggatgcggttgtcgttgcctgcgccacacagggaatggtgcagaaactgtcaaaactttccgcgatttttgaaaacaaggacgattttcgcagaaagaaagcggaaaaactcgggcacgaggaggccgaagtctggtacaaatacatcaaacagcaaattcgggaaccttggagcggttttcggactgaagtgctggccagcctggagaaggttttcgtttcccgtccgccgcgcaaaaacgcaaccggagagattcaccaggaaacaattcgcacggttaatccgaaacgtaaaaaatataatgaaaaggaaattctgtccggcatcaaaatccgcggcgggctggccaacaacggcctgatgctgcgaacggacgtttttgtaaaaaagaacaaaaagggaaaagacgaattttacctggtgccggtttatctttccgatatgggaaaagagctgccgaacaaggcgatggttccgggtaaaaaagaaaacgaatggcttgaactggatgaaacctatcagtttaaattcagcttttatatggacgatttgataaaaatcaaaaaaaaggaaaatgagattttcggctatttcagaggaacaaacagggcgacggcgtcagtatccgttgccacccatgaccgcagtcatacttttgaaggcatcggcgtcaaaactctggatggtatcgaaaaatatcaggtggatccgctgggacgtattgccaaagtcaaaaaagaaacccggttgccgttgacgatgataaaaaagaatcggcataaaaagggggagtgaaaaaatgggctggcggattttgcaaataagcaaaccctgtaaattatcggtcaaaaaccgccggcttgtgtatgaaccttttgaagaagcttccctgacgattccgttggaagacatatccgtcgttatcttggagaacaggcagattttgttgtccaactcattgctttccgaattgccggaatatgacattgttctttttacctgtgatttttcacatctgccatccggtgtgctgtttccgttccatacccattcccgctattcgcagatagcctggctgcagcgggatatttccgagccgttaaaaaaacgcctgtggcaggaggtgataaaagccaaaataaacaaccaggccgcggcgttggaaattttaaataaatccaatgccggcaaattaagggaaattgccaaactggtccaatccggcgacaccaaaaattcggaagcttttgccgccggaatttactggaaaagcttttttacggattttaaccgcggcgatgatgacgatatccgcaatgcctcactcaattacggttatgcggtgttgcgcggctgcatggccagaagcgtcgtcggcgcaggattgttgccttgtttcggcattcaccatgccaacaagctcaatcagtttaatctggtagacgacctgattgagccgtttcgtccgtttgttgattatgttgtcgccaaactgtcgttgtccgaaaacaagcaattgaatgttgaattgaaaaatcggatcttgcaggttttaggaatgaattgccgattgaggggagaagacatcaaccttttgaaaagctgcgaaatgacggcggaaagcctggtcagggcaatgaccgtaaaaaaagtttcagagttaaaattgccggccatggaaaaagaaacgtttttgttgtaaggttgtggataagtggccagggaaggagaaagatatatgcggatgatcgtctttttcgacctgccgaccttaaccaaaaccgaccggcgcaatgcgagtcgcttgaggaatttcctgctgaaggacggttataccatgttgcagttgtccgtctattcccgcatctgcaaagggcaggatgacgtcgaaaaacatgctaaacgcttgaaatccttgattcccaagaccggaagtgttagactgttaaccgtaaccgaaaagcaatatgcgtctatggaaatcttggtcggaagcttaaaaaaagaggaagaaataggtgacaaacagctccttttgctctgaatttcctgtttttaaaaacaaaaaagccgttgatattcaacggcttaattggaatctattatagcatatctgatttggaaaggaagctataacgtctgttgcaatcatattcaaagattattcattatagcatatctgatttggaaaggaagctataacgttttgacttggcatataccattaccatatattatagcatatctgatttggaaaggaagctataactaagatatcgctcgttgctgcaataggtatattatagcatatctgatttggaaaggaagctataacataagggaagctttggctggcatgtttgctattatagcatatctgatttggaaaggaagctataacttttgaccttgctttgttttaaagatatccattatagcatatctgatttggaaaggaagctataacatcagttggcgaagcattgttttataagccattatagcatatctgatttggaaaggaagctataaccttacttccgcagtaccagtcaaaccaataattatagcatatctgatttggaaaggaagctataacggtacggacgataatatcctgaacaatatcattatagcatatctgatttggaaaggaagctataactacggcaatatcgtttaatgccaatacgatttattatagcatatctgatttggaaaggaagctataacccctgctgataggtatgtcttgcccttacgattatagcatatctgatttggaaaggaagctataacagcgtaacaacaattttctgtcctgtatcaattatagcatatctgatttggaaagaacgttacaataaaatcatcaagctggttataactaacatttttaacttttatagaaacttattataacatccattttttaaaaaagaaataacaaccattggttatttaaaaatccggaacaatctgaaaaccatgtcatgcaggggcatggtctgccgcagcttatgcggatgttgcctgcacaaccactcatctgccggtcaggattgttccggacggcgcaattataattgaaattaatcttctttagaagcattttcagaaagttcttgcgctttttgctcaagttgctttttttctgaaagagctttttcgattccttctttggaaaagtctttgggcagtacttcgtagattatatccatggttattctcctcatatttattatgaatttttaccaaaatgtccgtttgaaagcaataaaaggtttgatattcggggaagtctcaggtgtattttccgggcaaatgcggcaaaattctcatacggaaaataaaggccgacggtaaatgctgcggccgttgatacagggaatttatgttttatcggattcggacaaacggatattttccggcaagtcgattttatttatttaagtttctcccgcagatattttgccgtatagcttttttccgattttgcgacttcttccggcgtgccctgagcgacgattcggccgccgccgtcaccgccttccggtcccaggtcgacgatataatcggccactttgatcacgtccaggttatgctcgatgacaaccaccgtattgccttggtcgaccaaagtttgcaacactttcaacagacggttgatgtcttcaaagtgcagtcccgtggtcggttcgtccagaatataaagggttttgccggttgcccgtttggaaagttcttttgacagcttgatgcgctgggcttcgccgccggacagggtagttgccggctggccgaggtgaatgtagccgaggccgactttgcgcaaaaggtccagccggtttttgatcgacgggatggagtcgaaaaagtcaaaagcctcgtcgacggtcatgtccaaaacgtcggcgatggatttgcccttatatttgacttccagcgtttcgcgattgaagcgtttgcctttgcagacgtcgcaggcaacgtaaacatcgggcagaaagtgcatttcgattttggtcacgccgtcgcctttgcaggcttcgcagcggccgccggcaacgttgaaggaaaaacgcccggcgttgtatcctctcgccttggcttccggcagaccggcgaaccagtcgcggatgtaggtaaacaggccggtataggtggccggattggaacgcggcgtgcggccgatcggcgactggtcgatgtcgatcactttgtcaatgttttccagcccggtcagtttgtcgtaaatgccggccggttcgcggctgccgtttaattccttgttgacggctttaaacagggtttcgagaataagcgaagacttgcccccgccggaaacgccggtaacgcaggtcatggtgccgagcgggattttcaggtcaacgtctttgaggttgttggttttgactccgcttaaggtgataaagccgccgtttcccttccgccgtttgcggggaacggaaatttccctttgcccggtcagatattgggcggtcaggctttccggcgtgttcagcacttcttcgacggtgcctttggccactacatggccgccgagttcgccggcgccgggtcccatgtcgaccagataatcggcggcgcggatggcgtcttcgtcgtgttcgaccacaatcaccgtattgccgatgttgcgaagccgggtcagggtttcgagcaggcggtcgttgtcgcgttggtgcaggccgatggacggttcgtctaagacatacatcactccggtcagtcccgaaccgatctgcgaggccagccggatgcgctgggcttcgccgccggacaaggtgccggactggcgggaaagcgacagatattccagtccgacgttatttaaaaagttcagccggtcaacgatttcctttaagattttgtgagcgatttcccgtttttgcgggcttagtttttcctccgcgccggcaaaccatccgagcgcctgtttgatcgacatggcggaaacgtccatgatgtccagtcccacgattttaattgccagcgcttccggtttcaggcgcttgccgccgcagtgctcgcagacggcggcagactgatactgggcaaattcgtcgcgggtggcctgcgagtccgtttccataaaacggcgttccagattgttgacgacgccttcaaacggcttgtgggtgacaaaacgcgaataatacatcggcaccggttccgagccggaaccgtataaaatgacgtttttggcgttttcgggcaggtctttccacggcgttttcattgagatgccgagatattggcaaagcgattccaacgtgtcgttgtaaaagccgtgtttgcggctgtaccagggcagaatggcgccttgggccatcgacaggttttcgttgggtacgatcagacacggatccatatacagccgggcgccgatgccgtcgcaataagggcaggcgccgtacggattgttaaaggaaaacagccgcggctcgatttcctcaatcgtaaaaccgctgaccgggcaggcaaatttggaagaaaaggtgatccggctgccggaagaaacgtcttcggcaaacatcaggccgtcgccgagtttgagcgccgtttccgtcgattgtgccagacggctttccagtcccggtttgattaccagccggtcgaccaccacttcaatgtcgtgtttctggtttttgtttaattccggcagttcttcgattccgtagacggcgccgtcgattttcaggcgctggtaaccctgccgctgcaggttttcgaattcttttttgaattcgccttttttgccgcgggcgatcggcgccagcagcagaatcctgcttccctccggcagggcggcgatgcggtcgaccatttgcgacacggtctgcgattcgatcggcagaccggttgccggcgaatagggggtgccggcccgtgcccacagcaaacgcatgtaatcgtagatttcggtaaccgtgccgacggtcgaacgcggattgtgcgaagtggttttctgttcaatggaaatggccggagaaagcccttcgatcgagtcgacgtccggttttttcatcagttcaagaaactggcgggcataagaggaaaggctctcgacgtagcgtcgctgcccttccgcataaaccgtgtcaaacgccagtgacgatttgcccgagccggacaggccggtgatgacggtcagcctgtttttgggaatgctgatgtctatgttttttaaattgtgctcgcgcgcgcctctgatttcgataaaattgtgttccgccatcttttttctccggtctgacaatataaacacgaaagaacaaaaaggcaacaaaaaagcatgtccgccggcgtttgaccggaacgaaaaacgagggcggcgcaatgcaagatttatgtcaataaaaagctgtccccgcttgcgaagcggcggttaaagatgtaaaataaacattaatttttcttatgaatttagaagattgtcatggttgattacaaatatgtctgtttatttgccgcaagctggctgacgtctttttccgtccgcgcggatatgaacgtggcggttattgccccgaccgacggcgattacaaatattacagcgaagaactgattaacggcgccaaggtggcggtggacgagattaacgaaaacggcggacttaaaggcaaaaaagtcaatctggtgcagatcgacgacccctgcgacgacactctctcgctgaccaccgcgcagatgattgccgtcaaccgttcggaggaagacaagatgcatctggtgctggggcctcagtgcatcaaccggacggaaaagattgccgccgttttttcgggcgcgaagatttttcagatccatccgaccggcagcagccgcgccttgtatcagacggcgcatcgcggaccggtggagctggtaggctattcggaacagcaggcggttgattttttccgctattatgccgataattacgccgatcgcaaactggcggtggtttatgacggcagcagtccggaaatgaccggcattgccaaggaaattcagcaccattttaccaaagcggggctgggggaaaagctgaccgcgttcagcctggagccttttaacggcgacgcccgccggattgcgcaggcggtcagggccggcggcgccgaagcgctgtttatgatgggcggcggagaagtgacgatgcaggccgtgcgttatctgaaggcggacgaccggaattttgtcgtcttcgtcaaccgttatttcagcggcagtaaatttatccgcaaaatgggcgaatatgcggacggcatttatattctttcgctgccttcgctcagcagcaatcccgattttgccgaagacctggtcaggctccgtttgtggggaattgaaccggacgggctgatggcttacggttatttgtcggtcaaaatgtgggaggaactggttaaccgggccggcggcttcgtttatgaaaatttgcagaaaagcctgaacaaacagctgattcgcgccggctggggaaccgtcgtctataccgacggagaaccggaccgttcgctgaaatatgcgatataccgttttgaaaacggagaatatgcacaagtctactgattttgcttggatgatgaaatcttttcccctatatttgttgaagttgttaattttttataaaggtataaaataatggttggaagtatcaataaagtcattttggtcggaaatctcggcgcggatccgcgggtcaacaccacgcaaaacggcagcaaggtcgtcaccttaagcgttgccacttcggacacttggaaagacaagctttccggcgagagaaaagaacgtaccgaatggcaccgggtcgtggttttcaacgcccagctggcggatgtggcggaaaggtatctgcgcaaagggtcgaaagtgtatattgaaggccagctgcagacccgcaagtgggaagatgccaacggacaggaaaaatataccaccgaagtggtgctgcaaaacttcagttccaacctgatcatgctggacggccgcggcgacgccggcgccggagcagacgtgttttccggttcgtcttccgcttcttccggctgggattccgcaccggcagcgggcggtgctgccgatctcgacgacgacatcccgttttagccgttttttcctgcaattgaaaaggccccgttttgacggggctttttttgtatattgtgtgcggtaatccggtcgcggaaaatcttttttggggtgcaatcggcaagccgtctgacaaaagaaaaataaattttctgtcatgacttgcaataatggacaaaaaagcgtatgattgtttctgcaaagaagaatcgggaaaaattgaagaaaaagaggttgttatggcagaaaaggaaatcaacgaacgcagacgcggtctgctcaaacgggtgctggaaagcaaaaccctgaaccgtacgctgaaaacggtggtgctcagcgcctttctttccggcaaggcgatgagttccaaagcggtcgaaccgcaggtaaaagacgcggcggttgacgccgtggagcagaagacggaggcgatgccttcgcagcggctgagcgaaaactatgccaaactgcaaaaatttgccgattttccggaattgtcgccggcgcaggcggcttttgtcgatcatacctacatcgtggaccacgatctctggatcgaacgcgacagcattgcggtcaaatgcgtggacagtcgttatgtgcaggatttgtcgctgacggacgttgcctgtgcgcgggagtgcaaagcgctgccgaaaagcgaacagagcgcggacggctatatttcgtttcggcgcgatccgggcgtgatcggcagcgacggcaagtcaacctataacggaattatatcaaccgatttcaacgcgaccaaacaatctattgtactgatgtattgcagcaacaacgaacaggttgccgctctcggcagacagatgataaacggcgatcatgcggaaacggcggaaaggattcgccggcagatttaccgcgaggacgggacaatcgtcggcccggaggaactggcaaaggttttaaacggcagggattttttgtcgctgaaaggaaaaatcaagaacctgggcagccggtcggcctttaaccggatgtatcagcgggtctgccgttccgattatgaaaacagcgtcgcttttcaggaggattatgcgctcaagttttacggcatcgggcgcaagggcaaccttaacacgcttaaccaaaaggtgaaacaggcaaacggcggcaaagcagacttgaccaaagtccgcccggcggttatcgcttccgccctgagcgagatgattgccaaagggcacggaactctggctgccaacccgttggcgttgaagctgaaaaccctcaacggcacggcagcgtcaaccaacatcatcaatgcgcgggttttgggaccgtccgcgcgcgctcaggcggacaaaatggcaaaatatgactatctgaccttaaagttggtgcgggagatgttttctttgaccaataatctggctttttatgaggcggtaaacaaaaagattgaagagcatgaagcggtgctggaaggctgccggcaggatctgctgaaccgttctttgccgcaaagtgtcggtgacgggctgaaaatccgctctccgcaggaacaaatgcggcagataaagctgaaagcggataccgcgctgttgaaaaaattcatggatgaacgcggtatcggcaaataaaaaaaagacggttgtttggtaaaaaaagttccgatttaaatcggaacttttttttgcgcaaagacggaaatcatttccatggctcaacaaccggatcgtcaaaaatgatcggttgttttgcaaccataattttgactctcgtgcgggctgtggacgttctttcgccggttgatgcggttgcctgacattccagcatgtaacaggaaaataccctgccgtcggccgtttcgtctgccagttcggtcagtttcggttcctgcaaagcgtaacgaacttccggcacgggcaatacatattccccgtcatggtcggagaaaaaggccttttccgtcgtaaacagcaccggtacttcaaaatcggcgtaacaaacggtatattccgtttgataactgcggatgatgagaggaccatccgttttttccctcagcatttttccttccgtgggccggaggtcgcatacatgtttgacggaaggagcctcaattgccggaagaagcgtatcgcagccttccgcatacttcagttccgtccgataagtcagttcgccggtcccttgcctgcttattttgatccagctgatgtaggaagcggcgtctttaccgtcaaaaccggatgcttccaccatcatttccgaaccgttgaactcaggttgatccaagatgtccgtcgaacaactgcaaactgcggcacccagtgcgacagctgccaaaaagaaaaaatttttcatagtgataataatatttagaactaaatcacagtttatcgtaaaatgacgatgttttcaaataaaatgttatgtcggaaaacgtcttgtcggcagagccgtgtctgttcaaaaagccttcctgaaaacggaaggcttttgcgccgggtcagaaccgcgctttcaaattgtgccaaaactttttgagggcggcgttttttgcgtttgctgcaagctgtttcgccggaacttcgtcggcgttcctttccgtttcttgtgccggcaacaggttgccgtcctgttgtccggcaaccggaaaagcggttgtttttgcttttttccgcattttttcggctcttttcaaaaagctttcttcag

SEQ ID NO: 659 - DNA, 14427 bp, synthetic construct
  misc_feature 1..14427: note = Synthetic
  source 1..14427: mol_type = other DNA
taaagctaatctgcgcagggttagtcggcccctaaggcgaggcagagatgcgtagtcgatgggaatcaggttaatattcctgaaccaactaggaagtgacggattcagtaaattgtatgtccttattggattggatgtgcagtgaatgagtcccaggaaatagccctagtatagaccgtacccgaaaccgacacaggtggacaggtagagaataccaaagcgcttgagagaactatgttgaaggaactaggcaaaatacttgcgtaacttcgggataagcaagccccatttctgggcaaccagaggtggggggcacatactagggggtagcgactgtttaacaaaaacacaggactctgcgaaattgaaagatgaagtatagggtctgacgcctgcccggtgccggaaggttaaggagagatgtgagagcattgaactgaagccccggtaaacggcggccgtaactataacggtcctaaggtagcgaaattccttgtcgggtaagttccgacctgcacgaatggcgtaacgacttccccgctgtctccaacatagactcagcgaaattgaattctgagttaagatgctcagtacccgcggttagacggagagaccccgtgaacctttactatagctttgcagtggtattaggtaagacatgtgtaggataggtgggatgctatgaaggtaggacgctagttttactggagcagacgttgaaataccacccttgtgttatttgatatctaacctacttccgtaaaccggaagagggaccctgcatggtgggtagtttgactggggcggtcgcctcccaaagagtaacggaggcgcgcgaaggttggctcagattggtcggaaatcaatcgttgagtgcaatggcataagccagcctgactgcgagagcgacggttcgagcagagacgaaagtcggtcatagtgatccggtggtcccgagtggaagggccatcgctcaacggataaaaggtactccggggataacaggctgattccgcccaagagttcacatcgacggcggagtttggcacctcgatgtcggctcatcacatcctggggctggagaaggtcccaagggttcggctgttcgccgattaaagtggtacgcgagctgggtttagaacgtcgtgagacagttcggtccctatctgccgtgggtgtaggatacttgaaaggatttgtccttagtacgagaggaccgggatgaacatacctctggtgtaccagttgtttcgccagaagcaacgctgggtagctaagtatggaagggataaccgctgaatgcatctaagcgggaaacccaccttgaaacaaggtatccccattagaaccgtgatagacgatcacgttgataggcagggtgtgtaagcgcagcaatgtgtttagctaacctgtactaatagttcgattggcttgattttttaacgtataaataagcttaaaagcgttaagcctttaggttgacatttaattctttggagtgtttagatgatccggtggtcatagcgaaggtgtcccacacgatcccattccgaactcggctgttaaacccttttgcgccaatggtactttgtcttaaggcacgggagagtaggtcgctgccggatcttctaaacattccgatctcctcctaatgttgttatagttaagcctctttctaaaagaaagaggcttttttattatgtatctgaaaaatattccgagtttgcccgcggccgaatgctttgccgtcggggcagcgccgtccctcatctttgatcatgggcaaactgtttgatacttcgttaacaagccctttggacaactcagttccatgcctttgattacgcttgaaccgtagctttgccgcagtttcagaagccccgctttaccgggggacagtgcttcaaactgacgggacaaggaatggtaaaaggaaaaagaagatgatgatggttgggaggagaggttgacggttgtttcgggcgggaggcttacaattgtttccgtgagcggaaaatgtggacgggggcggtattttttgggtaatacaaaagaacggacggtaaaaaaccgtccgttttccctttttaaacaacatatgaatatcaaaaaatattgtctgctgttaaaaagtaaccactttgacaacaaacaatatttgatatcctttgccgtctttgtgataacattgatatggatacgatatttttatcttcaagccgggtagaaccatttgccgtgccgggtgtgaagataacagaactttaggatcgtgggcaggtgctgcgggaaagcggatgggaaggagggctgagaggggggccgtttcgtccgatgccggcgaaaaacgggaaggcaggccggagcggggagccggggaggagtaaaagtaggtgataacgggtgaaagacagcaaaggcgccgggcggagaaaatcgttgaaccgggaaaaggcggcaaatgagagaacagggaaactgacaagggggagaagtgctgaacatagaaaagaacggggagctttctttgaaaacctgcacggaaaattgacggcaaaaaatggcggacgattgccgggaaagcggatgttggaaagggaaaaggtaataataatttgcgatcagataaatatcgggacagaaatgacggaagcgtgacaaaaatgcagcacaggcccggataaatgaaaacaaggcggggaagacggatccgggactgcggccagatgccggatattggaagttctttgatgtcaatgggtggcgccggaaggttggatttttggtgtcgtcgaccggcggacggcggatgcggctgccgtcagtcaaaaagttaggaaattgtccgagaggagacatggcggcggcaggttaaaaaataattgctcgaagcgggacttcgtccgatgtccggaaaaaacaggttgtgtatcgtgaagttgagcttcggaacgtgaatgtgcgatgataaaaaaataagcttaacaattttagcagaaaatattacttccagccgtgcgtttataaaaaatatccacacaaaaaaaagaaatatgcaatggatatggcaaggactaccctgtgtatgggcgataaatggaaaaataaaatgcggaaataggaaatttacataaaaaaaaggatgacgtcccatataaaatatgaaacgtcagagccctactcgtaaagaaacattcgattattatagcttcctttccaaatcagatataaaatcaaaaaagtttctttaccaaaaggatattacggaatgcagtttccgtcaagtgtaatttttactttcggaataaaacgcctaggattgcggtttttccggacagtgaaagaaaaagcgcaaaactgccgtttttaagaaagtccgttttaaggttgaaaatgtttttttatgtatcggtgcagcgtactccagctgcattcgaattcccgggcgatttccgcttgtgaaatgttgcgggccagcatccgttcgatctgccggtgatgttttgccagtttttggtaattgaaaccataagggcggcccaagtgtcgtccttcggatttcagtcgtttgagagattctctggtcctttgcgaaatcaactggcgttcaatttccccggacagggaaaaggcaaaagcgaggacttttgattggatgtcggctcccagtcggtaattttccttcaatgtccaaatttggcattctttttccagacatttttgcaaaatgcccatcacttccaacatgttgcgtccaagtcttgatatttcggtggcaacgatgacgtctcccgcttttatcttttgcaggagttttcccagtttgcgctgtttcagctctttgcgcgacgaaatggtttccgtgatccaggcgtcgattttaaggtgctgccgctttgaaaattctttaatttcgtggtgttggttttcgatgttttgatggtcggttgaaacgcgcacatatccatatatcatgatcagttcctcgtaaaaagtttttaactcggaaagaccatatcatttaaaagagcgtttattttcttcacttaaaaataataacacaagttttgtccaaaatccgcaggggcggtgccgccaaagaaagcatgtatccggagatcggccggggagaagcgcagttcgcagccaaaggctgtttggcaaccttgggagaagaggggcagtgacaatccgcgcggtccggtgttgcgtgagtgcggcaatagtccgttcgcttttcagccggttggcgaaaaacaaaaatttcttgcataaaccttttaatatgctaatgttttaatatattacaatttttaaggctggcgggatgaaaaagaaaatttttggttttgatttggggattgcttcgatcggctgggcggttattgatcatagtgatgaaaattttgatccggaaacaggagagattattgaaggaaaagtcgttggctgcggagtgcgctgttttccggtagcggaaaacccgaaggacggttcctcgctggcggcgccccggcgggaaaaacgcttgttgcgccggatcacccgccgcaaggccaggagaatgcttggtattaaacgtctgtttgtcgccaagggactggtcgcttcaacgacggaactggaagcgctttatgccgagcaaacaggcggcgacgtttggaatctgcgtgcagaggccttgcggcgtccgctgtcaaaagaggaactgctgcgggttttgacccatctggcaaaacatcgcggtttcaagtcttaccgtaaggctgctgaagaggcggacaaggaaagcggccgcatcttgacggcgattgcggaaaaccggaaggaaacggtcggttttcaaacgctggcgcagatgatcgttgaacgggccaaacattccgatgatcacaaaatgcgcaactatacgccgcaaaaaggcccaaacaagggcgtagccgtttatgtcaattccattccgcgggaagaaattgaaaaggaaacaaaactgatttttgagtatcagaagcaattcggtttgtttaccgaggacctataccgcgatttttgcaagattgccttccgttaccgggaagtggggagcgtcgggcacatggtcggcagatgccggtttgaatcggaacagccgcgggcgccgaaagaagccccttcggcagagctctttgttgctttaagcaaaattaataacctgaaagtgaccgttgacggcgaacgccgtttcttaaacggagaagagcggaaggctttgcttgaattgctgaaaaacaccaaggaagtcaaatattcgactatcaaaaacaaattgtttaaaggccgggaagtcttttttgacgacgtcaactatgcgcaaaaaacaaaaaaaggaaaaagcggggaagaaaaagcggttaatcccgaagacgcaaagttttacgccatgaaaggctggcataagctgaaagccgctttttcgccggagcagtggaaagaggtcggctcgaatttgccgttgctggatctcggcatgaccgcggtcgtctgcgagaaaaacgacgccggaatagagcgctttttaagcgaaaaaggaataccggaggattatcgggaagtttttaaaaagctgaccggcagcgagtttattaatctgtcgctgaaagccctttataagctcaatccttatctggcagaaggtttgaagtataaccaagcctgcgaaaaggccggatacgacttccgcgaggacggcatcaaactggcggaggaaaaaggtctgctgctgccgccgattgcaaatgacaaactgacgacggtgccggtcgttaaccgtgcggttgcccagttccgcaaagtatataacgccatggttcggacatacggtgcgccggatcagataaatctggaaatcggccgggatttgaagaaaagccgtgacgagcgcaatcagatcatgcggcggcaaaaggaaaacgagaccgaacggaaagaagccgaggacgggttggaaaaggaaggccttgctgcaaacggtaaaaatatgttgaaataccgtttgtaccagcagcaaaacggcaaatgcatctattccggaaatgcgattgacctccgccgtttggatgagaacggctattgcgacgttgaccacatcggcaactacactaagaacttctattacgaccagcgccatatcgatttggtcaagaacctcgagctcgtggatgtcgacgccatccgccaagcaaacttccgtgtagccatcgacacagtcaactccgttggtggcatcatcctgcccaagttgttgggtcaattgggtgtctcgaaagtgacaggtctctacacagagcccaccggcgacttccaccacaaccctgagccgctcgaacagaatctccacgacatcatggctcttatgagcaagggagaacacgacatcgcttttgtcgtcgaccccgacgttgaccgtctggcgcttatctgcgaggacggcaccatgtatggcgaggaatacacgctcgtgaccgtagccgactacgtactccaaaatacaccgggaaacaccgtctcgaacctcagttcgactcgcgccttacgcgacgtgaccgagaagtacggatgccaatacacccccgctgctgtcggagaggtcaacgtagtcaccaaaatgaaagaaacaggcgctgtcatcggcggcgagggcaacggcggcgtcatctatcccgccgcccactatggccgcgacgcccttgttggcatcggcctcatcctgacatatctggccaaacgcaagatgaaagccagcgaactccgcgccacctatcccaactattacatcgccaaaaaccgcatcgacctcacgccgggaaccgatatcttggctatcctgcaaagcgtcaaggaacattacaaggacgagaaagtcacggacatcgacggtgtgaagatagactttgccgacaagtgggtacaactccgcaagagcaataccgaacccatcatccgcgtctattccgaagctcccacaatggaagcggccaacgctttggggcaacaggtgatcgacatcgtctactcgatgatcaagcaagactaatccgaaccattcaaactcaccacctgcgggaaggcactctacacacggaggcctttccacaggtttttatttacctaaactttaaaacggatgaaaccaaccggactatgcacgctggggctctgcgccctacccgccatggcagccgcccaaggacgatataacatcgtttatgtcatgacggacgaccacaccgcccaaatgatgagttgctacgacaaccgcaacgtcgaaacacccaacctcgaccgcattgctgccgacggtgtcaaattcgtcaacagtttcgtagccaattccctctctggacccagccgcgcatgtatgctcaccggcaagcacagccacaaaaacggattcacaaacaacgaacacggcgttttcgacggcagccaacagaccatgccgaaactcctgcaaaaggcaggttaccagaccgccatcatcggcaagtggcatctggtgagcacgcccacaggatttgactactggaacatactccccgcgcaaggcgactactacaaccccgacttcatcaccatggaaaacaagacggtgcgcgaaaagggctacgtgaccaacatcatcaccgacaagagcatcgactggctcgagcacaagcgtgaccgttcaaaaccttttgccctcttcgtccaccacaaagcctgtcaccgtgcttggcttccggaattgaagtacctcaacctctacgaagacaagacattccccctgcccgagactttctacgacgactatgaaggccgtcctgccgcagctgcccagcagatgaatatcgctaaggacatggacatggcctacgatgtaaagatgtacacaaaaggtgtgaccaagacgcccttggctcctacctacgaaagcatgataggccgcctcgaccctgaggatcgtgtcaagtatgacgccttctataacaaactcaccgaggacttcaacgccaagaacctgaaaggcaaggaactggctgaattcaaattccaacgctacatgcgtgactacgccaaggtgctcaaaagccttgacgataatgtcggccgcctgctcgactacctcaaagaaagcaacctgctcgactcgaccctcgtagtctacacttccgaccaaggcttctacatgggcgaacacggatggttcgacaagcgcttcatctatgaagagtcgctcaacacaccactcgtcatgatgctccccaaaggcctcgacgcccgcggagacattgaggaacccgtccagaacatagactacgcgcccaccttcctcgaactggccggcgcccccatccccgacgacatccaaggctgctcgctggtccccctgctcaaaggtgagcaccccaaagactggcgcaaagccgtttactaccactactacgagtatccggcagagcatatggtgaagcgccactatggcatccgcaccgaacgctacacgttgacccacttctacaacgatattgacgtctgggaactctacgacctcgaaaaagaccccaaccaagtccacaacatctacggccaacctggcaccgaagccctcacggctgatttgaagaagcagttacgcgagctgcaaatccagtacgacgatcccattcttaaaaagtatccgctctaaccccatggcggattcccatgacgagcgcccccgtcccatttgcggacggaggcgctcgttgcgctttctgacgccatacacatttatatattatatatgtgtgccccgtcgtgacattcatcattccaacagtcacaggaaatcatcatcaagtcaacatccacctttttccgatccgacgccccgcatctcttagtcggcgactaagattttccagtcgccgtcttgattccttctgtcagccacctcgtaaaacacatctcaccgccaccatacatccgaactccacacgaaagttcggaaactactctgctaacaaacgataaatcgtaaaaaataaacttatgccaagcctcccgaaacgcagacttttgtaaatttgaggagcaagcttcagacacacacatcccggacacaatgccatacggccactcctgacaagcatcctcaggccggcgcgcctgttccaccataaacctacgattatgaaaaacctgctcatccccctgttcgccctgctgtttccctgctgtttacatgcaacccggcccattgatacgacattgatgaagctcaaaacgttcgtgcggaacatcgacaacttcaaccgcctttttccacaagaaaaggtgtacctccatctcgacaacacaggctactacatgggtgattcaatttggtacaaggcctacgtagtccgcaccgactccggccgtccaagccacctgagccatgtgctctacgtagagttggtcgatcccttcgggaatgtactcgaacagcagaagcggcccatcaaagacgggcaggcctacggcaacctgaaaatgcataaatcaatgaccgacgggttctacgaagtgcgcgcctttacccgctacatgacaaactgggacgcacccggcatcttctcacgcgtagttcccgtgttccagcgccctgaaaaagaaggcgagttcagccagatgaaaatcaaacgtgaatttgaccatttccgccaggctacacaatttatccccgacagcctcacccgacgcgaacaacgacagtggctgaagtctatgccgccacaagtcacgttctatcccgagggaggccatctggtccgtggcctgccgagcgtcgtggctttcgaggtgacccgcgagaacgaagccaatcccgacgtgacggccagcctcatcaatcagcaaggtgacacactctgccttgtccacaccgaacgcgaaggccgcggccgcttcatttgcatcccctcagacgaacgcctctcgctacgccttatccatgagggggaaagctattcttacgtacttccagaagcagaagacacggggtgtgtgatgactgtcggcctaaccgcaggcaatcaaatcccggttgagattgcctcctcggcatcgctccgccacgcacttttcggcctttcactcatgcacaacggccgcatccttgctttcgacaccatacgtaccgacacaatcccgactttccgtcaattcgaccgccaatcactcccggcaggtgttcaccaactgacccttttcgacgccgacggttgcatctgggctgaacgccttttcttcgtcgctccaaaagaagggcgcgatctggtccaagccgatgcaaccttcgctgacagtcttattgccccttaccgaaagatgaggcttcaaatccaagctccaccaaagactgcggtttcgctctcggtgatggacgccgatgccacgccgaccagctaccacggcaatgcggcaacttggtttctgctttcatccgaactgaaaggttttgtccgcaatgcggaatactacatcgaagcagacgacatcgcccaccgcaaagccgctgacctactgatgctcgtacaaggatggcgccgatacgattggaagataatgtctggcaatgcccccttcttcaaaaaacagcccatcgaggacagtctctacatctacggtcgcgtcatgcctcgacaactctatgccgacggcttgttcacccctaagaaaagacgggaagaactgtcccgtgtggacaacatcaaactaagcgccacccttttcaaccgagagggcttctcgatgaaaggacaaacactcacggacgataacggctactatgccttctcgctccccgactgcgaaggcgaatggatactcatcttcggaacgcggcgcaaggaaaagagacaaaatttccgccccacggtagaccgcctcttatcgcctgaaaaaaagctctactcattttacgaaacagagttgctcccgcttcgcaaaccgaaaaactactttcacgagaatgcccgcccattcaccagtccagcgaaaaacccgttcgaaatcaacctgcccctcgtcacggtaaaagagaaacagccattcgtcggtaagcggaactgggaaatcagccggtcgttcgtaggcaaatactctcacatacattataatatggacgaaatagcagatgcctactacgaccggggcgaacgtcccccgttcatcggcacatggctgttccacaatccggtcatcgttaacgaatacataaaaggaagtcaattttatatataccacagccttgacaaagttccggttatagtcacaccagcatggaaaagcaagaaccagcaattcgcattcagacataagaaaatcaatcaaaaggaactcgacgacatgttagagcttgacatcgcctatgtgaataactccttttctctcacgctcgacgaaatcagcgaggtatacgtttcgctggacaactcgacattgaatcataaaaagttagggttacctgatagctacagaagcatccaaatctacatctatccgcactacactttcccggtcaaagcaaaaggacaacgccgcacctacttcaaaggattcaaccggccgagcacatttcgcatgacaaactacgacattcttccacccgcacgcgactatcgccgcacgctttattggaaccccgtcgtgcagaccgacgaaaacggagtggctactgtcgaattctggaacaactcacgctgcgaacacatctatctctccgtcgaaggcgtagcggacgacggtagacccatagtccttccgtgaaaaacaacaggctaaacgtttttcaagccacaggcggacaggaccgtaaaacactacacaaataggattagcgatatttcccgttctcgcgatttatacctacctttgcaccgcaaaatatggacactatttgaagatggacttagatattctgaccgccgtttctccgatcgacgggcgctatcggggaaagaccgagccgctcgccccctatttttccgaatacgctctgatgaagtaccgtgtccgtgtggaaatcgaatacttcatcacgctctgcgaactgcccctcccgcaactcgcagcattcgaccatgccctcttccctaccctgcgcaaaatctacgagagcttttcggaagaagacgctagccgcgtgaaagacattgaaaaagtgacgaaccacgacgtcaaagctatcgaatacttcatcaaggagcggttcgacgcaatcggcggcttggacgctttcaaagaattcatccatttcggcctgacgtcgcaagacatcaacaacacatcattccccctgatgttcaaagacgcacttgaacgcgtctactaccccctgcttcaagaactcatcgaccagctaaacgcctacgccgaagagtggaaagacatccccatgctggccaaaacacatggccagcccgcctcgcccacccggcttgggaaagaaatccgcgtcttcgcctatcgtctcgaacagcaacgtgacctgctcaaagcctgccccatcaccgccaagttcggcggtgccacaggcaacttcaatgctcatcacgtggcctatcccggctatgattggaaaacgttcggcaaccgttttgtctcagagaagttgggactcgaaagagaacaattcactacacaaatcagcaattacgacagcctcggcgctgctttcgacgcattgaaacgcatcaataccattgttatcgacctcgaccgtgatttctggcaatacgtatcgatggaatacttcaaacagaaaatcaaggcaggcgaagtcggatcaagcgcaatgcctcataaggtgaaccccattgatttcgaaaactccgaaggcaatctcggcatggccaatgccatctttgcccatctcagccaaaagctgccggtgtcgcgcttgcaacgcgatttgaccgactcaaccgtcatccgcaacatcggcgttcctctcggacacacgataattgcatttgaaagcacgctcaaaggcttacgcaaactgcttctccaccaggaaagtattaatgcagatctcgacaactgttgggctgtcgtagccgaggccatccaaaccatactccgtcgcgaggcctacccacccctacgaagccctgaaagcattgacgcgtaccaaccaagccatcacacaggagagcatcagccattttatcgacagtcttgacgttaacgaagcaatcaagacagagctccgcgccatcacgccgcacaactacacgggcatctaaccccatcaaacaaacggtaaatatagccgcgaggctacacataattcataacagacacaccaaatgaacgaagagaatttcgaaaaaggcgcaagacgcgaccatgccactggaaacaccagccgtgagggctactggcaaaacgagagaaacaagcaaaacgattataattcgtggggtaacaaccattataaccgcagcaaccgtccccggttcaccaataaccgcgaacgcgtcggaggcagcggatatgacgacagcggctacacccaaaggaactacgacaacggcttcaagccccgtggcttccgccacacagaacaaggcggaagccggactttcgaaggacgcaagccccgcttcggaagtagccgtcccaattacaacaacgacgaacgcggttatcgtccgcgcccgtacgaaaacaggaacagcaatcaaggacgtcctttccgtccccgtttcaacgcagttccaggctatgtgggcaacccggcccaaacagaaggccaagacttcaaccggcaggaagaatcatcccggcgcaactacgggtataacaacacgtacaagccccattacggccgccgccccggttatgaccccaatgccaagtacaacctgaaaaaacgccgcgaatataaagaagagaatttcgatcccaaccaacccatccgtttgaacaaatacctgtcgaacgcaggtatctgctcacgtcgcgacgcagacaagtatattgaagccggtgttgtaaccgtaaacggcgaagtcgtcacggaactcggccgtaaggtactacgttccgacgaagtcaaatttcacgacaaaccggtaaagatcgaaaagaaggtctacgtcctactgaacaagcccaaaggctacgtcacaaccagcgaggacccgcagaaccgcaagacagtgatggacttagtgcgtggcgcatgcccggaacgcatctatcccgtcgggaggctcgaccgcaacaccacaggtgtcctcttgctcaccaacgacggtgaactggcctcgaaactgactcatccgcagttcatgaagaaaaaaatataccacgtgttctgcgacaagaatgtgacggctgccgacctcaggcagatagccgaaggcatcacccttgacg

SEQ ID NO: 660 - DNA, 4576 bp, synthetic construct
  source 1..4576: mol_type = other DNA
  misc_feature 1..4576: note = Synthetic
ccggccggggagaagcgcagttcgcagccaaaggctgtttggcaaccttgggagaagagggggcagtgacaatccgcgcggtccggtgttgcgtgagtgcggcaatagtccgttcgcttttcagccggttggcgaaaaacaaaaatttcttgcataaaccttttaatatgctaatgttttaatatattacaatttttaaggctggcgggatgaaaaagaaaatttttggttttgatttggggattgcttcgatcggctgggcggttattgatcatagtgatgaaaattttgatccggaaacaggagagattattgaaggaaaagtcgttggctgcggagtgcgctgttttccggtagcggaaaacccgaaggacggttcctcgctggcggcgccccggcgggaaaaacgcttgttgcgccggatcacccgccgcaaggccaggagaatgcttggtattaaacgtctgtttgtcgccaagggacaggtcgcttcaacgacggaactggaagcgctttatgccgagcaaacaggcggcgatgtttggaatctgcgtgcagaggccttgcggcgtccgctgtcaaaagaggaactgctgcgggttttgacccatctggcaaaacatcgcggtttcaagtcttaccgtaaggctgctgaagaggcggacaaggaaagcggccgcatcttgacggcgattgcggaaaaccggaaggaaacggccggttttcaaacgctggcgcagatgatcgttgaacgggccaaatcacaaaatgcgcaactatacgccgcaaaaaggcccaaacaagggcgtagccgtttatgtcaattccattccgcgggaggaaattgaaaaggaaacaaaactgatttttgagtatcagaagcaattcggttggtttaccgaagatttatactgcgatttttgcaagattgccttccgttaccgggaagcggggagcgtcggacacatggtcggcagatgccggtttgaatcggaacagccgcgggcgccgaaagaagccccttcggcagagctctttgttgctttaagcaaaattaataacctgaaagtgaccgttgacggcgaacgccgtttcttaaacggagaagagcggaaggctttgcttgaattgctgaaaaacaccaaggaagtcaaatattcgactatcaaaaacaaattgtttaaaagccgggaagtcttttttgacgacgtcaactatgcgcaaaaaacaaaaaaaggaaaaagcggggaagaaaaagcggttaatcccgaagacgcaaagttttacgccatgaaaggctggcataagctgaaagctgctttttcgccggagcagtggaaagaggtcggctcgaatttgccgttgctggatctcggcatgaccgcggtcgtctgtgagaaaaacgacgccggaatagagcgctttttaagcgaaaaaggaataccggaggattatcgggaagtttttaaaaagctgaccggcagcgagtttattaatctgtcgctgaaagccctttataagctcaatccttatctggcagaaggtttgaagtataaccaagcctgcgaaaaggccggatacgacttccgcgaggacggcatcaaactggcggaggaaaaaggtctgctgctgccgccgattgcaaatgacaaactgacgacggtgccggtcgttaaccgtgcggttgcccagttccgcaaagtatataacgccatggttcggacatacggtgcgccggatcagataaatctggaaatcggccgggatttgaagaaaagccgtgacgagcgcaatcagatcatgcggcggcaaaaggaaaacgagaccgaacggaaagaagccgaggacgggttggaaaaggaaggccttgccgcaaacggtaaaaacatgttgaaataccgtttgtaccagcagcaaaacggcaaatgcatctattccggaaaagcgattgacctccgccgcctggacgaaaacggttattgcgacgttgaccacatcattccttattcccgttcgcttgacgatggtcagaacaacaaagtgctttgtctggccgaagaaaaccgcaagaaaggaagccaaactccttatgaatatctggagccgctcggacgatgggaagagtttgaaaccgtcgttaacaccacgccgtcgattaaccgttacaaaagaaacaacttgttgaacaaagattataaagaaaaagaaaacgatttggaatttcgcgaaagaaacgccaacgacaactcctatattgcccgttatgtcaaacggtatttggaagatgccgttgatttttccgccagttcctgcgcaatcaaaaaccggatccaggtgcgcaccggttcgttaaccgattatctccgtcaccaatgggggctgataaaagaccgtaacgaaaacgacaggcatcatgctcaggatgcggttgtcgttgcctgcgccacacagggaatggtgcagaaactgtcaaaactttccgcgatttttgaaaacaaggacgattttcgcagaaagaaagcggaaaaactcgggcacgaggaggccgaagtctggtacaaatacatcaaacagcaaattcgggaaccttggagcggttttcggactgaagtgctggccagcctggagaaggttttcgtttcccgtccgccgcgcaaaaacgcaaccggagagattcaccaggaaacaattcgcacggttaatccgaaacgtaaaaaatataatgaaaaggaaattctgtccggcatcaaaatccgcggcgggctggccaacaacggcctgatgctgcgaacggacgtttttgtaaaaaagaacaaaaagggaaaagacgaattttacctggtgccggtttatctttccgatatgggaaaagagctgccgaacaaggcgatggttccgggtaaaaaagaaaacgaatggcttgaactggatgaaacctatcagtttaaattcagcttttatatggacgatttgataaaaatcaaaaaaaaggaaaatgagattttcggctatttcagaggaacaaacagggcgacggcgtcagtatccgttgccacccatgaccgcagtcatacttttgaaggcatcggcgtcaaaactctggatggtatcgaaaaatatcaggtggatccgctgggacgtattgccaaagtcaaaaaagaaacccggttgccgttgacgatgataaaaaagaatcggcataaaaagggggagtgaaaaaatgggctggcggattttgcaaataagcaaaccctgtaaattatcggtcaaaaaccgccggcttgtgtatgaaccttttgaagaagcttccctgacgattccgttggaagacatatccgtcgttatcttggagaacaggcagattttgttgtccaactcattgctttccgaattgccggaatatgacattgttctttttacctgtgatttttcacatctgccatccggtgtgctgtttccgttccatacccattcccgctattcgcagatagcctggctgcagcgggatatttccgagccgttaaaaaaacgcctgtggcaggaggtgataaaagccaaaataaacaaccaggccgcggcgttggaaattttaaataaatccaatgccggcaaattaagggaaattgccaaactggtccaatccggcgacaccaaaaattcggaagcttttgccgccggaatttactggaaaagcttttttacggattttaaccgcggcgatgatgacgatatccgcaatgcctcactcaattacggttatgcggtgttgcgcggctgcatggccagaagcgtcgtcggcgcaggattgttgccttgtttcggcattcaccatgccaacaagctcaatcagtttaatctggtagacgacctgattgagccgtttcgtccgtttgttgattatgttgtcgccaaactgtcgttgtccgaaaacaagcaattgaatgttgaattgaaaaagcggatcttgcaggttttaggaatgaattgccgattgaggggagaagacatcaaccttttgaaaagctgcgaaatgacggcggaaagcctggtcagggcaatgaccgtaaaaaaagtttcagagttaaaattgccggccatggaaaaagaaacgtttttgttgtaaggttgtggataagtggccagggaaggagaaagatatatgcggatgatcgtctttttcgacctgccgaccttaaccaaaaccgaccggcgcaatgcgagtcgcttgaggaatttcctgctgaaggacggttataccatgttgcagttgtccgtctattcccgcatctgcaaagggcaggatgacgtcgaaaaacatgctaaacgcttgaaatccttgattcccaagaccggaagtgttagactgttaaccgtaaccgaaaagcaatatgcgtctatggaaatcttggtcggaagcttaaaaaaagaggaagaaataggtgacaaacagctccttttgctctgaatttcctgtttttaaaaacaaaaaagccgttgatattcaacggcttaattggaatctattatagcatatctgatttggaaaggaagctataacagcgtaacaacaattttc

SEQ ID NO: 661 - DNA, 23243 bp, synthetic construct
  source 1..23243: mol_type = other DNA
  misc_feature 1..23243: note = Synthetic
gtggtatggatattgctattattacttctgcacaaaataatgatgacgctaagaaactattagcactgtttaacttcccatttaaaggctaagagcaaaaggataaataaaaatggctaaaaaatccatgataaatagagaccttaagcgcacgaagttggttgaaaaataccgtaccaagcgccttgagttaaagaaaattattaagagtgtgagtgcttctgatgaagaacgcttccaagcaactattaggttgcaagctctaccacgtgacgcttcaccgacaagacaacgtagccgttgtggtttgacaggtcgtccacatggtttttatcgcaagtttggtttgtcaagaatcaaactcagagaacgcactatgaacggtgaagttcctggtttatctaaagcaagttggtaggagaatagattatgagtatgtctgatccagtcgctgatatgttgacacgcattcgcaacgcacaaaaggttgcaaagaaagaagttaatatcccagcatcaaatttaaaatctgccattgctagcgtaatgcagcaagaaggttatattgagtcctttagtgtagagggtgaaaaagccactaaaacgttaacagttaagttgaaatactatgacgaaaaacctgttatcgatacactagatagagtttcaaagccaagtttgcgtatttacgcaaaaagcacagaaatgccaagcattatgaacgggctaggtattgttattgtttcaacacctaaaggtgtgatgactggacaagctgcagcaacccaaaatgtgggtggtgaagttttgtgtagtatttcttagtataggagttataagatgtctagagttgcaaaagcaccaatcacaattccaactggtgttgaggtatcgttaaacggttcttctatggctgttaaaggtaaattaggtcaaatgcaaatggaagtacatccatcagtagtgattaccaccgctgacaatgtattaacgtttgatatcgctaaagttgagaggaaagatgaaaagaaagcatgggcgcaagcaggtactgctagagccaacaccgctaatttgattcaaggtgtcgtcgaaggttggcaaaaaacattaacattgatcggtgttggttaccgtgcgcaagccaaaggtaaagcgctggatttgacacttggtttttctcacccagttcagtacgcattgccagagggcattactgctgagacgccttctcaaactgagattatcgtcaagggtatggataagcaaaaagtaggtcaagtggctgctgaaattcgagcgtatcgtccaccagagccttataaaggcaaaggtgttcgttacacagatgagtatgtggttcgcaaagaagcgaaaaagaaataattaaggtattaatatgaaactttcaaaaaaacaagctcgtttaagaagggcaacaaaatttagagctaagcacgcagaaaaaggtgttgagcgtctatgtgttcacaaaacttctcagcatatttatgctcagattattagtggtgatggcacaaaaaccgttgcttctgcttcatctctaactgttgaggttaaaaatggcggcaatgttgaggcagccactaagattggcgcagaaattgcaaaggccgctaaagcagccaaagtaactaaggttgcttttgatcgttctggttttaaataccatggacgtattaaggcattggctgatgcagcgagagacggtggtttagacttttaattaagttttaatataaaaatatataaaataggcgtaaaaaatggctgaatataagaaaaagaataacaacgaagaaggcgatgactttattgaaaagttagttaacattcgtcgtgttgtaaaagcaacaaaagggggtcgtcaaatgggattttcagcattggttgttgttggtgacggtaatggtaaagtaggttacggcacaggaaaggctaaagaagtcccttctgctatccaaaaagcaatggacaaagcaagaaaagcaatgaaaagcgtaccccttaaaaatagcacaattttttaccctattacttctagcgtaggtgcggctaaggtttatatgcaacctgcatcagaaggtacaggtgttattgcaggtggtccaatgcgtagtgttttagaggcggttggcgttcatgatatcttagcaaaatgtaacggcacacggaatccaatcagtgttgtacgtgcaacgattgagggtttgacatcaatgtcatctccacaattagtagcggctaagcgtggcaagagcgttgaagaaattattggagaggtatgatgtctgaagaaaaagaagtgacagcaaaaaaagcacctgttaaaaaagcagtcgcaaaaaaagcacctgctaaaaaagcagcagcaaaaaaagcacctgttaaaaaagcagtcgcaaaaaaagcacctgttaaaaaagcagcagttaagaaaagtacagtaagtgtcactttaattaaaggttttaacggtcgtttaccatcacatcgtgcaacggtaacaggtcttggtttaaagcgtattaaccatacagtagaattggtagatacacctgaagtaagaggaatgattaacaaaatatcttatttgttaaaggtcgaagattaaaggattaagggtcaaattatgagtatgctattaaacacattatcaccagcagaaggtgaaaagaaatctagaaaacgcgttggtcgtggtattggcagtggtattggtaaaacttgtggccgtggtcacaatggtcaaaaagcacgttcgggcggtttttctaaaatcggctttgagggtggtcagatgccattacagcgtcgtctccctaaggttggcttctcgtcacgcgtttcaattatcacttctcaagtaactttatctgaattgaacaagttagaagaagaagaaattaccattgacgtattaaaacagcataacttagtgactaaaaacattaagcgcgttaaagtgatgctttctggcgaaattaccagagcgattaccttgacaggtattaaagcaactaaaggtgcaaaggcagctattgaagcggctaaaggctcaataagcgagtaaagcaaatgaatcaagaacccctaggactttcccaagaattattaaaacgcatcctctttttattgggtgcgttaatcgtttttagaatgggcacgcatattaccattccattcatctcctcaactgcattggcttcattagtgcaagatcagcaggggacgattttggatatgtttaatatgttttctggcggcgcactagaaagattgtcaatttttacattgggaattatgccttatatttcggcatctattattatccaattaatgacagctgtggttccgaagttggagcagttgaaaaaagaaggtgaaagtggcaaacgtaggattacacaatatacgcgtttaggtacagtggtattggcggtgtttcaatcttacggtatttcaattgcattacaaacgcagagtgctggtggtgtcgcattggtaacacaggcaggttttactttcagcttggtaaccgttgttacattgaccacaggcacactgtttctaatgtggttgggtgagcaaattacagaaaaaggtattggcaacggtatttcaatgattatttttgcaggtattgtttctggcttaccatccgcagttggctcgactttatcgttggtgtccacaggtgaattagctgttattttggtggtaatactattggcaatgacattgctcgtaactgctttcgtggtgtttatggagcgtggacaacgccgtattaccgtaaattacgcaaaacgccagcaagggcgcaagatggttggcggtcaaagttcatacctgccattgaaaatcaatatggcgggtgttattccgccaattttcgcctcttcaattattttgtttccagctactttaggcggttggttttcacagtcagaaggcatgggctggttagctgaattaaccgcaggtatttcccctggtcagccactgtatgtgatgttttatggtttggcgattgtattttttacatttttctacacagcgttaatgttcgattcaaaggatacagcagataatctacgtaaatcaggcggctttattccgggtattcgtccgggaaaaaataccgcggagtatattgatggcgttatgtcacgtttaacagcgtcaggtgcagtttatattacagcggtttgtttgttgccagagtttttgattttatattggaatgtgccattttattttggcggtaccagtttattgattattgttgtggtggtgatggactttatttcacaagcgcaatcacatttaatgtctaatcaatacgagtcattaatgaaaaaatcaggtttaaactgatgattagtatcaatttattaacagttttttctggtttttttgcagttatttgtgcgaatatttttattcaagtggtttttaatcaggcaacattgttggataaaggcagtttcttgtttcaaataaaagaaaaaaacatccaaaaaataaaggaatcattttcaaatgaagtaacaaatatgaggaaagcggtatgaaagtaagagcatcagtaaaaaagatttgtaacaattgtaaaattatcaaacgacacggcgtagtgcgtgttatttgtaaagaacctcgtcataaacaaagacaagggtagttgacaatattttgttaaatacagtataattgttggttttgtgaattttaattaacgtttttgatttgaaacaataaaaacgaacagcaaaggtataaggaagttaaagaatggctagaatagcgggaataaatattccaacacacaaacatatcattattggcttacagtcaattttcggtattggcgaaacacgtgcaaaggcaatttgtaccgagtcaaaattagaccctagtataaaggtgtcagatttagctgaagaccagttggagtcaatacgtgcagtcgttgcaaaatttgaagttgaaggtgatcttcgtcgtcaaattgcaatggacattaaacgactaaaagacttaggttgttaccgcggcattcgccatagaaaatcattaccacttcgtggtcaaagaactaaaaccaatgcaagaactcgcaagggtcctcgccgtttaattaaataataggtagatattatggccgcaactccagcaaagaaaaaatcaaagaaagtcattactgatggtattgcgcatatccatgcaacttttaacaatactattattatgattacagaccgttacggcaatgcagtttgctgggcaacctcagggggttctggttttagaggttctagaaaatcaacaccatttgcagcacaagtagcagcaggtaattgcggtgaaaaagcaaaagcatttggtatgaaaaatttagaggttcgtgttaaaggccctggtcctggtagagattctgccatccgtggactaaatgcacaagagttaaaaattcaatcaatcacagatgtaacgccgattcctcataatggttgtcgtccatctaagaaaagaagggtataaattatggcaagatatactggacctacttgtaaattagcacgtcgcgaaggcacagacctatttctaaaaagcggcattagatcattagattctaagtgtaaagtaacacaattaccaggtatgcacggtgcaactgcccgtcaatccaagggtactgagtacggtacacagttacgtgaaaagcaaaaagtaagacgtatttacggtattttagaaaagcaatttcgtctttattacaaaaaagcttcacagaaaaaaggctctacgggtgagaacctattgtctttattagagtgtcgtcttgataacgttgtttaccgtatgggttttggtgcaacacgtgctgaagcaagacaattagtatcacataaggctattttagttaatggttctatcgttaatattccttcttatcaagtgagtgcgaatgatgaaatcgaaattagagcaaaagccaaaaaacaaaaccgtatccagtttgctgttgaacttgccaagcaaggcagtcagccagaatgggttgacgttgacagcaaagcattgaaaggtgtatttaagagtgttcctgcacgtgacgaattatcgtctgatattgcagagcatctaattgttgaattgtattctaaataaggaaaatattatgcaaggaagtgcaagagattttttaaagccaaaattagttgaattagtagaaatcactaataatgaatatcgtgttattcttgaacctttagagagaggttttggtcacacattgggtaacgcactaagaagaaccttactttcttctatggtaggttcagcaatcaccgaagtggcgattgacggcgttatgcacgaattttcaaccattgaaggcgttcaagaagatgtattagatattttattaaaccttaaagaggtttcagttgcgctgaatacatctgaggcagcagaggttgttattgataaaaaaggcccttgtgaaattacagtggctgatatcgaagcaaatggtacagacgtttcagtctttaataaagacaaagtgattgccactgtgaatgcaggcggacatatgcgtatgacgcttaagattgccacaggcattggttatggtacagcagtggcacgtgatgacaaagcttcaactatcggcggtatgcagttagatgcaagtttctcaccaattaaacgtgttagttttatcgttgaggcagcacgtgttgatcaaaaggttaatcttgataagttaaacattacacttgaaactgacggctctattgatgctgaagcggcaattaaacgcgctgcaacaattctacaagagcaattatcttcatttgttgagttagaattagttgaagaagcagcagcattacctacttcagatgattttgatcctcaattattagcggcagtagatgaattagaattgacagtccgtagtgcgaattgtctgaaagctgagcaaatttactacatcggtgacttgattcaaaagtctgagcaagatttgctaagaacgcctaatttaggacgcaagtcattgaacgaaattaaagaagtattaactgaaaaaggcctcaatttaggcacagccattgataattggccaccagttgatttaatgagcgaataaggaaatatcatgagacacagaaagtcaggtaggcaactcaaccgtaattcttcccatcgtaaggcgatgttcaagaatatggcaaactcattgtttgaacatgaaacaatcagaacaacattaccaaaagcaaaagaattacgccgtgttgttgagccgctaatcaccaaagctaaaacagacagcgttgctaatcgtcgtaatgcatttgcaaagttacgcgatagtgcaatggttgttaagttgtttaatgaagtagcgcctttcttcaaagaacgcaaaggtggatatacacgtattcttaaagctggtttccgtactggcgataaagcaccaatggcgattattcaattagttgattttgaaggcgcagttgccaacgaatctgaagatttataaaggaaaaaaaatatgccttctattaaagtaagagaaaacgaaccatttgatattgcactaagacgttttcgtcgttcatgtgatagagcgggtgttattactgacgttcgcaagaaagaattttacgaaaagccaacttggattaacaagcgtatgaaagccgcagcagttaagcgtactcataaagaaatggctaaaaaccgtattcaccgcaagagaatgtattaataaatcttttcggtatgccagaaagacttctaaaatgccgatacttgtatcggcattttttttaataaatagagaccccgcattagggttgaatatcgcctaaaaagcgtttttcacccatttgataacttttataaaacctgtattacctaaccaaaagggtggctttataaaaattagcaactggataaaaattgtcatttatccaacatccagccctaatgcaggggtcttaaacaacctaagaggaaaagacaatgtcagacttaaaacaacaacttaccaatgatatgaaaacagcaatgaaagccaaagataaagacaggctcaaagctgtacgtatgattattggtgctatcaaacaaagagaagtagatgaacgcattgagttaaatgatgagcaagtattgaacgttatccaaaaaatggtcaagcaacgtaaagactctatttcacaatttcaagaagcaggccgcactgacttggtcgagattgaagaagcagaactggctgttatcaatacctatatgcccgcacaactctcagaagacgaaatcacccttgcagttgacacagccattgctgattctggcgcaagctctatgcaagatatgggcaaactaatgggcttactcaagggtcaattagcaggcaaagccgatatgggtgttgtttctggcatcatcaaatcaaaactttcttaaagacaccacccccgtttaaaaaataatttttgacctgtaaaaatgtcaaaaaaagccctcagcaacggcattaaaaaaatccaaaacccgttatatacaaaccctataatccgctatcaatttagccgttgagactgacctaagccgtaccacttatcccgcttacgccagtttttgatatgtctgacaacttcgggtggcatagcagtgtattcaagcaatgcatcaagcagttggggtaaaatttgagtaatatgaatatcataccaaatttagaaaaagcattatttcttgccaagaaacaacttagcgagttagtgtatgatgcagtcaatttagaaggggtaaattacactttaccagaggtgcaaactttgctggacggggtaacagtaggcggacacaaacaaacagatgaacttatagcgctcaaccaaattgaagcatggaaattcttatttaagataattaaaaataaagattttaatttatcagataaggttgtttgccaattacaagcaaaagtcgccaaacgtgaagcgcttacttggggtgaatttagagcgggcggtattagtatttcaggcacaaaatatctgccacctaatcatcaagaattacccaatttatggcaacaattatcaaccaaaccgatgccaagcaatactgatgatctataccaatacgccgttagcttatttctacaaatggcacgtacccagtttttttacgatggcaataaacgcacaggcagattgatgatgaacggcattttgcttcaaaatggactacccgtcatcaacttaccagccagcaaacagttagagtttaatcaattaatgttggatttttacccaagcaacaacgaagcgcctatgcaagcgtttatgcgctcctgccttaatcctcagcatttagatataatggctgagtaaaaatagttcaattttgctaacttttaactgttgaattttatgcattaaaaaacccccataaagagggctttggtcgctataaaaagcgtagcctacgaaaaataaatttcattggtatgaaaagcaaatttctaggtgatagtcggttacaatctgtcttaattataaccataaaaaaaccgcagaaaatactttttacaaaaaaaaataccaaatccttagatttggcattaaaaatttgcactgaattttttcgactatcacctatacaattcacaacacataggagagtatagtcatataacaatattcgtctatgttaaaatctattatacattataaagttaaataatatctcctatgtaaaaatgttattttcatactataatcttaaatggtgtgctataaattttcaatatggacacataaaataaatattggagtttgccatagagaatttaacattcaaaatatgggtgtatatatctttgtttattgtgttttatatgttgtgattttattttaatttgttaatgaggaaaaaaatgaataagaaagtattaggtttagatttaggctcaaactctttgggttgggcgttgatgaatgaaaaagatggtgaagttaatcaaattattgatttgggttcgcggatttttaataaggcagttggggaaaaagttccaactccaaagaatcaagaacgtcgcgatatgcgtttagggcgtagagtattacaacgccgagcaaggcgtaaacaaagaatgataaattatttaatctcgttagatttactacctagtgaacttgcgaataattttggacaagaaaaactactcaatgaattgggcaacccttatgagttacgcacaaaaggtctagataaacaattagaaccacatcagtttggtagagtgttattgcattttgttgccaggcgcggatttttatctagtaaaaagcagattgcaggggatttagttgatgacccagatacaatagaatttttacaagaattagaggtagaagaaaaacaaaaacaacaagcaagagaggcgaaattactggcacaaggcaaaactataaaacctacaaaagatgaccaaagtgaaggtgcctttaaagccgatattagcggcgtttatcaagctattaaagataataattgccgtactttaggcgaatatttgtttaaattaaaagagggcgaagttaagcgtaatcgctcacacgatggcgggcatttgcgtactgacaggaaaatgtatcaagatgaactggctttaatttggcaacagcaaacacagtatttcgcccatttacccgatgaatttatgcaaaaagataaaggtattttggcagttattttttatcaacgcccgcttaaattaagaaaagacaggatcggaaaatgctcacttgaaactaaacactaccgagcaaatacagcaaggctagaagtgcaacgctttagatatttacaagatataaacaatcttcaatattttgaaagagaggttgaagaatggataagtttaaacgatgaacaaaaagaaaagttaaaaatctattttgaatttcacccaaaaattacaattaccgcacttaaaaaagagctgggattggataaatttcataaaataaatttagagactaaaaaccttaaaggcaatattactgcttgtgaaattcgctttgtcattggcaaaatttgggatgagtattcagatgaacaacaatcacaattgtttgaagatttattcaccattaagaaaaaatcctctctcaaagcacgactaattacgcattgggattttgacaaacaaacagcggtaaaactttgcttgattgaacttgagccatcgcattctaatcactcactcaaagcgattaaatgcttattaccacacctagaaaaaggtttgacctatgataaagcaagggttgaatgtgggtatggttacgaagttgagaaaattgaagcacaagataaactaccacaaccactcgaaacctctaatccgattgtcaataaaggtatgcacgagttacgccgtgtggtcaatgccattatcaaacaacacggtaagcctgatattgtgcgtattgaaatggcacgagatttggaaatgaatacgcaaagatacaaagatgccaccgcacaacaaaataaaaataaaaaagccaacgaagaagcggaagcagagtttttgaaatatcatccacacagaagttatgcaacaaaagaacaaaaactgatttatagattatggcaggagcaacaacaatgctgtgtgtatagcggcaaattaattgcacctaccgaattatggtcagataccgttgagattgaccatattgtcccaagaagtttgtgtttagatgattcttatatcaacaaagtggcttgtttaacggcagaaaaccgagtcaaagggcaaaaaacaccagttgaagcgtggggaaatgatgaagataaatggaatcaaatcactcaaagaatcgagcgtttttaccctgatagaccttggaagaaataccgtaaaaatgcaacgcatccaaaaaagaaacagttttatatgcgtcaagcagatattgccgataaatatggcatgtcagctgcacaacttaatgacacacgctatatctcaaaattagcacaagaatatttacagcaattaggctgtaaggtttcagtgactaaaggtgtgattgtcgcagaggttcgtagtcaatgggggctaaacagtgttatcggacaaatcaacaaaaaagaacgcaccgaccatcgccatcacgctattgatgcagttgtaattgcacatatgaatatagggtttcataatagaatgacccaagccattaaacacagtgaagagacaggtgagcattttagtttgcagccaccttatgatgagtttagaactgaagtaaaagaaaaattaaagcatttaattgtttcacacacgccacaacgcaaattatcaggtgctttacacaaggcaactggtgcgggttatatcaaaaagcatggcggtttggtctatcgtaaagcagttcctgctgtatttcaagatagcgatcaaagatttgaagagggtaaagtaaaaactggaaaatttaaaggtaaggaaaaatatgaaaaaaatgctgaaaaaattgtagacaaacaagtgaaaaataatgttttggagcatattaaaaaatatgaaaatctaaaaacagcctttgatgaagaaaatttaaaacaacttaaattaggtaaaaaccccattaaacgcgttagagttttacagtctgcaatcaaaaccacaaagaataaaaccgctgaagatattttaaataaaactaaatttggcgtcagagacaaagcaggtaagacttttaaatatatgagttatggtaatacacatcatgtagaaattattcaaaatatcaaaactggcaaagtcaaaggcgagtttgtaaccatgatggaagcatcccaccgagtaaaaggtattaatatgcccaaacaacccattattaaaaccaatcatggcgaggattggaagtttttaatggcattacacattaacgatacagttagtattgaaaatgaagacggtgagcggattttttatcgggtgcaaaaaataggcggtggctatgatattactttaaggcttcatactgcatcaactattaaggataaaaatcaggaattagggcttatggcacaaggcataattgataaaaatttagttaaacaccaagttaatgccataggcggtttaatcgatgattaaacgcatcgttgaggtatcaaatcctagttatttgcatcttaaaaataaacagttaattattgaacaagaccatcagcaagtagcgcaagtgccgattgaagatattggcgttttaattttggagcacagcaccattagtatcactcaactactgattattgaatgtcaaaaaaacaatgtcgccattattttttgcgatgaaaaacacctgccatattccactgttttaccgattgctgagggcaataatctacatcaaaaaatcctcaaacaacaaatcaatatcactgaaccagtgcgtaaaaatttgtggaagcaaatcatccaacaaaaaatccaaaatcaagccgatacattaaagcaatttgataaaaattacactcgattagaaaaattagcccaagaggttaaatcgggtgacagcaaaaatgctgaaggattagcggcacaatattattggaaggcattatttggacaaggttttattcgcaatcaaaatgctgatggtattaatgctgttttaaactacggctactcaattattcgcgcaatgactgctagaagcattgttgctgctggattgcaccctgctatcgggctatttcaccataatcagtataatggactttgtttggcagatgatttaatggagccattccgcccgtgggtggatagtattgcttatgaattatatcaagaaaataacgatattcaaatcaccaaaaatattaaaattccatttttaaatttactcagtgggcgcgttaaatttagcgaaaaatatatgcctttaatggtatctattcattatttaactgcagatttaaagcgtaatttttccaaagaaaataaaaaacttatttatccaaaaaaataatgtttggaggcttgcagacgatgtgggtaattgttttgtttgacttgccaaccgaagcagcagctgaaaaacgagattatcgctttttccgaaaaatgctacttgaagacggatttaccatgatgcaatattcggtatatatgcgccattctagtagcgaagaaaatgcacaagtacatattaatcgcgtaaaaacacaccttccagcagacggcgaagtgcgaattatcaaaataaccgacaaacaatttggacggatcgaagttttttacggtaaaaaacgccgacccgttgaaaaagcaccagagcaattatcatttttttgactagaaataatgataaaagcccagtattaaagcgttttgggtaaggagattgtaaccgactatcacctaaacgcaaatcacaaccttgttcaaaatacacgctatagcagttcattgtaaccgactatcacctaaacgcaaatcacaacttgttttcataatttgcctcggtttttgttattgtaaccgactatcacctaaacgcaaatcacaactaatggggttaatgggtgttgcgagtcgtgattgtaaccgactatcacctaaacgcaaatcacaacctagcttatcaatggctttagcacctatttattgtaaccgactatcacctaaacgcaaatcacaacccgtcattgtggtactaaatttatgggcttattgtaaccgactatcacctaaacgcaaatcacaactgatatctctaaagatgttttcaacttcccattgtaaccgactatcacctaaacgcaaatcacaacgaagaagggccaggtaataacggcgttagattgtaaccgactatcacctaaacgcaaatcacaactctcatcttgaatatccaatctgtgcattaattgtaaccgactatcacctaaacgcaaatcacaacttattttgtgagcgtggtcgctcaatatttattgtaaccgactatcacctaaacgcaaatcacaacgtgtgtctttattcaccgctaagtgaaccgattgtaaccgactatcacctaaacgcaaatcacaactcctttttaataattaattttataattagtattgtaaccgactatcacctaaacgcaaatcacaacaactttttattagttcactaatattatcaattgtaaccgactatcacctaaacgcaaatcacaacccagtttctcttaactgtagccatagagacattgtaaccgactatcacctaaacgcaaatcacaacaggccaaggaaggcacccagtgaaataatattgtaaccgactatcacctaaacgcaaatcacaacaaattgagcgaatgagcgttggtgttgagtattgtaaccgactatcacctaaacgcaaatcacaactggccaaggaagacaacccgtaaagtagtattgtaaccgactatcacctaaacgcaaatcacaacgtatcaaagtcttataccgccacgagcgagattgtaaccgactatcacctaaacgcaaatcacaacaatagaataagggtcaatactttgtataagattgtaaccgactatcacctaaacgcaaatcacaactttttgccacttgcactggcatttttaacgattgtaaccgactatcacctaaacgcaaatcacaactatatgttgacgaagctcttcccggcgacaattgtaaccgactatcacctaaacgcaaatcacaacttaataatattcgtgtttctttttcctcgattgtaaccgactatcacctaaacgcaaatcacaacttctcctgaataattttagcagtgttagcattgtaaccgactatcacctaaacgcaaatcacaacttcgtcctctctttaaacactttaacgttcattgtaaccgactatcacctaaacgcaaatcacaacttggatggcacggcggattagtgtgtttatattgtaaccgactatcacctaaacgcaaatcacaacaaggaaactgatctaaaggatcccaaaataattgtaaccgactatcacctaaacgcaaatcacaacaattcaggtgttcttacttggtcgtattgtattgtaaccgactatcacctaaacgcaaatcacaaccactgataacggttttggatcgattcgcgtattgtaaccgactatcacctaaacgcaaatcacaacttggtaagcggtgtgaaattttgtcattgtattgtaaccgactatcacctaaacgcaaatcacaactaaaaccgaggtcaattatgtatcgtaaaaattgtaaccgactatcacctaaacgcaaatcacaactaatcagcggattattccgctctgcacatattgtaaccgactatcacctaaacgcaaatcacaactgtttgccatactagcaccaccaacggtcattgtaaccgactatcacctaaacgcaaatcacaactaaccgaggtcaaatatgtaccgaaaaaaattgtaaccgactatcacctaaacgcaaatcacaacaggacaaccactacgcccgtgttgatacaaattgtaaccgactatcacctaaacgcaaatcacaactaggaagagtccgattatggttaatgaaagattgtaaccgactatcacctaaacgcaaatcacaacctctctttgtttgacgttagcgaaccaaggattgtaaccgactatcacctaaacgcaaatcacaactaattgatacggtaccaaaagcagagaggattgtaaccgactatcacctaaacgcaaatcacaaccttccaaaagcttataatgaaaaaggatttgattgtaaccgactatcacctaaacgcaaatcacaacttatgtttttactgcgttcgtttatttttgattgtaaccgactatcacctaaacaaccagcaactgaaactatgcgcttgctttatatcattgccaaccttgcttccagcacatcataacctaaacaaccagcaactgaaacctaacgtctttactaaatctagcgcctcgccaccaccagcacatcataacctaaacaaccagcaactgaaacccaacagcagaactgtcaataatgattttagggtgccagcacatcataacctaaacaaccagcaactgaaaccaattaattaataagtcagactttgacgaatcagccagcacatcataacctaaacaaccagcaactgaaaccaataaaacttaacaactttgctttcattatttccagcacatcataacctaaacaaccagcaactgaaactgcgatggctattcttgatttcttgacaaataaccagcacatcataacctaaacaaccagcaactgaaacccaacggctgaactgtcaataatgattttagggtgccagcacatcataacctaaacaaccagcaactgaaaccccatcaaagcatcaaactctgtctgtgtcaatgccagcacatcataacctaaacaaccagcaactgaaacttactcgcgtgtgatacaatttcgttattttttccagcacatcataacctaaacaaccagcaactgaaacatcttgccaatagggggcccagtgtgtccgtacgccagcacatcataacctaaacaaccagcaactgaaaccagggcaatctttctgcttttggcaccgtatcaatccagcacatcataacctaaacaaccagcaactgaaacctctgcttttggcaccgtatcaataactaacaagggccagcacatcataacctaaacaaccagcaactgaaactacttcaatcgtatggctcacaaaatcgcatacttgccagcacatcataacctaaacaaccagcaactgaaacgttattaaaaagttgttaaacgtattttaaaccaccagcacatcataacctaaacaaccagcaactgaaacaaatgcgtggttgtttttccctagcaatccttgcgccagcacatcataacctaaacaaccagcaactgaaactgctctccagcaataaaattatctatttcgaccgccagcacatcataacctaaacaaccagcaactgaaaccgttcgctaagttggcaaaatcattactggttaaccagcacatcataacctaaacaaccagcaactgaaacgtcagttcaaacgcaccaacaccgctttgctttgaccagcacatcataacctaaacaaccagcaactgaaacaagcctgaaaagttcaatagtttttcccttaatttccagcacatcataacctaaacaaccagcaactgaaactatcagcaatatatgcatccatttgttctttagtccagcacatcataacctaaacaaccagcaactgaaaccttggcgacaatgcgcattccttctttagggtcgccagcacatcataacctaaacaaccagcaactgaaactccacagttataaagtctttaggatagcagtcacccagcacatcataacctaaacaaccagcaactgaaactgacggcattacttttaatcctcgccacggctacccagcacatcataacctaaacaaccagcaactgaaactctccaactatctgtatcctgattaaaagcatgggccagcacatcataacctaaacaaccagcaactgaaacaacattatcttcgttaaatcttaaattagcagaccagcacatcataacctaaacaaccagcaactgaaaccatcatcagcgcctctcatatctgtattgcttgttgtccagcacatcataacctaaacaaccagcaactgaaactaggcttcgcaaattcttaaatcctcagcattattccagcacatcacaacctaaacaaccagcaactgaaactctactgaaaaattagtaattttactgacatcagtccagcacatcataattgacaatatttttaaagaaggcgagttaagtgaaaaatcagttatcgcaaattttgcgataactgcggcggatgataaaatctaccaagttgattattacaacaaggtttaagaaaatcaccaatttggcgattgtgaattttgctaattgtcactatttatgcaaatgtctcttttgaataaagtctaaggctttttgtgcgtctgaactttctaaaactaaggcatcggtttcgcctcgtagccaagtgctttggcgtttacagagttggcgggtggcgatgatggcgcgttcaatcattgcgtctttgtccaattcgccgttaagatattgccatgcttggcgatagccgacacagcggatggcgggtaggttttcgtgtaggtttgggttttgtttgaggtgtttaacctcctctaaaaagccattgtccatcatggttaaaaatcgtgcttcgatgcgtgcgtgtagttcggcgcgcggcggcattaggatgatttttttgatgggatggtctaatcctgattgtttgttgccttgtaattcactaagggttttgccgctgatgtcgaacacttctaatgcacgggtaatgcgttgtgagtcgtttgggtggatgcgtttggcggctttcgggtcgattttttctaaggttttatgcaatttagcaatgcctttctctttgagtaattggcgatatttttcttttgattgctcgctagattctggcaaatttgacagcccatattccagtgcgttgaaataaaatgaagtgccgccaactaaaataggggtttcgtcattgtcaaaggcaagctgtatttgtgctttggcatctttgacaaaatcaaaggcggaataagcctcttctggctgacaaatatcaatcaattggtgcgggtattgttgtaaaagtttggcacttggcttggcagtgccaatatccattccttggtaaattaaggcagaatcaacgctgataatgcgtgctttaaattgctgtgcgagttcaatcgctaaatcggttttccccgaagcggtaggtcccattaaaaagatgacgcttttacgcattgacattgaattactaagtattaaaagagttgtgatacattataatgtccgcactcaataaattaccaagaaagcatgtttacaattgaaaatcaagcaacaggaagaaaattcagaacagaaggcgatggtccgctcttggatgatgcacttctttatggattaaattttccttatggttgtcaaaaaggtttttgtggtaaatgtaaggcaaccatcattgaaggcgaagtgggttatgagggtgatattactgatggcatcagcgctgaagaagtggccgatgggatggcgttattatgtcagtgccacgccaaatctgatgtggtgcttgtggtcgatgaattagacagtgtggcagatattgaagttaaaacactgccttgtaaggtggaaagcattgagcatcttaatcacgatgtggcaaaagtgatgcttaaaatccctgattcagcgtcattgcaatatttagcggggcagtatcttgatttaatccatcctgattttgagccgcgtgcgttttctattgctaatgcaccgaccaatagcgctatgattgagctgcatattcgtttgattgaaaatggtaaatttactcattttatttttaataaattagaagaaaagtcgctattgaaaattgaaggtccaaagggcgattttttctttagagaagacagtaaaaagccagtcattttaatagcaggcggcacagggtttggtccgattaaatccattgttgagcatgctattttcaccaaacttaatcgaaaaatttatatatattggggtgtgcgagacgaagtcgatatgtacatggatttgccacagcaatgggcgcaggaaaatgagaatattagttttgtgcttgtattgtcagagccacatggcgattggcaaggaaaaactggctttgtgcatgatagcgtattgaaagattttgatgatttgactgggtatgaggtgtatgcctgtggaccaccagcgatggtgaaatctgctgcgacaacttttgttgggcacggaatgattaaagataattttttctcagatgcgtttgtttttgcggtttcaaaatgagtaatatgcaacaacatttgactgagcaattaaacgtcgcactcagtccaacacatttagaagtgattaacgaatcaggtaatcattctggcacagcgactgaatcgcattttaagttggtggtggtgagtgattattttcaagatttgaaattaatagacagacatcgttttatcaaccaattatttaaagaggaattgggtcatattcacgctttggcaatgcacacttatacgccagacgaatggcaaatgaaaaatggcgcacccgcttcaccgcaatgtgcgggaggctcaaaataaaacccttgggttttttatgcttgttattgttagccgcttgttcggcacagggtgctaacgtccagcccaaaattgtcaaaacacctgttgttgaaaaacccaaggtcgttgaaacgaatttatggaaacatattactaagggtaatacgctcaagccacgtagctcaaaagatatatattggcatatcaaatggtttaaagagcaccctgattatttaactcgagtaaccaagcgcgctgagccgtatttgcatttagtggttagagaaatagaggcggcaggattaccaattgaattggcattattgccgattgttgagtcggcttattatccattttcttattcacacggcaccgcatcgggattgtggcaatttattcctgataccggtaaattgtacggcttaaagcaaaattactgggtcgatgagagacgtagcgtgatactttcaacccgtgctgccgttgcatatttgaagagtttacatatcttgtttaagggcgattggttgttggcgattgccagttacaattcagggccaggcagggtgcaaagggcggttaaaaagaatttatcgttaggcagaaaggctgatttttggaatatttctctacctgcggaaacccgtggctatgtgcctagattgctcgcagtaatggagttgattaaaaatccacataaatataatcaaacaatcacagcagtgacaaacaagccgaaacttgaatccgtgtatctctattcccaattagatttatcgctgatttcacagtggagtgggctggatttggatgagatttatacgcttaatcctgaccttaatcgctgggctacgccagatacgccgcgttacgaattgctattaccacttgataaggtggtagcttttaaaaaagcacacgcaagttatccaaaacaaaagcaattaaattacaggcgttataagattaaatctggtgatagcttgaataaattagctaaaaaatttgattcatcggttgattatattaaaagcatcaaccatctaaagggaatcaaaattaaacgcggtgatatgattattattcccagccccaaaaaggcaagtgattattactcactctctacagagcaacgtaaactacaaagatttaataccaaaaaatacggtaaaaaaattatccataaagtgactaaaggtgaaagtttatggctaatttctaatcgttattcagtaccctctgacagtattattaaatggaatcatttatcgaacgccactaaaggcttgcagattgggcaagtgttggtaatttggcaggtacaaaaaaccaaagcatcaacattaaaaaacttaaaaaaaattggggtcaagataaaaagaacactgacttatcgagttagaaagggtgataatttgtctgttattgcacataaattcggcgttagcgtgtcgaaattacgccaatggaataaattgcccatcaataaaccgcttaaaattggattaaaattaaaaatcattaagcctatcgttaaatgaaaaaaattaaatctttgaatgtttattgggtaagcacactagcgattattttggttatttctgcgccatggtttaatttagatgtgtccaatcattcatttgttaaatcgtatattgccggtatcggaattgcattattgatgctagcaagtttatggattaagcgagatacgcctactattcacgattaattggctaaaactcagttggataagcttgttcttgttgggtacgctgagtatattttggtc

SEQ ID NO: 662 - DNA, 23129 bp, synthetic construct
  misc_feature 1..23129: note = Synthetic
  source 1..23129: mol_type = other DNA
cgagttgggcatggcttcttgggtgacctgcaaatccagcaagagcggcatgatcggatgtgcataaggggtgaccgacaattcaagctggcctttttttaccagcaccttatagcggcagatcacatttgccaacaaatcgccgatgacttcgactatctcaatccggtcatgcaaggtatagcccgaccctttatcaagcaaatgtttgatccggctatcggtcaattttaccgtttcccccatccaggccagatggtaccaaaccagcaaatcactaaggtattgtgaattgacatacatcaaggcgtcatagtgatgctcaagccaatcagccatttccgccaatttcttgtaagcggggtaacggttgacctgccgttcacggttagcccgcaagcactccctaatcagccgcaaacgttcttcagggtcggccgggatgctgacgtcgaccaatgccgccagcaacgggtctgtcatggccacacggtcatgtaagtagacattgatctgcttggcatattcttcaatctgctccagcaagatgggcgcgaaattaatgacggccttcgccctaggcaccgcctcaatatgggcgaccatgtccacataatctttaataacatgtaggtaagtccacggcaacttgaattcaccagtctgtaaatctcgatattcaggctggtgcatatgccagcataatactaatttcacaaatgtttcccgttgcttacccgttaaaaaaccagcccgtcctgtcttagccagccccttacaatgcgcgggctatttatctgacataatgcaaacgttggcccagcatatcaggcgtcaccaacacaaccccgccggcactgacatgaaagcgtttttcatcggcggccctatcttcgccgatgatagtgccttcggggacttcgcagcccctttcaataatggctttggtaatacggcaatggcgggcgatgttcacgtcaggcaaaacgatcgtatcttgcaaggtggtataagagtttacgcgcacattggtgaatagcaacgaatgcctgaccttggcaccggagacaatacaacctcctgaaaccatggagtccaccgcctggccgcgccggtcatcatcgtcgaaaacaaatttggcgggcggggtttgcgcctgatgtgtccagatcggccacgtattgtcgtataagttcaaattggggttgacgccaatcaattccatattggcggcccagtaagcatcaatcgtaccgacatcacgccaatagctttgctcaccgctttgcaaatccaagaacgggtaggcgttgacaacatatttgtcaatcacggacgggataatgtccttgccaaaatcatgcgacgaacctttggtgtcggcatctttcagcaattgttcaaacaggaaactggcattaaaaatataaatgcccatactcgccagggcggtgtcggtgcggcctggcatgacgggcgggttggcgggtttttcaacgaaagccttgacccggcggttcgcatcaacgtccatcaccccaaaggcagtggcgtcttccaacgacacctcaatgcacccgatagtcaagtcggcatttttctcgacatgatccgccaacatggaaccataatccattttgtaaatgtggtcacccgccaataccagaatatattctggtttgcgtgtcctcaggatgtcgatgttctgaaaaatagcatccgccgtgcctttataccaagagtcttcgtcatggcgttgctgggcgggcattaaatcgacatattccccaaactcaccacgtaaaaacccccaaccttgctggatatgcctaatcagtgaatctgccttgtattgcgtcaggacaccaattttgcggatccccgaattgacgcaattggacaaaggaaaatcaatgatacggaatttaccgccaaacggcacagcgggtttggcccgccaatcggtcatattcatcaaccgagaaccacgcccacccgcaagaatcaaggcaatcgtatttcgggttaagtgctggatgttaagatcgtgcttttttggacttgatgccgacattttcatctccaagtggaattgattcacaattattgttttattttggtaacatttacttgaccattattctactaaatcgaggcaaagcaaagtgaaaaaacaagcaatcaatacacttgacgccgattctataaaaattatagcagccaaacaccatgaccctttttccgtgctgggacgccataccgttaatgaccagacaaaaattaaagtctatttaccccatgcggaatccgtcagttttgctgataacggcgctaaacttgaccggatacccggcacggatttttttgaatatattgataaaaacaatggattgccagcgcattaccgcctgtcttggctggacaaagacggtgacgcccacgaaaaccacgacccctacaccttcgggccgcaattgcccgaatttgaccaacatttatttgcccaaggcaagcattggcatatttaccaaaaactaggtgcgcacttacacaccatcgacggcattgacggggtgttgtttgccgtttgggcgcccaatgcgggccgcgtcagcgtcgtcggcgatttcaaccgttgggacgggcgttgcaatcccatgcgtaacttggggggcagcggtatctgggagattttcatacctggattaaccatcggttgcctttataagttcgaaatcctaaatgcgaaaacccaccagcttttgctgaaaaccgacccttacgggcaacagtttgagttccggcctagcacctcctccatcgtcgccaacgaaggcgactacacgtggcatgaccaacaatggctgacagaccgtagcaattatgattggttacacgcccccatagcgatttatgaagtgcatctgggctcatggcaacgtgacgaccaaggcaatttcttaaactaccgggaattggccgaacagctcatagcctacgtttcaaaaatgggctttacccacatcgaactgctgcctgtaaccgaacatccgctagatgcctcttggggttaccaaaccactggctatttcgcaccgaccagccgccatggcagccccgacgatttccgctattttattgaccaatgccatcaacagggcatcggggtcatcctcgattgggtacccgcgcactttccgaaagatgccttcgccctcgcccgttttgacggtagcgccctgtatgaacatgaagacccgcgcaaaggcgagcatcgtgattggggcacgctgatctacaattatggccgcaatgaagtcaggaacttcctgcttgccagcgccatgttctggcttgaagaattccatctcgacggcctacgcgtcgatgcggtcgcgtcgatgttgtacctggattattcacggaaacacaatgactgggtgcccaacaaatacggcggcaacgagaacctggaagccatcgactttatcagggaactgaacgcggtcatgcacgaacagcaccctggcgtcgtcgtcatggccgaagagtccaccgcttggccgcaagtcacccgccctacctggacgggcggcttaggtttttcgatgaagtggaacatgggctggatgcacgacaccttggcttatatgagcctggatcctatccatcgcatgcaccatcatgaccagctgacttttggtctgctctatgcgttcaccgaaaacttcaccttgcctttctcccatgatgaagtcgtgcatggcaaaggttcgctattgaacaaaatgccgggggatgaatggcaacgctttgccaacctgcgcttgctgtacacgctgatgtacacctatccgggcaaaaaactgttgttcatgggctgtgaattcggtcaaggcaccgaatggagctttaacaaagtcctggattggtatgtgctggaatatgagtatcaccaaggcatacaaaccctggtcaaagatttgaaccagctgtataaatccgaaccggcgttataccagcatgactttgattatctgggctttgaatggatagactgccatgatgtccaacagtccatcatcagtttccggcgcaaaagtggcgatgaagaattatgcatcgtcctgaacttcacgccggtcacccgccaagactaccgtattggcgtgcctaaggaaggtgtctacacggaaattttcaattccgactcgacctattatgcaggcaccaacgccggtaacggtgtggttacgtcagaacccaaaccgtggatgaacctcccccactccatcaacctgaccttaccccccttaggaggcgtgattttaaaactctaaaaaccgatcacgctcaggaagctataatgaaaaaaatactgtttgtcaccagcgaggcacatcctttaattaaaaccggggggcttgccgatgtgtcgggcagcctgccgaaagctttggcggaattgtcacaagatgtccgcctgatcatacccaattaccaggggcttaagctcaacaatgatgtccacaccttgttttctatgcgtgtggacaacatggacattaagattttggaaacccgccttccggacagctccattccggtctggctagtcgattgccatgaattttttaattatccgggcaacccttatacggacgaagaaggcaacccctggcccaacaatgccgaacgtttttcctttttttgccggattgcggtgatttgcgcaatggacaaaatcggccaacactggaaacctgacatagtccattgtaacgactggcaaagcggtttggtgccagccctcttgtctttggaaaaagaccgtcctgcgaccgtgttcacggtacataaccttgcctatcaaggcctgttttccgccagccgcatggtcacgctgaatgtcccgggacagttgtggaaccccgaaggcctggaattccataatatgttgtcgttcattaaaggcggcctggcgtatgccgactgcatcaccaccgtcagcccctcctacgcacaggaaatccaaacctcggcttttggctatggcctggaaggcttgttacgccaccgcaaagacaacttgatcggcatcatcaatggcattgacaccgaccaatggaaccccgagaccgatggttatatccaccaacgctataacgccgattctgttcatgacaaagtccgcaacaaaacggaattgcaacatcgtgtccaactgcccgttaatgaaaatgtggcggtgtttggcctgattagccgcttagttgaacaaaaaggcatagacatggtgctggattgtttaccggaaatggtcaatatgccgatgcagttcgtcttgctgggcagtggcgacaaaagcgtcgaaatccgcctgcaacatttggcggagctataccccgataagatcgccatcaggctgggttacgatgaaagcctcgcgcacctgattgaagcgggggcggatattttcctgatgccgtcccgttttgaaccctgcggtttaaaccaaatgtacagccaacgctacggcaccatccccatcgtcaggaaaaccgggggcttggcggataccgtcatcgacacctcaacggaaaccctggccaatggcacggccagcggcatcgtgttcaatgatgcccattcgggctccttgctggaagccatcaaacgggtgatgttgctctataacatgcctgagcagtggcgaaagatgcaggtcaatgccatgcgtaaagattttacatggcggcaaagtgcgcaagcatatttacgcctgtatgaaaacctaaacaagcattaacagccttagggacaatatcccgtccaaggatgttgtcccttttgaaaactacttcctggcttcaatcaatttaaccatatccccgctaccctcatccacccgtactgacacgaacgggcaggctttgacgcttttgacggtattacggtcaatattcgccccaaacaaacgtagcgccaaggggttcaactttttcatcaaccatgccatccacggccttgaacttaacacatgctccaacagcaacacctgccctcctggtttgcaaacacggtgcaattctttcaaaccttttaagggcatgggcacggaacagaacacaaaagttgcgaccacggtatcaaaactgttatcggcaaaatacaaagactgcacgtccatcagttccaaatccaccacaacttttttacgctcccgctgcctttccgcctgtttaagcatgcccgggctaaaatcgattgcggtgatacgggcataacccgggtaataatcgaaatttttgcccgtgccgacaccgacctcaaggacatgatagccctccacccgctcccagagctttttgcgcaatctcttaaacaataagccttcgataactgattcaaaaatatcaaaatacggggctatacggtcataacgccttttaatggtttcgctacctgctttcataaacaatcagccgtggatggatgggaagcgggcatgttacagcgtgtaaggaaagggcggcaatataattttcttccccataagcccgaataagccgtagttccagggttggtgggcacaacctcaggatgacccacttcccgttttttaggaagccgtcgccagccaattatcctggctttgggggtgactgagcaggatcactttcctggcaccaccaacagttttcctggcccgcccggcactgttcgtgtgccttgtgtagccaggccgccccagcccaatgggtagcggacaggaagacagccccttttggggcggcaaatttggacaatttggctttcaccacgctttccaagcggcggcggcacccaccttaaggcattccggcagtattccaatggggccaacagcccccttccctgctggagcccgctaaacggctgcttttcaaaggggggggtgcaaaaggccgggcattcatcgtaaactatgccttaagccacacaaagggccggattgctttggctcctcgcaattccacagaacattgatcaaacaagttacgctccggtaactttcagaattccaacctacgggcaactcctatgaaaaacctccaacaaacacttatctggctaaccatagccatcatcggtgcgtcggcaatcggtggcattgccatccaacggggcgaaagcatcaatgccttatggtttgtcaccgccgccttatgtgtctatgcgatcgcgttccggttttatgccgcatggatcgccgcgacagtgttggcggtggatgaaacccgcgccacgccagcagaacggctggacaacggccatgattttacgccgaccaataaatggatcgtgttcgggcaccattttgccgcgatagccggccccgggcctttagtggggccgaccttggcggcgcaattcggttatctgccagggacgctatggattttgttcggctcggtcttgggcggttgtgtgcaggatatggtgaccttgttcgtgtccacccgccgtgacgccaaaagcctggggcaaatggcgcgggacgagcttggcgcactgggcggtacggcggcattgcttgcgacgtttacgatcatgatcatcctgatcgcggtgttgggtttggtggtcgtcaatgccatgaaacacagcccgtgggggacattcaccgtgtcggccacaatccccatcgccatcatcatcggtttttacatgcgccatttccgtcctgggcaagtgctggaggcctcggcaatcggcgtggccttgttgttgttatcggtggcggcaggcggttggatagaccatcatccggtcatgcgcacctggttcgaccatgaaggcttgactttggcatggtggattatggcttatggttttgcggcggcgattttgcccgtctggatgctccttgcgccgcgtgattatttgtccacttacatgaaactgggcacgatcaccttgctggcggtggcgatcatcgtcctgcaaccgaccgtaaaaatgcccgcggtcacccaattcattgacggcaccgggccgattttcggcggcaaattgttcccgttcgtgttcatcaccattgcctgcggggcgatctccggtttccattccttggtcgcatccggcaccacccccaaactgttatcaaacgaacgtgacatccgcaccatcggctacggcggcatgttactggaatcgttcgtggcgatgatggcgatgatcgccgccaccgtgctggatcctggcgtgttcttcgccataaacagcccggcgggtgtcgtcggtaaggaggccatagaggcggtggcgaaaatctcgtcttggggctttccggtttcagtcgagcaaatgcagatactggccaaggaaatgggcgaaacgaccttgtttgcgcgtaccggtggcgcaccgtctttggctgtgggtatggcaagcattttcggcagcgcgttcgggcaaggcatgttggcggtgtggtaccacttcgcgattatgttcgaggcgattttcatcctcaccacgctggatgccggaacacgggtcgggcggttcatgttgcaggatatgctcggcaatatctggccaaaaatgggcgagacgtcatgggcaccatccgcgctcatcaccagcgcgttggtggtgtccggttgggggtatttcctgtacatcggcgtgatcgacccgaatggcggcgtgaacatcctctggccgctgttcggcatcgccaaccaaatgctcgcggcgatcgccttgtgcgtgtccacggcaatcctggtgaaatccgacaagctgaaatttgcttgggtgacgggcttgccgctggcttggctaattatcatcaccagcaccgccacttggcaaaaacttaccagcgaggatattcgtatcggcttcttcgccgccgccaacgacatggccgacaaattggccagcggcagcctaccgccggaaaaggccgccaccgccccgcaactgatttttaacctgcatttggatgcttatatcagtatcgcttttgtcagcctgctatggctaattgtgtttgatatgttgcgggtgtgcagccgttacctaaccggaaaagccgtgccgccgttgaccgagtcgccgcacatccctagccgtttagttgaagaatgggtgagggactaatgttgaagcacctcaaagtgttttggcgtggcgtgcgccaattgtctggcgatgacgcttatgaacggtatctgcgccattacgcccggcaccatgccgatgcggaaaacccgcccttaagtaaggcggagttttttaaacaatggcaagatgggcaatggcaaggcgtgaagcggtgttgttgagggttttggcgttatcggaaggtcattaaacctgtttctgaagccatttgaaccttaattggaaacgcctaaacacatctaaatcgaaacgcgcatatacaagccagacgatttcgattacaatttgcccccttcaagatcttggggtgttagctcagttggtagagcaagggactcttaatccttgggtcgagagttcgagtctctcacgccccaccaatataaacaatcggttatatatttacagttactatcgaatttattttttgtttgataagtaaccagtatgtaaccgattttattctatagtatgaccaaatcgccaatatttggcagatacaaaatttccacaataattgccgtaattttggaaaaaacccactcatcaaagtgacgactaggatttatatccttaccttcactcacaacccagcaaggcttatcctatgagccaactgcaatacatcacctcaaaactttccttataggcataaaaaagcccccttaggttttaccttgcgagggctgtggtcgcgtagaagcggtgcctacgaagaatctcattggtataaaatgcaccatgcaaattacaacattggtatgaaaagcaaataggccttagtcggttacactgaggctccgattatacagtaggggaaatcatgggcaagaaagttttaggtctggatctaggcagcaactccatcggttgggcgttattggcggaagaagacggcaaacccaaccggattatcaatattggcagccggatttttattaaagccgttgaagaaaaaacgccaaccccgaaaaacgtcaaaaggcgcaacgcccgtttgacccgccgcgtcttgcaacgacgcgccaaacgcaaactgcggatgctaaagtttttaatcagcctgaaattattgcccgatgacttgcaaagcagtttcaccccagaaatcgaactaaacgccatcggcaacccgtacccgcttcgcgctaaagcccttgacgaaccgctcaccacctacgaattaggccgtgtgttactacatttggtacagcggcgcggatttttgagcaaccgtaagaccttgttgggcgatatggcggatgaccctgacgtactcgccgtgttagccgaattggaagacgaggaagataatagtacggaacgcgcgaaagaagaaagtgcgtttaaggagcaaatcaagaattttagaaatgttatcgccgctgctaattgccggacgttgggcgaatatctggcaacgcgagaccttcacgaatgccaacgcaaccgcagccacgatggtgggcatttacgcaccgaccgtcaaatgtaccacgaagagctggataaaatttgggaaaaacaacaaaactatcacaccgttttgaccgatgatgccaaaaaacaaatcgaccacatcatattttaccagcgtccgctaaaactccgggctgaccgtattggcaaatgctcgctagaaccgaaacgtacccgcgccaatattgcccgtttagaaagccaacgtttccgctactggcaagacatcaacaacttgcaatattttgaaaaccataccgatcaatggctaagcctgaacgaagcgcaaaaaaccaagctagcgcaattgtttgaacaccaagccagcatcagctttgcagggattagaaaagccctgggctttgacaaaactatcgaattcaacttagaacgcggcagcaaaaagctcaaaggcaatatcaccgcttgtgaaatttgccgcgtatttccggcttgggacagttttaacgacgaccagcaacacgcgctggtggaagatttactgaccatccagaaaaaatccgtgcttaaaaatcgcttggaaaaacattggcacataccgcctgacattgccgtgcaactgtgcttgctggagtttgaacccggccacagcaacttatccgttaaagccatcaacgccttattgccgtttttgcaacaagggcagattttttccgatgcccgcgtcagtgccggttatggctacgagcggcaagagatcatcccgctggccaagctccccgcgccacccgaaacagccaatcccatcgtcaacaaaggcttgcatgaactgaaacgtctcatcaacgccatcattgccgaatacggcaaacccgatgccatccgcattgaaatggcgcgggatttggaaatgaacaccaaacgctacgccgaacacgacaaacagcaaaaggccaacaccaaagccaatgacgaggcgaccaacaaatttcaggaaatgcgccagcaaaacccacatttgcagctacgcaactatcccggcaaaaccgacaaaatcaaatatcggctctggaaagaccaagaccaacgttgtgcctattctggtaaagccatcaacctatccaccttgtttggcgcggagatagaaatcgaccacatcttgccgtacagcgaatcgctggatgattcgtacatgaacaaagtggtgtgttacaaccaagaaaaccgctttaaaggccaaaaaacaccgattgacgctttcggcaaagacgaaagcaaatggaaccagatcacccaagccctcaaacgctgggacagacgattgcagagtaaaaaaaaccgctttgtcatgaccgccgccgacgtgcaaaaacgcgactttatcagcagccagctcaacgacacccgttacatcagccgtgttgccttggattacgtcaaacaactgggtgcagatgtatcggtcagcaaaggcatcaccaccgcgtgggtgcggcatcaatggggcttgaacaacttgctgggcgaaggtgacgcaaaagaccgcagcgaccaccgccaccatgccattgatgccgtggtgattgcttgtgttgaccggcgtttttacaccgcgctggtaggcatcgccaaagatttggaacgtaaacaatcgcagctcaacatgaaagacatccacattgacccgctatggcctagcttgcgtgaagatttgcagcaagccttaagccaggtgattgttgcccacgcgccgcagcttaaattgagcggtgaattgcacgaagtgacgggggcaggatttattgagggtattggcaacgtcaaccgcaaaaatttggacggcaattttacccaagtggacaaaatttacgatgcagccgttaaggaacaagttgaacagcatttaaaacgttttggcaataaacctaaagaagcctttgccgaaggcaatgttgtgttgcacaaagacggcaaaacgccgattaagcgggtgcggattgtgcaatccaaaaccaccttggcgaagctggaaaaatccaaatttggcgcacgtgacaaacaaggcaaggtcttcaaatggctggcttacggcaatttgcaccatgtggaaattttacgcgacaagcaatccggcaaatacagcggcgagtttgtcaccatgatggaagccagccaccgtgccaaaggcatcggcaaacctaagcagccgatagccaaaaacgaccacggtgagggatttgagtttgtgatggccttgcacatcaatgacattgtgagtattgagaatggcggacagagggtattttatcgggtgcaaaacctagatagccataataaacggatgcagctaaggctacacactgccgcatcttcaaaaacgcaagacaaggccaaagataaagcgagagaccaagcaacgacattgccggataaagattcaacgatccctgcattgatggcattgggcttgcaaaaacataagctcaatattttagggaaagtcatcgcatgattaagcgcgtcatagacattagcgagcaagcctatttgcaccagcttcatcaacaactggtgatagacaaaaacggcaaaaccgtggcgcaaataccgattgaagatttgggcgtgctgattttgcagcatccggcgatagtcatcacccaagccgtggttatcagttgccagcaaaacaacgccgccatcgtattttgcgacgcgcggcatttgccgtattcggtgctgttgcccatcagtgatggcaatagtttgcacagcaaaatcatccggcaacaaatcagcctgagcttgcccgccaaaaagcgcgtctggcagcaaattgtcaaacataaaatcagcggtcaagcgcaagtgctaaaacacgtcggcaaaaaccctctgcctttaaagcggcttgccgaaaacgtaaaagcgggcgaccctgaaaatttggaagcgcaagccgcgcaaaaatactggcggctattgtttggcgatgggttccgccgcgataccgatgccgaaggcatcaacagcttgctcaattacggctatggcatcatgcgggcgatggtggcgcgggcaattgtcgccagcggcttgcatccggctttaggtgtgcaacatagcaaccaatacgacggtttatgtttggcagacgatgtgatggaaccgtttcgtccgtgggtggacttgcgcgtttatcagctcagccaacaataccccgctttagaagtcaaccaaaccactaaactcccttttcttaaactgttaagcgaatcggtgtgctggaaccaacaaaccatgccactgatggttgccagccattatctgatggcggacattaagcgggcgtttgacgataaaaatcagaaaatcaactaccctgaatggggtgaactactgttatgagctttggcggcttaaattccatgtggattatcgttttgtttgatttgccgaccgacaccaagcaagcccgcaagcaatacaccaaatttaggggctttttgttggatgatggttatacaatgatgcaatattcggtttacatgcgccatagcagcagcgatgaaaacgccaaggtgcatgtaaaaagggtgaagcagaagttgccgccggacggcgaagtgcggattgtaaaaataacagacaagcagtttggaaaaattgaggtgttttatgggaaaaagcgcagacctattgaaccccccccctgagcaactctcgcttttttgacagtaaaagcgggggttactcactatatttcagtgggttattgatggggtagtgtaaccgactaaggcttacccacaaatcacaacgtcacggcagaattgcccgggggttattttagtgtaaccgactaaggcttacccacaaatcacaacgccgaggccagcgcattaaaattaggtgatagtgtaaccgactaaggcttacccacaaatcacaactctatgatgcgcatttacgcgaacaatacgagtgtaaccgactaaggcttacccacaaatcacaacgtcaccgtttggatcaccgtacccaccgggagtgtaaccgactaaggcttacccacaaatcacaacggggcggtagggatttgctatcacgttctagcgggtgccggaaagacggcttttgggtatagcgccattgctctggctaccccacagcatccccgccttcaaccaccacatcttcaaaaacctcaaccaacgccatcgagactcctatgctggtaaactgacaaacctgttcgccgatgtaatcctgcaacaaccagccattgtcggtagtgcggcggaagcattccacgcagcggtcggcgatgtcgacgatgacgtattcttgtaacgacggcagactgcgataagcggcgaatttaccgccccggtcaaatgcggcggtggcatcggacaagacttcgacaatcagtttgggttcggacaaataaagcccggcgtggtggtcttgcgccgagcaggacaccgtcacgccaggataaaaaaagcgtccgcttgctcgacccgtaatttcatgtcgtttggcaaccgcttccgcatagggcttgcttaaaagcggcggcgatattcaggctgaccacgacatgcttgcgccgcgccccggccattgcaaacgcttcgcccgccaagtattcgtgcttttcgctttgcccgctttcccactgtagataatcatcggcagtaaaacgtggcttgaggacggtattcatggtttacgctccattagtgtgcatgggatgctgtaggtaaggtaaggtcaaatcatactccaaaataatggggattaatgaatgaatggtaatggtggcctcgttcccaagctccagctttggaatgcaggagtggaagctctagctttctgtcattctcaaatctagagcttctgagacttgggttcccaagctgaagcttcactgccattaagttaagaaataaatattaatattcatgcagttatggttgtatttttgcggtgcatatcaatcgtaggtcgggttacgctatcgctaacccgacctacaaattcgttcgtaattaattgttttattttgattaaagccttaacttaatggcagtgaagctgaagcttgggaaccagcgcaaccatttcgccatccgggccaagcggcttattaaggccaaccaaatggcttatgaagagctacagaaattattggctgcgtaacatcagctatagacgttcgttgatcaaaaacagccggattatgttggctttgcactttgcaaaaatgcattcaaatgcgcccccaggattttataagttgcgcagtgacaagcgtacgcgctgcccgccaattgtgctagtttgcatcaatcacccagcccgcgactacaggaaaatatcggtttttagaatagcaattatggtcaggatacccgttcaggagtatggcagaataagccccacctagaagagatattagagattactggaacaatggctggccttgctatgcagataagttcatatgaagacagaatggagcgagtatgtggctacatccgggacaaccttgataaagatttatctgtcgaacgattaagccagattgccctattttctaaatatcacttccaccggcaattttctgagtatatggggattaatgtcttcaggtttatccagttgatacgtttaaaacgagcatcgtaccagttggcatttagccaaaatctacggattatcgatattgcatttgatgccaaattcgaaaatccagaatcgtttgcccgcgcatttaaaaaatcctttggtcagacaccctcacaattcagaaaaaaaccgcaatggaagtcctggcatgaaaaatatcggcaacccatacccagaggaaaaaccaacatgcaagtaaacatcgtggaatttaaagaaaccaaagtcgccgtactggagcatcgtggggcggttgagacattgaacgattcggtcggggtatttatcgaatggcgcaagaccagccaattatccccagtgaaaaccagcaatacttacggactcgcctacgacgaccctaaaatcacggctcctgaaaaattcagatttgacctctgcggctcagtcgaagcggacgtgccggagaatccgcaaagtgtcatgactaaaataatcccgggcgggcgttgcgctgtgattcgccatttaggcccgcatgaagctatggacgacaagatacgatttttatatgggatatggctgccggaaagcaatgaagaattacgtgattttccttgcttctttcactatctgaacctgtttccggacgtgcccgagcatgagttgatcaccgatatttatttgcctttgaaaggagcctgaatttttacatcatggctaaagcataagtggccagcctcattacgattcaagcacggcctaaacctgtcacttgtgcgcctgtaatggtcgagagcctgcaagtgatgcgctggggtgtgcaaatgagcacaattacgcatactttagccattcttcattaatgtggttcctgacgcccggatattatcggctaatgtggttccgaaaggcgattttattaaacctcctataacgccccgtacttttgataattgccagatgaccttaggcagacatatcgatctttaacgcaagataggggtacaatattgacccgatgcttaacctccacaaccttaccgataggaatgcagcatgtccgagaaccacccaagcacccaactccctgaacccatcaacaaacagatgacgcctagtgaaaccccgcccggctcgcccaacctgtacatggcgattgcgcaagctttggccaacgccgccaataatgccgtcaacgcgcaacaacagagttacacgaccatgctcgcggcaacaacgatgggcgtggaagccttgtacaccctagacagcgccgcaccatccgccggctcgcaacagattttacaaacccaaacggaacttgaagaggcgatgaaatccttcctcatcaccccgtcagccgccctgctggatgccagccacaattcgtccaccaccaacgatttttccgacagcatccgcctcatcagtgaagccttcgctgcctcattggataagtttggcgagacggcttatttgcaaatgctgcgtatcatccaactcgcggccatcgccagttccttggcggcattgatcaaaacgccggaacaggccgaaaactacgaacgcgtattggctatcattaaaaacttacgctgagtggtattaaaaattgcgatggacgctacataaacacatgacaatcaatgtcggcaagtagcctctaaggttcagcaatgcaaacaatcgaccagctccgctccggtgaacttgccggcagtcgccatctgaaattatcctgcggcctaaccagctttccgcgcgaaattatgggcctggcagatacgctggaggttcttgacctctccggcaatgcgctctctgagctccccgatgattttgcgcaactgggtaaactgcgcatcgttttctgctctgacaatcagttcacggagttgcctgaggttctgggccgttgccctgagctgggcatgatcggctttaaggccaaccgcatccgcaaggtatcggccaaggcgctaccggccccattacgttggttgatcctgacggataacgagatcgaagagctgcctcacgcaatggggaattgcagccagttgcaaaaattaatgttggctggcaataatctccaagcgctaccggactccctggccaactgcaagcggcttgaattgatccgcattgccgctaatcggctcaacgagttacccatctggttgttggctttgcctcgcttatcgtggctggcgtattctggaaatccatttggggctgaattggaaagcaagatgctgacggcttcgtcagttgctgatattccttggaatgccctggaacttgggcatctgttaggcgaaggcgcttccggggttattcatcatgctaactaccatcatgctggcgatagtgcttatggcgttgctgtcaaattgttcaaaggcgcagtgaccagtgatggtttgccgcattctgaaatggcggccgccatcactgccggacaacatccgaatctcattaatgtgctcggcagggtgagcggccatccatcgggtgtcagcggcttggtgatggaactgattagtccggaattcaaaaaccttgccgggcctcctagcttggcgtcttgcacccgcgacatttacccttcagaaacccgcttcgatttaccggtggtgttgcagatagcctatggcattgcttctgcggcctggcatttgcataagcaagggatcatgcatggcgacctttatggacataacattctgcattgtggccagggacgggcattgattggcgatttcggcgcggcctctttttacccggctgatgatagggtaattgccgatggcttagagcggcttgaggtaagggcttttggttgcctgcttgaagaattgcttgagcggtgcaggccaacgcctgacaatcagcaggtgtttagtttgcttaatgatttgaaatcggcttgtttgtccgatgaaagtggacgccggccattttttgatgaaatcacaggacgattgattgaggctatcggagggctgaattgaaaggcaacgcggtaaggcgtaatcgacagggtgcaacacggctatcgcaccctaagaattattgcgccttaccgcgttttcgataaatgccacatcaacacatagctaatcatagccataaaattcagtaggcgactacaaagaattagcatcacccataaaggtaatgaaagccatggatcctttaggcaacaagcccttagcttagacggattggtcttttttcatactgtcgagcaattcacgggccttggcgatttcttcttcagtaccatgcaggataagcaagtatttgtctgcgataagatccctttcgtatttaacaacctcatcttcttccaacccggaactgattaaggcagctccgagggcggataggccacccattaccattgagctttccaaagcggcaactaaggtagtgacaatcgggcctgcaagcgcgaccaaaccgataccaggaataaaaaatacagcgggagcaaatagcaaaccccatagccctccccaaaccgccccaatccccccccaagttttgatacggtcacctttggtatagaaacctaccggatgttcctcagtttggtagcctttaccgatgatagacagtttttgcatatcaaaaccaaatttattcaaggccttaatggcttcatcagcttcaaaatgcgtgtcaaatacggaaatgacggtgttttcttctgtactcatgttgtgtgccctatagttattataagaacggttggataaccgcatccggtaagccagctatttcaaattgatataggtcgctggaaagccaatatcataaaccatcaggattatcaatagtccgacaagctcccctggaatgaattcaatttcgtcacctttcatctgtcctcagatgacagttgcggctgaaattcccgaagggcgacgtatcaaaatttcaaatcaattggataaatttcgacccaattatttagcccatatcaagctgtgacgatatttttcggcaagagacaaaaccatccatcgcgggcctgtctcttttggaatgtgggccagttgattggtgtttcatcttggctggcggattagcacgtcaagtgatccgccaactggacggatcaccaaacattgccgataaaaacataagcttgtaccaaaacggcggagcaaatagttcagaaatgttcaagattcagtctttttacgtaagcgctcagccaatacccgcatgacattcaaagcaaaataaggatgttcttggactaagaagttgaaatatttttcattaatagcaaccacttcgcaatccgttttagcgatggcattagcgtatctgattttggtgtcaatcaatgccatttccccaaaaatctcgcctgcccctagggtaatcaactctttgccatccaacacgatagtcacttcgcctgatttgacgaagtacatttcttcaccgacctgaccggattcgaatattttttgtcctgcggaaaagctttcgacatttttatcgctatttaagatattaaaattagggggtaatgacatgatatttccttgaataaagtggggacgttacaacgccaggttgacaaagctgcattttagcacgctatgggaaactgcggtttatacccaaagtgcctgtccattgccctgtatcccattacggtcagtcaacgtcaatttgataatcatccaaaaattgctcggcataacgtctatagactttctgattgatgaaagcatcgtataaatccggatcgatatggtgggtttctttcattttttttaagatggccaaggcttcagacagttttttgcctaacttataaggcctgtctttcgcggttaaggcctcaaaaatatcggctattgccatggccctggcctggatggacatgtcttcccggcgcaagcctttaggataacccgtgccgtccattttttcgtgatggccgcctgcatattcggggacattttttagatgttttggaaacgtgattttttccagcatggcgatggtggcgacaatatggtggttaatgatgccccgttcttccgctgtcaatgtgcccctggcaatatttaaattgtatatttcattctcagacaatagcggcagctgctcgccgtttaaacaccaggttttttgcccgaatgaacttatccggctctggtcttcgggcgacatgaactcgccgcccgtattggactgcctgatgaatgccaaatcctcatcaatttcggcaacggcttccaaatagcgttgtccaattccggcatccggtttttccccattttgaaaagcaagcatctgttgcttaagcatggctatttcctggtcacgctttaaaacttcaaaacgtgtttcaatcaaccctatacggtcataaatagtttgcaacttggtggacttgtctatgacggactcaggcgtggtgatttttccgcaatcatgtagccaaccggcaattttaagttcatagcggtcagcgtccgtcatcgcaaagtcttttagataaccttgctgggtattgtgcgccgcttcggcaagcatcattgtcaattccggcacccggcggcaatgcccgccggtatgcggagatttatcgtcaatagcggtggcgatgagctgaattaatgattcaaacagattttccagatccgcaattaaacgttgcttcgtcaacacgatagccgcctgggaggcgagggcttcggtgatatgctgcgaaatatcatcaaaaccggtcacgccgtggttttctttgtctattgaattgatgagttgcagtatgccaatgatgtcgccttcatggtttttcatgggtaccgcaagaaaggatttcgagtggtaattattctgacggtcaaaagctttagtcccggaaaaatcaaagtcttgatcgttataggcatcgacaatattaatggtcttattgttatggatggaaaagctaacgacattttgcaggttcggggagccatcgtcgaaaaacaaaggtatgtcaggcatgtttattggagttcctgaacttccacctaacttgatacccaggctatcagaatggacaatctccatttttatggcattgccataaatacggtataaagtgccgccatcggcattgctgatctgcttggcgccttgcaatatcatttccagcaacaaatcggtattcatttcagatgacaaggaaatgccaatgcttatcagctgttcgagctgatcgttgatgttttgattattcatatagttaaaccgatccgctattaccttggcccaaaatgtgagccagagtatatcgcacatttctgatcccacccactgctgtaatgggcgctaaacataccctggtaaagcatggcgggtttaagataatggctgaaacgggatatgcatcggcttagcgacgtgtgcctgatcttgccacggtctagtggacacccggctttcttattttcgttggggtcgataccgccatctatttgctttttggccgtatctcgcttttccctcgcttctttaagtgaggtggctgggtaaatgccaagtgccgacgttttgcacttgccattgaatcggatgtgtagcggaagcatttagagccgttgggattgactggcaaatacaagccattttcatcttgtaggccttatctggcgtgggtttggcgtcgttcttgaggcggtatcaactccagtcaatctgaatgtaccgccacttatttcgccacaaatggcggtatatcgatgtatctgcttgcacttcgttggacacaaaaaaacccgctaagccttacggcttgcaggtttctgtacttcgttgcatctgcttgtatg

SEQ ID NO: 663 - DNA, 23108 bp, synthetic construct
  source 1..23108: mol_type = other DNA
  misc_feature 1..23108: note = Synthetic
ttggaataaacgcattaggaacaaaccgaacgaaatttcttttaatggacgatcccagatcggctcacagacggagcgaatggccgattccaattcattaacccgggtatcggccggcacccagccggattcgatgtggagttcggacacacgtaaataatcacgattgaaaaaggccaggaagttttccgccagatagcgctggtcttctgggttcagggtacccataatgccgaaatctatcgcggcataacgtccatccggcaacacaaaaatattgcctggatgcatgtcggcatggaagaaattgtgtttgaacacctgggtgaaaaagatggtgacgccttttgccgacaggtcggtcaggtcaatgttggcggccttcaatttgtcgatttcagaaatgcggatgccgtaaatgcgttccatcgtcatcacgttatcgttggtgtgagaccagtaaatgtcgggcacatacaataaatcggaatgttcaaaattacgacgcaattgcgaggcattggaggcttcgcgcatcatgtcgagttcatcgagaatggttttttcaaactcttccaccacttcagtcggatgcaggcgtttcgattctttcaccgccgcttccaataactgtgccagagatttcataatggcaacatcttgctcgatcaccggtttgatgtcaggacgaaccactttgaccaccacttcagaaccgtcatataaggtggcagcatgcacttgtgcaatggacgccgaggccatgggtttagggtcgaagctggcatacgcttcttcgatagggcgtttcaaacccttttcgatgatgctgatggaatgttgttcgtcaaacggcggacaatcgtcctgtaattttcttaattcgaccgagatgtcttccggtagtaaatcttttcgagtggaaagtgcctgacccagtttgatgaaaatcgggccaagctcttccaaagccaaccggatccgttcaccacggttgcctctggattgaaagcgccagttccaaggtagcagcaagttggcgacaatcaaccacgcatatttggtttcacttaagaccagtttgtcgatttgataatgggtgaggacgcgattgattttaataatgcgagtcagttgtcgaaaagatttactaatgatattcatgtgttgtcgtcaattaagtggaagaagtgttttgcaggcgttgaatacgttcagctaattgatccaccgcttgggaagtttgctgtacattttgcgcaaatcgattgatttgtgagtgggtcggcagcacttctatttcgaactgcaaatactctttgagcgtttcgccgattttctgtttagcatcacgagaagatttttggccttgtcgaaccgtggagccgactttgaatgcgattaaatcaccggtcaccttagacaactgttcttcccagtcgatttctaaggtcttgaccgcttcaataaacgcttccgccaccgtttcatcgcccgaagtttggtaagctggctggttttgaatccagtcgttaacggaaaacttgaggtgacaatcggggctgcccattaagtgattctgcacactgaatgtgccttgcccatccggctggatttgatagatcagaaaaaaggtttgtgcaaaatccgtcaatgtcagttgaatgactttttcatcacaaggggcaaaggcttgaccttgttgatcatccagttgaatcgcctggttaagcagtgtttcaaacagtttggataatgatgttttgaccaggcctggtgaattttctgacgtgtccataccgattccttttagtatttccaaccgcgatgcaatgccacaatgccttcagacatgttgaggtattcggctttatcaaagccagcctccagcatcatttgcttgagtgtttcctggtcggggtgcatgcggatcgactcggccaggtattgatagctggcttcatcatcggcgatgagttttcccattttcggcaagatactgaaagaataaaaatcgtaggctttggccagtaatggttgagtcactttggaaaactccagaaccatcagttgtccacctggtttcaaaacacgatagatttcttcaagtgccttgtccttgttggtgacgttacgaagcccgaacgaaatggtcaccaaatcaaaggtgttgtcaggataggtcagtgcttcggcattagtgatggtgtaatccacattgccgatgacgccttcattggtgaggcggtcacgcccgacacgtaccatactttcattgatgtcggcgagtaccacacgcccggttttaccgacacgtttggcgaaggctttggttaaatctccagtaccacccgctaaatccaacacgacattacccggacggatgccactgagttcaatcgcatgacgtttccatagacgatgaataccgaatgacatcacatcgttcataatgtcgtaattgccagccaccgagtcaaacacgccttttacttttttaactttctcttctagtggcacttcgctaaagccgaaatcaatggtttttttggagtgtgaatgctctgttgtcataaaaggcgtcctaattaatggattcactcgatgttcaagcgaaattacagtagttgggttaagtcggttggctcaatgtccgggtgtttatgtccggcaagttgcaagcgttttaaatagtcttgccaataagccgcttgatgtttgcccagtttatagagccattcccaggtatagatgcctgaatcatgcccgtcatcaaaatgcagcttgatggcatagttgccgacaggggtgatggcctcgatattgacagcacgtttgcccacttgcagcacttcctgcccgggcgcatgcccggtcacttcggctgattgtgagtaaacacgcagatactcacacggcaaatcaaacgtttcgccggtatcaaacgtcaccactagctgacgtgatgcttgtttgagcttgatatcagtcggttgtggagttggtgccataaagtcctcgatgttttacaggatgtattgtgagagatcttgatcttgcgatagctctcccaaacgatcattcacaaatgcttcatcgatgatgacggtttcctgaccgaaatccggtgcattgaaagacacttcttccagcaaatgctccataaccgtatgtaggcgtcgtgcaccgatgttttcggtggtctcattcacgtggtaagcaatttccgccaaacgtttgatgccatcgccgctgaattcgattttgaccccttcggttttcaacagctcaatcgcttgcgtggttaaagccgctttaggttcggtcaagatgcggataaagtcttccacttccaacgatttcagctccacgcgaatcggtaaacgcccttgtaattccggaatcaagtccgatggcttcgctaaatggaaggcaccggatgccacaaacagaatgtggtcggttttgatcatgccatatttggtcgaaacggtcgacccttcaatcaagggtaacaagtcccgttgaacgccttcacgagagacatcgccgccgcccgacccttcttggcgtttcgcgaccttgtcgatttcatcaatgaagacgatcccattctgctcaacgttttcaatcgctttggttttcaagtcttcctgatcaatgatgcgttgtgcttcctcttcggtgagcaatttcatcgcctgcttgatgggtaatttacgcttgttctttttgccttggtttaacccttggaacatgtcttgaagttggttggtcatttcttccatacccggcgcgcccatgatttctacatgagcgggagccgcattcaaatcgatttcgatttctttgtcgtctaattccccttcgcgcaggcgcttgcggaatttctggcgcgtttcagacatatgttcatagctgtcttcttcccggccacgagcaggcggcaaaagcacatccaggattttttcttccgctagatcctgagctttgcttttgacgcctttcatcgcttgttcgcgttgcatcttaatggcgttttccactaagtctttaatgattgagtccacttcccggccgacataaccgacttcggtgtacttggtcgcttcgactttaatgaaaggagcgttcgctaatttagctaaacggcgcgcaatttcggttttcccaaccccggtcgggccaatcatcagaatatttttcggggtaacttcttgacgaagctcttcaggcagttgcattctgcgccaacggttacgtaaagcaatggcaacggattttttcgcttctgcctgaccaacgatatagctatccaattcgtgaacaatttccttgggtgtcatcattttgagcgggtttccttcaattctgagttttcgattttcgtgtaattcgtttattataaaggaattactgtaatgaatgatataaggcacagcaaaacaccatgacaaacttattaaaattttccaaaatgcagggtctgggcaatgactttatggtgattgacgccacgcaagaaacgattacgctctcaacagaagaaattcgtttctgggcgaaccgctattttggcgtggggtttgatcagttgctcatggtggaaaattcggcacaggtcgatgtggattttcgttatcgtattttcaatgccgatggttcggaggttcaacagtgcggcaacggcgcgcgttgttttgccaagtttgtgtatgaccaaggcttaaccgataaaaccgagatacgagtggaaacggcgtcaggcattattgtgctgtacattaccgaacaaggttgggtgcgcgtaaatatgggcgcgccgaactttttaccgcaagccttgccatttgatatgccgttggaatcggaacaatatgaattggatgtggacggagaacgttttgaaattggtgccgtgtcgatggggaacccccatgcggtattacgggtggccgatttaggtgccgcgcctgtcgccgaagtgggtgaaaaaattgaatcgcaccggttgttcccggaaagagtgaatgtgggatttgctgaaacatcggatcgtcaacatatcaaattacgcgtttatgaacgcggtgcggcagaaacgttagcctgcggcaccggagcctgtgcggccatggtggtgttaagaaacctcggagaggtggacgatgtggtgacggtttcgttgcctggtggtgatttagagattgaatggaatggtgataaaagtagcccggtttggatgactggccccgccgtccatgtgtttgatggggaaattgcaagaggagtacctgcttagtgtctagcttgattaatgatattcatgccgaagatgtggcgaactatttgaaccgaaaccgtgaattctttcatgtgtttccgaatttgttgaatgagttgagtattccgcatccgaaaagtggccatgaggtttctttattggaacgtcaggtgtttcagttaagagagcagcgagacagcctgcaagttgaagtggacacactgaaagacattgccggtgaaaacggtgccttgttgcataaggtgtatgatctatcgtatgccttactggcggcagagtcagagcaggacgccgtcaacgtggtttatgatgtgatgcacgaagtctttactgttgaagaagtgactattatttcttgggatgtcccgaaaacatcggttcatggcgtaaatcagctagggatttcccaggcctggtcaaaaagcttaaaagaaaccttacagccgggtaaaccggtttgtggcttgttggaagacagttggcagaaagggttatttcatacggatcaagccatgcagtccgtttgcgtgattcccttggggcagcaacgagtgtggggtgctttggcgctgggggcgaccacggatcgttttagcccagagttaggcacttactttttaaaagtgatggggcagatgatcacggcgcgattgcaacgcctgttttaaagcttataaaaagacgatcatctggtttccggattgattgagcctaagccgttaagcggtgcgaccttttcgacgcgtgaccagcattgcaaaagccgcgcccgtgatgaacatcaataaagaataagtcaccgcgggaatcatcatggtgctgttgccgattaaagtgccggccaccaccaatgccaaggttccattctgaatcccgacttcaaaaccgatggaggtggattgcgcttccgacaatttagcccacttcgcaagatagacccctaatatcaagaccgcaatattcaagaccaaagtcgctaaccccgcttgcataaaaaagttcatcatattgtcggcatttttcaatacaatcaaagcaatgatgaagaataaaaagaccaccgagaaccactttaaaacgtgttcgattttagcggcgatctgagaccaacgcgccaacaccagcatgccaagtgcgactggaatcacggtaatcactaacagttgtatgatggttttgacaatcggcaaactgaactcagtggcgttgcccatgaaataagtcatactcaatgctgtgatgattggaatgctgaaaggggcaatgagactgaccacggcggtcaaactgattgaaagtgatacatcgcctttcgataaataggtgaacatgttcgaagtcgcgccgccgggtgccaaagcgatgatcattaaccccactgcaatttccggtggcagtttgaatgccaaggcaatgaagaaagccaccaatggcaatagcagcatttgcccaatcagaccaattcccattgctttgggggaggccaatacatttttgaaatcagcaggtcgaagagataagcccattccaaacataatcaagaaaagggccaaaggtagaatcacttgggtcagtaagtcagcagtcattattttaaaatcttaaagtagttaaaaagtgttcgtattttaccgaattttttaatcaaagaactgggtaaagctctcaaccggctctctttcggttcggtattgattgacggggtggttgttgtcttcataaccaatggccatgccgccgaccagaattttatcgtcaggcactttcagtgtttgtcgaacgatgtctgggtattcgcctaatgcgccttgtggacaggtggcgagtccttgttcagaagcgagcaacataatgttttgcaaaaacatgccatagtccagataagagccggtttcaagcacattatccatccagaaaaagagagccactggcgcatcaaatgctcggtaattggcagcccattgttttttctgtttatctttatcttccctggcgatgttcagcgcgccatagagctgcttcccggtctcgactcggcgttgtttataaggcggcacccaagttttcgggtagtattggtactgcatctctccgcgctgaccagcattaaattgtgccagcattttagcttccaacatctgcttggtctgaccggataccacggaaacctgccaaggttgcgtgttgacaccggaaggtgcgcggcgagctaactccaaaatttgataaatttgtttttcatcgacggccttgtctagaaaggcacgggcagaatgtcgagctttaatggcttcagatactgtttgtgtcataattttctcgcataaaggggcccaattttatttaaaataaggccttaactcagatcagaggtcatcattttgagtgattatcaacgctttatcaagcaattaaagctagaaaacaagtccgagcatacgatatcaaactatcagcgggatttgatgggtttactggtgttttatttaggggaattccttgaacgtccattagacgaaaaagctcttaaaagtgaccaggcctgggcgtttttagatcaatttgatgattggcaagcgattcagctgccggtgttgcaagcctttattgcgtctcgtatgcaacagggcattgccgcccgtagcattgctcgacaattatcggctattcgagccttctacgcttttttgattgagcaaggtagagccttacacaacccggcaaaaggactgaaagcgcctaaacaacccaaagcgctgcctaaaagtttggatgtggatttgacacgacagctcttggaacaaccattgaaaacctggcaggacgtgcgtgaccaagccatttttgaaattttgtattccggtggtttgcgagtctccgaactggtggagttggacttgtctcctggattggatggcttggcttcaggttgggttcgggtgctcgggaaagggcagaaagaacgagatgcccctgtcggacaaccggcacaaaaggcactgcatcgttggcttgagattcgatctgactatgccaagccaggagaacaagccgttttcgttaaccgatttgggaagcggctaggggtcaggagtattcaaacacagctggataaaagaaccttgcaagcagggctgcccaccaaaatgtcgcctcatagattgcggcacgcctgtgcaacgcatgtgttagaatctagcggagatttaagggcggtacaagagatgctaggccatgccaatctgtcgaccacacagatttataccaagctggatctgcaacatttagccacggtgtatgacaaagcgcatcccagagcaaagaaaaagccttagaaaatctgagtacacagcaatcaattagcaaatggaaagagataactcatgagcgaacaaacctttcacggaaccacaattttatgcgccaaacgaaatggcgaaatggtcatcggcggcgatggtcaagtcacgttgggacacgttgtgatgaaaggcaatgcccgtaaagtccgccgactttataatggtaaaatccttgcgggctttgccggtgcaactgcggatgcctttacgttgtttgaacgtttcgaaggtaagctgcaaacgcacaatggacaattgatgcgtgccgcagttgaaatggcgaaagactggcgtaccgatcgtgctttacgaaagctggaagccatgatgctggttgctgatgccgacaatatgttattgatttcagggacgggtgatgtcattgaaccggcacatgattttatttcgattggttctggtggcagctatgcgcattcagccgcgcaagccttgatggataatacagacttatcggccaaagacgtggtggaaaaagcgttgaatattgcagctgatttatgtatctacaccaaccataatttaaccattgaaagcttgaataaagaggattaaacgcatggaaaatcaagcaagctctccagcgccggataagcatccagaacaacaaggtttggccgaaaaatactttgagggcgttctgtggaacagccgttttgtggtgttgttcgccgttgttgccagtctgattatggcgtttggcattttttatttgacggcgattgatgtgtactacaccatggcgcatctgatgcattatcacgaattgggcgatgcagaaagagctgcgttgaaatcgcagaccgtcgcccatgtggtcggctcggtcgatgggtttctgttgggcaccattatgctgattttctctttaggcttatatgaattgtttatttctaaaatcgatgcggccactggcaataaaagttccagcaagattttgattatcaactctttggatgacttgaaagacaagctggcaaaagtcattctattgattttaatcgtgatgttcttcgagcaggcattgttcttaaaaccaaccgcaccgcttgagttactgtattactcattagcgattatgttggtagcactcgcattgtatttatcacacaaagcgtatcagcactaaagcacttttctgatctaaaactgaccaggcctggtcagttttaaggcacaaaaaaacccccgctgggagggtttgggtcgcatagaagcgttgcctgcgaaatagatatttcttggtatgaaaagctaaatcttagaccttagtcggttacactatgtagtaaatatactaacagggtacgtgactatgagcaagaaaattttaggcctggacttaggaacgaattcagttggctgggcattgtttgaatcggatgaagatttagcaccccaaaagctaatagacttgggtgttcggatttttcagcgcgcagttgaagataaaacccccacaccaaaaaatcaggcgcgccgcaacgcaagaatggctcgccgtattttgcaacgtcgcgcacgccgcaaacaaagaatgcaaaactttttaatttcccaacagttactgccctcaagtctgtcagaaacaacacaacctgaaataatcttaaccggtactcacggtattcccggtttgggtgacccctatgagcttagagcaaaagcactagactttgaattaaaaccctatgaacttggaagggtgttattgcaccttgtacagcgacgtggttttcaaagtaatcgtaaaactctgttaggggatatggccgatgatccagacgtagtgagtatcctaactgaagaaaaagaagatttatcttctgaagaaaccgcatttaaaaaggatatcgttcagttaagagaggaaataaaaaaatccggcgcaagaacgctgggtgaatatctctataaactccccgccggacaggtaaaacgaaatcgttcaagagaaggtggtaatttaagaacggatagaagcatgtataaggatgagttttggcaaattgtcgatgcgcaaaaagcatttcatcctgtactagaagaaattgatctagccctgtttgaaattattttttttcagcgccccttaaagctaaaaaaagatcgtgtcggtaaatgctcgctcgaaccaactaaacaccgtgcaaaaaaagcctggcaaacctatcaacggtttagatatttacaagatataaatagtttaaaactatttaatagttataccacggaatggcgaccattaaactctgaagatcgtgccaagctaattgagctttttgaaaaagataaaaaacctacgctggcaaaaataaaaaaagccttagggttaagtaaaaatgatcagcttaactttgaaagtggaaataagaattttaagggcaatacgacggctatcgcaattcgagaagcttattctggatgggatgatttagcattgaaacaacagaacaaactcgaagaagacttggtttcatttgtcagtaaaaaagccctaaaaaaacgtctagaaacccattgggggttagatacagaaaccgccattaatctttgtgtaacagaactagaaccagaacattcagacttatccttaaaagcgattaataaccttctaccttaccttgaacaaggtcaaatatattcagatgcaagggtaagtgccggttatggttatgaaatagtcacgaatgagccgcaagacaagcttagtgcaccgcctgaaattcccaacccaatcgtgatgaaagggttacatgaagtaaaacgggttgtgaatgcaattattaagcaatacggtaaacctgacgcgatacggttagaaatggcgcgtgatcttgaaatgaatacaaagcgatataaagcatttgtaagtcagcaaaacaaaaataaatcggacaatcaagaggcgcaagatcaatttgaatccattgcggctgcaaaccgtcatttagggttgtcaaagtatccgtcacatacagataagctgaaataccgtttatggaaagaacagcaaaaactgtgtgcttacagccataaaccaattagtttgactgagctttttacaggtgcggttgaaattgatcatatcttgccttattcgctcacgcttgatgattcctatatgaataaagtagtgtgttttgcgagcgaaaatcagtttaaaggtcagcgtacaccaaaagaagcatttgaaagtaatagcactaaatgggagcaaattgagcagggcattagccgttggtatgctaaaggcttaatgactaagcgtgatgccttttataaaaccagtgaagacttggataaagactttattggtagccagttaacggatacccgctacattagccgagaagccctgcattatttgcaaacattaggcgttgaagttacaacgataaaagggcaagtcacctcttggttgcgtcatatatggggcatgaacagcctgttagatgacgctaaaaatgaaaaagaccgtagtgatcatcggcaccatgccattgatgcggcagtggtggcgtgtgcagaccgaaaactttacaacaccattgtgcgcgttgctaaagacttagaaaaacaaccgggtaccttgaatataaaagatattcacatagacccaatgtttgatcagtttcgtcaacaggttgggagtcggttgcaagatattatcattgcgcatgcccctgtcagaaaaattacaggcgcattgcatgaagatacagggttaggttttattgaaggtgtgggaactgtatatcgtaaaaacctagatgaaaccctaaccgctaaaagtgcggaaaatattttagatccggtagtaaaagcattagtaaaagcccatctagaaaagcatggtaataagccaaaggtcgccttttctaaaaataatccggttttccacaaagacggcaaaacaccaattaagcgtgtacgtattttgcagtcaaaaaacacgcttaaagatttagagcattcaaagttaggcatcaaaaatcaaaatggcgaggtgtttaaatggatgacgctaggcaatacccatcatgttgaaatttttcgtcataaagaaaccggaaaatataaagccgaatttattaccgctttagaggcgacccaaagagtggtgcaaaataagcaacccatgattaaagggtatttagatgatcaatatgagttttgttttgctttacataaaaatgatttggtaagagctaaaaatagtgataaatatgaaatatatcgaatacagaagtttgaagcatcaggtgctaagttaagtttgagggggcacaccgcatcaacccttgataaaaaagaacaggaaattcgcaaagcgatacctacgttaatgagggagtatgaaatgcaaaaaattcaagtgaatgccattggggttatggcaaatgatcaaacgtactcttgaaattagtcaccctagttatttaaaaagccatcaggggcaattggtgatcgagcaaaatcaccaaactgttgggcaagtggcgtttgaagatttgggcgttttgattctggcacatccgcaaatcacgctcacgcaatctgtgctggcagcctgtgcacaagttaattgcgcgataatccattgtgaccatcgacacatgccaagcagtttaactttgccattagccgctcacacgttacatagcaaaattattcagcagcaaattcaaataacaccggtgcgacgtaaacaaatttggcagcaaattgtgcgagaaaaaatcgttcaacaagcacaaaccctgcaaaatttaaataaagacagtcaagcattaacgcgcatggtcagcttagtgcagtcgggcgataaaaccaaccttgaggcgcaagcagcacaaaaatattggccgttattgctcggtaaagattttaggcgcgactcagagatggaaggcataaacagcctgctaaattatggttacgcagttatccgagcgaccgttgccagagcacttgtcggtacggggtttcatccagcaatcgggttaaaccatagtaaccaatataacgcttactgtttggccgacgatgtgatggagccatttcgcccctggattgatcaacacgttgtgggtttggagtcggatcaaataaatcagcaaaacaaagcaattttgctcagccaattaaatcaaacagtggtttatcaacaaaaatcacaaccttttttggttgcgctgagtttgtttgtggcgcaattaaaatcagcctattcagacagcgaggtggttttaacgtttccacggagggattagtgatgatatttggggggcaacataccatgtggataattgtcttatttgacttaccaaccgacagtgaaaaagcgcgaaaagattacacgaattttagaaagcacctattagaaaatggctttaccatgatgcaatacagtgtttatatgcgtcattgtgccagtgacgaaaatgcacaaatgcatgttcagcgtgtacgtgcgattctgccacctgacggtgaagtcagaattgtcaaaataaccgataaacagtttggaaaaattgaagtcttttatggaaaaaaacgcattgaaacagaaaaagccccagaacaacttatgtttttctgaggctgtaatagtaaaattaattgtaatatcaattggttataattgggctagtgtaaccgactaaggtctaagcgcaaatcacaacttgtatctattccatcatatggatgctcaagtgtaaccgactaaggtctaagcgcaaatcacaacgttaaaagaagtaagcaatcatgaattaagagtgtaaccgactaaggtctaagcgcaaatcacaacgatacacctgctgggtatattcgtactgatagtgtaaccgactaaggtctaagcgcaaatcacaacttcatcgagcttcattccaatctggatataagtgtaaccgactaaggtctaagcgcaaatcacaaccggtaagctttcgctccgacaagcttcttaaagtgtaaccgactaaggtctaagcgcaaatcacaactactaactcaaaagggtttactgagttaatagtgtaaccgactaaggtctaagcgcaaatcacaactgaagagcttcggattatgactgacacgccagtgtaaccgactaaggtctaagcgcaaatcacaactggttgatggcaatatcaacatggcgcccgagtgtaaccgactaaggtctaagcgcaaatcacaacgatgaactgttaagcccaacacctgatccgagtgtaaccgactaaggtctaagcgcaaatcacaactactgcctccttacgccggaacgtcgtcgtagtgtaaccgactaaggtctaagcgcaaatcacaaccgtggccgcagtcactattcagcgcattttagtgtaaccgactaaggtctaagcgcaaatcacaactcgctgggtgcgttgaactgatgttgtttgagtgtaaccgactaaggtctaagcgcaaatcacaactattaaaaccaaatctaattcattttttttagtgtaaccgactaaggtctaagcgcaaatcacaactaattcattacccagtgttttaagagatctagtgtaaccgactaaggtctaagcgcaaatcacaaccgcgaatcacttgatgatgaacgaggacaaagtgtaaccgactaaggtctaagcgcaaatcacaactattcgttctttatcaattcgagttttctagtgtaaccgactaaggtctaagcgcaaatcacaactacgaaagcgcatgcaataaagaaatcattagtgtaaccgactaaggtctaagcgcaaatcacaactccacttgtgcattaagagacgcaaattgtaagtgtaaccgactaaggtctaagcgcaaatcacaactgaggtcgaacagctaaaaacactatcataagtgtaaccgactaaggtctaagcgcaaatcacaacaagataccgcagtttcattaaccgccggaaagtgtaaccgactaaggtctaagcgcaaatcacaacctttgatcgtatcagcaatcttattgacttagtgtaaccgactaaggtctaagcgcaaatcataacggaaccgaaccgggtaaggattgacgaatcagagcacactttctcgatccaaaactggccaggcctggtcagttttgattacttatctgtttctaaaaccggcctgaccagttcaaaatcggccgaggcataggtgtactcattacctccgagtttgccaactgcgttcaacttttcagattgaatcatcccttcctgaatcaatgtatcgtcgacataaatatgcaacacatccagcaaaatcagttttcctccgccgggttggtctgacagggcgatgacgtcttttaaacgacattcgtagcgaactttggcttgtgccacccctctagcggtgacgctctggctgtcacaggcggcaattttaagtgcttcgaactcacttgttttttgagcatagttggcacaagaggcattcatcatttcggccaggtcggcactgacaatattgatgacacattcatgtgtttctttaaggttacgcaaggtgtctttatccgattccggttgcgcattaatttgtgtcaccgtcagaaccggtggggtgcagctggcgacactgaaaaacgaataaggcgctaagttatcgatgccttgtgaactttgtgtgctgatccaagcgatagggcgtggaataatgccgccaaccagtaaggggtagagctgagaaatattaagattcggagtgtggtaatgcatatcggcctttattgcgatgtttgaagtgttgtttctggaagccagtccgaagtcttgcctgtccaataataaacggtcaagccaatccattctttccatgcgggttcaagagatttaaggtggtcaaaaaaatcaaaatcaatttttcgtagtttgtcactgttaccccggtaatccaccgggtaaggaatgacgtgaatggcttgtttgttggcaatgccaaccgcgcgtggcatgtgaaaggccgaggttaccagcatgtaagtgccttgtcgggctgggagcagtttcttagtatatttaaaattttcatacgtgttgcgagaaagtgattcaataattaagcgtttattggcaatgcccagcgtggttaagagctggcgcgcaagactgccttctccttttgtattttggagttgcattgaaccacttccgccagtaaagatgactggagcttttgggtaatggttagcgagctctttggcaccaatgtaacggtctccgccaattcccagttccgggcgtccccagctcaggctgcgtttaaggtcttctccgccacccaatacaataatgccatctatgtctttgggcagtgtttctggtgatttaaaccgttgttccagcggctggattaacagatcccctattgggaaagcgagcacaatgaaccccgctaaactggctggcaacaacaatgtttttgcggtttcggttctattaaaaagcaaaaaaatcgatcctaaaatcagtaggattaaaataatgttactggggctcaaaaaagcccaagcaattttcgacactataaaaaataatgaatccatataggagaacctaagctgcgttgattaaatcattttatgtgagaaagaccccgtttagaaacgaaagcaacgttgttgcgtattaagccgggtgtttaagtgtattaaaacgtatttagagtttgttattaagtttttttattattgttctatcttagaggataaattgacgagattctatttttttagtaaaaataactagttggtttttaactgttatttaatgttttatttaatttgtgaatgcgattcgcttgaaaaatctttttttatccatatgttctaagtaacgaaatattacttatatgttagtgagttacctagcataactttaaggagttttttaacaatgatggataagtttacctctcagttccaatctgctttaggccaggcgcaatcgatcgcacttgggctaggtaatcaatttattgaacccttgcatattttatctgcattactggcagagcaaacctctttgctacaactggcgaatgtgaatgtcgcacagttaaagcaaagtgtggatgagaaattgcagaccttgccgaaagtttctggcgcgggtggcgacgtgcagctttcacaaagtggtgggcgtgtattgaatttaatggatcagatcgctcagaagaaaggcgatgcatacattgccagcgagctcttttatttggcggcgctacaatcaaatgatcccgttaaagagctcttaaagaaagcgggagcaactgaacaaacaattgaagcagccattgaacaggtcagagggggcgaaagcgtgcaagatcaaaatgcagaagaaaacagacaagcgttggataaatacacattagatttaacggaacgtgctcgaagcgggaagttggatccggtcatcggacgagatgatgaaattcgtcgagcggtgcaagtgttacagcgtcgaaccaaaaataatccggttttaatcggggaacctggggttgggaaaactgctattgttgaagggctggcgcagcgtatcgtgaatggtgaagtgccagaggggttgaaaaacaaacgccttttatcattggatttggccggactgttggccggagcaaaataccgtggtgaatttgaagagcgtttgaaagccttattaaaagatttagaaaaacaagaaggctcggtcatcttgtttatcgatgaaattcacaccatggtaggggccggaaaaaccgaaggttcgatggatgctggaaatatgctgaagccggctttggcgcgtggggagctccactgtattggtgcgacgacgttggatgaatatcgtgaaaacattgaaaaagacgcggctttggaacgtcgtttccaaaaagtgattgtggatgaaccgtctgaagaagacacgattgcgattttacgtggtttgaaagagcgttatgaagtgcatcacggggttgcgatttccgatcctgccatcatcgctgcggcgcatttatcacagcgttatattacggatcgtcagttgccggataaggcgattgatttaattgatgaggcggcttcccgtattcgtatggagattgattccaagccggaagaaatggaccgtttggatcgccgtttgattcagttgaaaatcgagcgtgaagctctgaagaaagaaaaggacgaggcgtcgaaaaaacgtttggatgtgctgcaggaatcgattgatgaaatggaaaaagagtacgccgatttagaagaggtgtggaaaaaagataaagccgcactacaaggcgccaaacaatataaggaagaactggataaagcccgcattgaaatggaagccgctcaccgtgaagggaacttgggcaaaatgtccgaacttcagtatggggtgattccggatttagaggccaagatcaaagcggcggaagaagccgaaggcgaagaagacggtcaaatgcatttgttgcgtaacaaggttacggaagaagaaattgctgaagtagtcgctcgctggactgggattcctatttccagaatgctggaaggcgagcgtgataaattgttacgcatggaagaagcgattggcgcgaaagtgatcggtcaaagtgaagccgtttcggcggtttccgatgcgattcgccgctcgcgtgccggtttgtctgatccgaatcgtccgaatggatctttcttgttcctggggccaaccggggtggggaaaaccgagttgaccaaagccttggcggatttcctgttcgacacgcaagatgccattgtgcgcttggatatgtctgaattcatggaaaaacactcggtggcccgtttgattggtgcgcctccagggtatgtcggttatgaacaaggtggttatttgactgaagccgttcgccgtaaaccttattcggtgattttgttggatgaggtggaaaaagcgcacccggatgtcttcaatatcctgctacaagtgttggatgacgggcgattaacggatggccaagggcgtacggtcgactttaaaaatacggtgatcgtgatgacgtcgaacttggggtcgcaaatcattcaggaaaaaaccggtcaagcctcttatgaggaaatgaagcgtgatgtaatggatgtggtcggtagtcatttccgtccagaattcattaaccgaattgacgatattgtggtgttccacccattggataaagctcagattcgttcgattgcagacattcagttaaatcatttacgtcaacgtctggcggacaatgaattgagcttagaggtgtcggatgccgtattggataaaatcgccgaagctgggtttgacccggtctatggcgcacgtcctttaaaacgctcagtgcaacagatggtggaaaacccactggcacaacgtttgttaaaaggagagtttgttactggagatacggttcatgtcggcttgacggatggagagattgatttccactaacgtcattaatctttaatagtcgttattgattaaccgctctgttgattgcaacagcgcggtttttttgtgtctaatttcagccaggcctggctgttttataggatgaaactttggcttgtaggctctttcgaccagcttttcggtgtgccagcaaagcaaaggggatcagtaggccaagccccacatgtatgagactactgagttgtgataaatccgggtcgccaaagtaatagatgcctaaactgctgacaatgagaaaggcccagacgctcgtaaaaacgacgccgctgagacgattttcatgtcgtcgccaatgagagcgcatatggatggtccagatggcaccgatgaaccacaccattaaccagccggatatggcatgcaatgaggtggttaggtgtcttaagtctccactggaaaaagggaagtccattagccaagcgatattggattccatgcggaaaaataaaaaggcaggcaccaatagaacgccactgatgagcagtatcaccagaatggtgaagaccaaaagaaaaaagaatttagggtaaccgttcataaagcagtcctgttggttaagggggaagaagaaaggtatgtcacattaaagcgctttgccgttgcatgacgatcggattcgggttgtaaggccaagactttcgttaagccgtctgccagccaagcatcttctgctatgacgctgatgacccctggttgtggttgtcgacctgtgctatcaatgatctgaccgggaaaacgtggggtgctatgaaggtgtatctctgaagaggccaatgcctggttgttgaggtgagtaagtggttgaatattggtttcattctggcgttggctgatagggagagtcacgtctccaaaaactttgaggtctccaccggcattcacccagcccgccacaatgttatgttgtttcataacgttaatggcttgatcgacagcataaccttttgcaattccgtccagcgagattaaaacgggtgctgtgagtcgagcctgatgagtttgtatctcaatatccgatgctttgccgctcgattgaaaagagtgtgcaaaatggtttggcaggactcctttatcgaccaggtagcctcccagcgtgcaattgaaaagatgattggaatccaagctcagctgtttggctttgcgcataactgagagtgtttcatctggaagattaacccatttgttaggagaattattcagggttgaaagagcgctgttggggttgtgaaaactcatttggtcatgaatggtttctattttattaaatatatggtttaacacgctttcttcttgatgattgatatatgcccccacctcgacaaaggttccgagtaacggtttcattcttttcacaagttttgacgtcatggtttaagtgccacttcatacaatgcgagtaagcgtttaaccccatttgtgacatttcggcaagagagtgtggctccactgatattgggaatgtcttccgccaactctaaagggctgtttttattcgtgccaacaaaatgatttcgccaatcagtctgacggacttctccaccataggtttcacgataatccataatttcaatgcctaatacctctcctttaggggagattgctgtcgcataggttataaactcgtgttttccgatgaccttgtcaataatgacccatccgagaaacgccttgtcaggactgaaagcttgccaggctttttgtgttttccaacgttggcggacatcacagatggcttcgattttgtctctctgactttcgttcagtttgatcagagtaggggtgaacgaggcgtgttgtccaaataaagcgacttgaacctgttcttcatttaaatattgcactgcataggctattggacttgagcagagaacaggaagcccgagtatggggataatctgtttcattgacgaattccttgaatgatttaaggcgttattaaagcgccatgaatatcttagaagttgtagccgagtttcagcttggtttcatatttggtcttttcaatcaagtgcagtccactttcttgaccgctatagcgttctcctccgcctgagacttgaggtaaatatgttagagtcgcccaaaaatgtttatgaccatagtgaatggaagggcctgcgaagatagaccatctttcctgtcccacttctgtttcaaattcagtttcatataaggcttccgcgccgaccgaccagtttgatgcaaagcgataagacagcccggtttttgcggccagttcaatttccatttcaggttgtgttggccaagtttcttcattattgatgccgtcaatcttagctcgcttggcataagtcgattcaagattggtgttacccaaccaaaccagttgtccatccatgaagtatttttgaagttgcagacctaaatcgacggatagggtgtctttcttttgtccggaatgtttgtctacggtgtcgaaatccaagccaacggttgttgatagtccaatgtcattgagagcaggcgttaaaaacgcatactttagttcggtttcaattccagaaaatgtaaaaccggtgtttttttcctgcggtagatagccaccaataattaatccttttgtttcaatttgatgaccggtgatggcgattgcgccggaaaaacgatgggtgaatccgtgttcaatttctgttttgctgtcgagcgcttggtaggttccttggcctttatcgtgacgctgtgtaaaaatttgataaaactctgaagcgcctttaggtaagggttccgccccttttgtgtagccaagaagctgttcgccggaatgggctgtcatgctccaaagtagcatgctgagtagggctgctgaaagatgccattgttttttcatattggttatccatgtagttaatgattatgagaatc

SEQ ID NO: 664 - DNA, 23105 bp, synthetic construct
  source 1..23105: mol_type = other DNA
  misc_feature 1..23105: note = Synthetic
gttgagaaatgttttttgatgatgttcgcgctttaactcgttatatctgctttgaaagttggcagcttatgcttgagggcttggaaatccccatccctgagtcagtttgatgtatggcggcggtcataatgagaattgctgcctgtacgatgcgcccacgcaaaggcgattactgccacaacaagcaagcgtttaaggcgaataagctgagtgattcgcgtgtcttccagattgaagtcgcgctcttttaaacagctaaacaaggttttaatctcccagcgttttgcgtaggcttccagcggttgttcgataagttcgctggaggcgataatgagcaacgtgccatcttttaaacgtagcgaggataaataaacggttacgttcgttacggttcgcgcgtcccgaataatcagttgttcaaacgcgcctgcgggcttgccttacttggaaaggcgttggcaattcgcgttaagttgatgcttctcgctttgattaacccaatctgcattacacaaaaacagtctatttttgccttgttccacttgaaatactggtttaatatgattgacagctcgttgatttcccgctaagaaaatacaagtgtattctacatttcaatgagttattttttttgtcatgtacagaggaggatgacactttaaagtgtcttatgtggaggctgcggccggagtcgaaccggcctggatggctttgcaggccactgcataaccgatttgctacgcagccttaaatatgaaataaaaaagccgcgaatcatcgcggcttttttgtaattctttggagcgggaaacgagattcgaactcgcgaccccaaccttggcaaggttgtgctctaccactgagctattcccgcaattcaatttattcgcacattgtaccttattttcttatatcgtcaagttttattttattactgcacgtcaattgctaaagcccaaccatccttacctttgcactcaccgtcttccatttgtactttaacaaacgcattttttgttccataagcatcttgaagctctaaaactgatacaggcgttccctgagggatgtgttgacacgctgcatttctatctgcttcttcggtatcatcatacgctgctaaagcacctggaacaccaactaatcgaacagtggcggcaggatcatagctgttggcactctttagcacatacttctgccctaccgctaagtttttaatcactggacctgaaacaagtttagcttcattacccccactcatcattagaaccaacagtaaaataaccaagccaccgatagctccaaaaaatacttttggattgttttcttttaagctcaatagaagggaaataatgttgcccgctttatcgcttggcgaatttacaacttgctcggtctctgccgtttgttcagtgtccacaacttgttcaatgctttcttcgttactcattgcttttcctcaccctagtgtatttttattatataaatcaaaaacctttctaacttattagaaaggttgctaagttaacctgaaaaaattaaatctgtcatcttttttatttttccactttacataacatcatgacatctactcaaaaggtcagcttatctatcattgagttgtgcctagatgaagtcataaccttttttattggctgctgacatctgttttttcttttcttttattttaacgcattcaaactgccagtaacctaagccaacgttttttctatttttcaaggtgacagaaaaactatcttgattcgtatgtattcgcagtgaatcttcatctttcaacataaaagtgtcagtaataatatagtcttcatgcttatctgtgctgtagaacaagccttttttaaactcatcctttgttacagcagtgccattcttctgtacttcattcactgcgaacccagcactatcaagctgattataatcgacagaaataaactctggtgtgagtaatttcataccaaaaattatttttccactttgttttgcgacaatgactttatcaattacacctaataaacgcacggattctggcatatcagtttttctaaaactaactaaactaccgacagataacacgcctgtttgtgtaaatacgcaagatagcaatttatccgattctgattgaacaagaaactccagctcttttttatcgctagtatttaatacatcttgtaaatccaatgttgatgccaatcctatcgcgatataacgatctagtcgatcactaaaaagcggttcgacttcaaaactaacacctgcccagcgttgctcaagataatccagtaactctgctggcggttttttacgtctctgcacagcactaaatcttgcctcagtaacatcaattaacttttctttatgctcaaagattttttgtaatttactaaaatcaatatacattactgacgaatcttttctagtcgttatatctgactgctgataaagcggtggcttatcttcgtcagtaaagacaaggcattgcaacgaatgccccaatacaggggcagatttcaaactgactaaagaatcaatagtctctataaatttatcaaccagtaaaatttccttttgcattaatccagtgggatcaacaagactaagtaaaagaatttgtagataacaatcttctgggctactagctttattagcctgattttcatcattggcgactttgatggtatttttttctattttcacactcaacttataaagtgaatgtaaatctagccaaacccaatcaggtattggcagtcccataataaaatgactaattacgatactacttagccctttaatacagcgttgaagtgctaatacggtattcttgccctgaaaccagccgactgttctccccgttaaatcctttagcaccatccaataaccgatggagaattccttttcaattgaaaccaatacgcccagaattttctggtcgttgtcttctttcggaaatcctgttctcatgagcctagagcgaagatagtcttcgagaataagtacactaggtcttaatagctctaacgcatttagccgcagctggctaggcatttcaatggtgttaaattcgataataaaatcgtgcattaaccgcgtagccaagcctacattagcagtaggtagttcagcaatccagctcgtcaacgcactttcttcaaattctcttagacgtagaggatttttttgttgctttggaataactagaaaataagagttcttcaaatcagcaccgaatttattttgattcttttgttatgtgaaagcctgccaccatcagattgataactatccagcttgagttttaacatatattgattaactgatgttacgcaggcgttcagaagaatcaatggctgtagcgaattcagaaaattgtaactcattgattttaaaaaatgggtgcgtaaacatcgctgattaaatattagctagacaaaaaataattttcttactattgatcgtttcattccccaccctttttcttcatcatcataccttttgatggattatagccaatgattgccgccgtcataaagactataaaagcaatcaatgtataaatacaggcgtgtagattaaattgtccgtataacgcaaagcgcgtcaattcaacagcttgtgaaaatgggttgtattgtgccagattataaagcaaagcactggattctttaattttccataatggataaagtgcggttgacataaaaaacatcgggaaaataacaaaattcattacccctgcaaaattttccaactgtttgataaatgaggataataacaaccctaacgcgcccaacatcaaaccagataacaataaagcgggtaacacagtgccgtaacccattagcggtatattaatatcataggctctagcaatcgctaaaaatacatagacttgcaacaccgaaaccgccgtacctgccaataatttgctcagtaataaaaaccaacgtggcaacggacataccaacaaggtgcgcatactgcccatttctctatcgtaaaccattgataatgaactttgcatcccattaaacaattgaatcatgccacacaaaccaggtgtgatatacacttcatagagaatatacgtttcataaggtggactaatcgctaagcctaatgcagctctaaaacctgccgcaaacacgaacaaccacaccaacggtctcactaaggcagaaataaaacgttcacgttgcgtgacaaatcgccacaattcccgtccaacgatacctgacatagcacgccaataatgtaaaaaactcatgcggcttgtccttgcgttaaacgagaaaacgcttcattaatagtggcaacatcagtttgtttcaacacctcatcgactgtaccattggctttgatttgccctttatgcagcacgattaaatggtcgttagcatgaatttcatccattaaatgacttgcccacaatacagctatcttttcttcagcggctaggcgatgcacataatccacaatatttttccgactgggtacatccaagcccacagtgggttcatccagcaataataacgacggtttatgcagcaacgctctggcaatttccacgcgtcgtttatgtccaccattgagttgacggactttttcaaaacggcggtcaaacatatttaaacgctccagctcttgctgaatgcgttcagtcgccagtttgcgactcataccgtgtagcgcggtgtggtaacgtaaattttgatcgacggttaaatccatatccaaggtagtttgttgaaacaccacgcccaatctagctaacgcaaggcggctttgctgtttaatatcaaaaccgcagagttcaatacgtccttgacgcgtgtcatataaatgggtaattaaagaaaacagcgtacttttacccgcgccattcgggcctaataaaatcgtacattcacctgattgaattttaaaattaatatcatccagtgctttgtgattgccgtaagaaaaactcaagccttcgatggctaacgcgctaggttcgctcatggttttaccgcaacgccccacggataagaccccacgcccaccgacttagtcaccgtttgcgactctaaatcaatgatagacatatcgttactcgtgccattggtggtgtataaacgtttttggtcgggtgaaaatgccaaattccatacccgttgcccgactaataaagttttttcaagttgataagtttgcgcgttaatcactgccacgcgattagcgggacctaaagcaacgtaagcgcgttttctttccttatctatcactacaccgacaggttgaattttatcgaaagtcacgccgtcaacttccaatttaatggttttaataggctgcttggttttagcatccaacaccatcacagtgcctgacatttccgaagtcacccatagttgttgactatcagcagtaaaattaaccgctcgtggacgcggatcaacgagggtattttcgacaatcgcattagtcttagtatctatccaatgcaccatattagtggtttcagacgcgctgatgagccactgattatcagggctgacggtaataccttctggttcaacgccgactttaatttcgtgtatcgcttttttactggcgacatcaatcaccgtgactaggctgtcatcttcattagaaacatacaatttttcgccattgggactgagtgcgaaagtttcggggtctttacctgagggtagttttgccagttcttttaaggtttccgcatccaacattctaatcgtattgtcatcactggtggcgacaaacaagaatttattatcgctactcaacgcaagcccgcgtggacgctgccctattggtacggtttttagtaacttaccttctatgggatcaacaatcgctaaggcgttgtctttttctaaactcacaaaaacggtttctgcttgaatagtggcggagatagataacaacgccaaggctaataatttatttctcattattttatttttcatttgagtaatcagttagacatcatctactggagagtgaaaatcatagtgaatttttttaactgtttttccgttgaatatccaatacggtgatggttgtaatgggtagttatcgggtaacttcaaaagctttttagttacagatgccagtgaacaaatgacaccgttgaactccacttttttttcagcgacaacttttatttttgtttgtccatctttaaaagtaagctctgaaccattgggtataccaatatcataaaaattcatgtttggaagttttttctttttgaaattttgtgcagattgcttgtcaatagcttctatatcttcttcaagctgtttttcaaattgagttgtaatgtcatcaactttgagcaattttaaaagcgcaataactcgttctgcttcgattttgaaaaattctctgtttgggtttactcgattgtttccaaatgcaaaatggagagctttttctgcttcgtttgcatctttaacctgacaggcaaatgcacaatcaaatggaaatggaacacctgttccataaagctgtttcatgcgcataccaacctcttgctgagttgtttttccgatttttattaattctggcattgcaggattagtaagaatataaataatctgtgagctattatctgtcatgatttaatgtctttagttaatgtttttataattcatggcgttacattcattcgacaagtagtttcaggttcatcgacacccagcgtgtccaattcagttttaggatgtaaaaagccttcaatcggcgcgacagcgactaatgaacgcggcgcggcaagcaatacaggttggcgcatttgcccatcccacggtctgaacgataacggattgcctttatagccttgcaacgcaaacgcagggctgagtatatagtctttaattgcggttaattcattagatttagtacgcgttgccgcctcgcctatcgctctgaccgccaaatacgccgcataatcctgttcttccatccaccgtcccgcttgttctttaaagcggttttgaatttgcgtcgccccccattgttcgtgagttctgtgccacgcagtcgcgatcaaaccttgtgtgcctatcacggggcgcgggctttcagtacgataatctaaatattcaccaaataacccttgttcgtcgctaaccactaatacatcatactcatcgacgcggctaaataccgcgacatcggattgtgcggtgcgccgcgcatcgtaagtgtgttcccagattttttctgccacgatagtgctaccaaaacgcttggctgcgcgttttatcgcatcggcaaataacttatcttcaggcgcagtgccaacgactaaaaaccacttcgtccagcgttttttcatcatgtattgcgccagcgcgtccgctcgcatggcacgactgggtaataaatgcagcacattaaagcggcattgttcagcgcgtaaactatcatcactggtcgcggcatcaaaccataatatggctttacctcccgcactgtttgccagtttatttaacgattcagcgggtaatagactcactacgagctgaaatttacctgcaatgtcgttattaaaaatcgcttcgacatcaccatcgacaggcacgataaatttgctcaacacaaaagactgccccgtaaactgccctgtggtggtgttatcgctaatcgctaattctgaacctaacagccctttgttttgaataaacgggtctaaattggatagcgcggctggcacggtttgctcttggcttagataagcaatattgatgatttgttttgctggggctactggcttaacggctggtggtttttcgggcgcggtagctttgggtttcggcttagcgtcagcaacagtccagccttgcaacagcactaatacaataatgaataggttaattgggtgcattatgtcttaacaagaaaacaggttttttgattgattggttaattctaacggattcaaacattttttttcttaactttcgttaagctatcgcctttgtattaccaataatctaggcgcagacgggcttggaatcgcgctcaaaaatcgatttacgctaaattgtttatcaagttgttcagcccattgctcaacacggtcggtttcttcatcacctcctgcatgaccagaatacgccaaaattgtgatgagtccttgtggtgctaataaggaacaggcggcggttaatgccaacaaggttgagctggtttgcgtaataatcgctttgtcgcctttcggtaagtaacctaaattaaacatacacgccttgatgttaccatgatgttgtgagggaatatgtaccgccatatccgcatgactggcttgaatgagtgtcacgcaatccactaactggttgtgttgtaatttttcagtcgttgccataatcgccacttgttgaatatcaaagccatacaccctaccctgtggactgacttgttcagccaaaaatacagtatcgtgaccattaccaaccgttgcatcaatcgctacgtcacctgaacgtagagtgtgttgaatgtgctgatgagcgagtttaagcagtgaaatagtggtcataatgacgttgaatgttactcagtgaatttaatgcgccattatccattaaaacgttagcaaaatgctgactataccaaggtatttgtaaactaccttttgcgccaaaaccgttaaagatagccaattgcgggtgttgtggatgaaagccaataaacggttgtttatccaaagtacaagggcgcacattggcttgatggtcttgcacctcacaatcaaaatgcggcaacacagtttttagtccgttcaataaagactgtttacccagctcagtggcttggttgtttagattttgccagtcaaaggttgcaccgatacgcacttgatgagcatttaagggaatcaaccactgcccgtaattcaatatagtgtcgggcagatgattactatgtgccaaggttaaaatttcgcctttcacagcctgaaaaggtagatacgcaaaataaggattttggcttgcgtaataaccttcacaaaaaataatgcgtttgggaaaaataccctgccaacacaaagtaggctgcaattgaatgtcagccgaatcaaacgccacttgttgataacacgaattagcgataaaaaaatcttttagacacgctaacaatgggcgagttaataaatatcctgtttgccgctgggttacatagccaaaaggagtattaaaccgctcaatagacgcatcaatattacctaaataaggctgataatctggattattcaagcgtttttcgcagtggctctgttcttttgcactgttaaaaatccgcaacatcggtttttcaatataaaaatcttgctgaaaaaactcggctaattgtccgtaaaaatgtttagcgataggcaacaaagtatcaacctctgatgatttcaccaaacgcattcctgtgattggattaatcagcccagcggcaacttgtgaggcattttccaagccattatcaacaatgacaaccttacaaccacgttgcatcaactcccacgccagcagactgcctgctaaaccttgcccgataattaaaaaatcaatagtcatacgcagtactcaaccctcaaacttgaactaacgcctcttatgcagaggcggttgactaaaacaaaaactgttcactaaaattgggtatagtcgttttcaaacacagcaccattgccaacgaaatgtttgcaagataacgctgtcgtctgtgtcttgcgcggaagaggcattcgcttctcaccgcactttatataatacccagcaaaaaatagctaaagcgtttgaattaattcctgacacaaatcaataggtaaaaaaaagcccccgtcagttttgcaacatcgtgaaggcttgggtcgcttgaaagcgttgcctacggaaaatcattccattggtatgataagcgagtaggctatagttggttacactatgactatagactaaccacaaggacaccaatgggcaagataattttaggattagatttaggcagtaattcaattggctgggcattgctggaagaacatgagggcaagcccgataaaatcatcaaattaggcagtcgtatttttaccaaagccgtcgaagaaaaaacacccacaccgaaaaatgtaaaacgccgcaatgcccgattaacaagacgaattacccagcggcgagccagacgtaaattgcgaatgctcaattatctcgtcaagctcaacttgttaccgccagaactcaccaacaattccacccctgaaattatcctcaacgatttaggcaatccttacgccttacgcgccaacgctttagactacgcgctaacgccgtttgagttagggcgcgtttttctgcatcttgttcaacggcggggatttttaagtaatcgcaaaactttgttgggtgatatggcggatgatcccgatgtattggatattttagcggaactcgaagctgaagaagacaccagcaccgaacaagcaaaagaagaaaccgcttttaaagccgatattagccagttaaaagccactattgctaaatcaggttgtcgcacactgggcgaatacctcgcttcattcgatgttcacgattgccaacgtaaccgtatcagagacggtggacatttgcgtactgatagagaaatgtaccgcgatgaattgaataaaatctggcaacaacaaaaacgccaccatgctattttgaccgatgaagtcaaagaacaattggaagagattattttcaaacaacgtccgttaaaactgaatagtgatcgcgtggggcaatgttcactagagccaaaaaacaaacgcgccaaaatagccagactggaatgccaacgctttcgccatttgcaagacatcaacaacctgaattattttgaccccaacacgaatcaaaccgttttactcaatgcgtctgacagagaaaaattaatccccctgtttgagaatcatgccagtatcagttttgcgagtatcaaagacgctttaggactcaaaaaaattaaaggcatagaattcaatctggagcgcggcgataaaaaactcaaaggcaacagcaccgcctgcaaaatacgcaaacagctacccgactgggacggttacgacgaaaccaaacaactggcgatagtggaagacctgctcaccattactaaaaaatcggtattaaaaaaccgcttgatgaaatattgggggttcacgctacatactgccgtacaactgtgtttattggagtttgaagcgggacatagcaatctgtcactaaaagccatcaacaagctattgccttatttgaaagaagggcggctgtacagcaagaagcaagacaatgagttactaggcgcgttacaaatggcttatccaaattgtccacaaaaagaaattgttattgacaaactcggcacaccgccagaaaccgccaaccccatcgtcaacaaagccctgcatgaattacggcgtgtcattaatgctattattgctgaacacggcaaacccgatgcgattcgtatcgaaatggcgcgtgatttagaaatgaacactcaacgctatcaagactttcttaaacaacaaaagcgcaacaccaaagctaacgacgacgcagaaaaagcctatcaaaccgaagcgcgaaaaagctcactggcatcatcgcaaaaagccagcaaagccgacaaactcaaataccgcttatggcaagaacagaaacaaacttgtatttatagcggcaaaaccatcgacctcgcgcaactgttcagcgcacaactggaaatcgaccatattctgccttatagccaatcgttggatgattcctatatgaacaaagtcgtctgttatgccagtgaaaaccattacaaaggacagcgcacaccgattgatgcctttagtgggcatactgacaaatggcaacaaatccgtcaccgcatgaaatccctgcacaaagccaaacaagcgcgtttttccatgacggcggttgatttacaaaaacgggattttatcagtacccaactcaatgacacccgccacatcagccgcttagcacaaacttatttagcagaattgggcgcggatatatcggtgagcaaaggcatcaccaccgcgtggcttaggcatcaatggggactaaataatctgattggtgaaaccgacaacaaagaccgcaccgaccaccgccaccatgcgattgatgctgtggtcattgcttgtgttgataggcggatgtatcaaaccttggtttatatcgctaacgacttggagcgtagacattcagaattgaccatgcgagacgtgcatcttgatccgccttggcatcatttacgcgaagatttagaacttgcactcgatagcgtgattattgcccacacgccacaacgtaaattatcgggcgaattacacgaagtcacaggcgcgggttttattcacggcgtgggtaatgtgcatcgaaaaaccctgaatgccagtttcactcaagtggacaaaatcattgatgacgcagttaaagagcaagtgcaacaacacctcgcccgttatgacaataatgaaaaaaccgcctttgctgaacccgtattccacaaagacggcaaaaccccaataaagcgggtgcgtattttgcaatccaaaaccacgctagacaaactggcaaaaaccaaatttggtgcgcgagataaacagggcaaagtattcaaatggttagcgtttggcaatctgcatcatgttgaaattattcggcataaggaaactagcgcgtattcagggcagtttgtcaccatgatggaagcctcacaccgtgccaaagggataaaaatgccacaacaagccattatcaaaactgaccacggcgcggattatggttttatcatggctctgcatatcaatgacttggtgagtgtggaaaaagacgggcagcgtgtgtattaccgtgtgcagaaattagattctggaatcaatagggtaatgtttcgcctacatactgccgctaaattggatgataaaactcaagagttacatctgagtatcaacgaaaaaatatttaccatttggcaattacaaaaacacactatcaatgcaataggtaagctcacggagtaaaaacagctcgattatcgttccaacgctccgcgttggaatgctcaagaggacgctccagcatcctcgcttaacaatgaagacgctagagcgtcaacggctgcattccaacgcagagcgttggaacgatgataacttaacagacacaatccatcatgataaaacgcatcatagacatcagcgaagccacttatttacacgtccagcatcaacaacttttgctggatagaaacggcacaaccattgcccaactgccgatagaagatttaggcgtggtgatattgcaacatcccgccattgtcattacgcaagccgttatcattgcttgtcaaaaaaataacgtggtactggtgttctgtgatgagcgacacttgccttattcggtgttactgcccattagtgacggcaacacgctacacaataaaatcctgcaccaacaaatgaacgttagcctagcgactaaaaaacgcttatggcaacaagtggttaaacaaaaaatcactcaacaaatgcacactctcaaaaagctggacaaaccctacaaacccttagaacgactggcagacgctgttaaaacaggtgatccagacaatttagaagcccaagccgcgcaacattattggcggttattgtttggtgatgactttaggcgtgatgtggaattagacggtatcaacagcttattaaattatggttatgcgattatgcgggcaatggtggcgcgggcgattgtgggtagtggcttacaccctgcaattggtttacaccatcacaatcaatatgacgggctgtgtttagcggatgacttgatagaaccgtttagaccgtgggtcgattatcgcgtttatcaactgacacgaaataacccacaactgcaagtcaacaaagaggctaagatagtattactgagtttattatcggacactgtcatgtatgaacaacaaactatgccgttaatggttgcttgtcattatttaatggcaacgctaaaacgcgcctatcaagaccgcagtattgtgttgaactacccaacaagtcagccatgagctttggaggcttaaccactatgtggatcatcgtcatgtttgatttaccgactgatacgcacgaagccagaaaagattacaccacgtttagaaagcatctactggatgatggttttacaatgatgcaatactccgtgtatatgcgtcatacacccagtgatgaaaatgcggaagttcatgtgcaacgcatcaaagccgtattaccgcccgatggtgaagtgcgaattatcaaaataactgacaaacaatttggtcgaatgcaggttttttattgaaattttcgtactgagactgagaaagcacccgatcaactgtcacttttttgaacaaaaaagtgacaatttttcagtaaaaacaagcgattatgagagggctagtgtaaccaactatagcctacccgcaaaccacaacaaataatcgagaaagaattatgagcgtacaagtgtaaccaactatagcctacccgcaaaccacaacttgaattacagcggcaactggattacgtttagtgtaaccaactatagcctacccgcaaaccacaacaatgaacctgtcatgccctttcaagctggtagtgtaaccaactatagcctacccgcaaaccacaactgcgcttgcgtcaatcgcgtcaatctgtcttagtgtaaccaactatagcctacccgcaaaccacaactgttctgctacgctcacccccgactgattgagtgtaaccaactatagcctacccgcaaaccacaactcttgtctaaacgtccctgctaacaccataagtgtaaccaactatagcctacccgcaaaccacaacaagctattgagaaagaattatgagtgtacagtgtaaccaactatagcctacccgcaaaccacaacaaccgccatagcttgtacatcataacggttagtgtaaccaactatagcctacccgcaaaccacaactacgacctaatacaaaaaaccgaagggtttagtgtaaccaactatagcctacccgcaaaccacaacctaggcatgagtgagccttactttaataagagtgtaaccaactatagcctacccgcaaaccacaaccttagaccacatcaacgcgaagcgataagagtgtaaccaactatagcctaccagcaaaccacaactgataaaaagtgccaaacttggcactttttagtctaaccaactatacccattcaacttgaagacactgtgttgagattttcaaaattatcgttaattcaaggcttatgggaactcatagatacaattttttgaaaggcattggatatatatactacccgcaaaacacaatatgctctttgaaggcgtataatgcgtataatgcgttatgcttctgataaaggttaaacacaataaatggaaaaaagtagtcaatcatttactctgagcctcataggctttggcgagggtcaacgtgaaaattttttagctattttgtctttagcagaaagacgtttgcaacacacttggtatgttactgaggtgtcggaggctgatttttttcttttggctaccgagaaattagactctgcatcacttgttgctgaaaaaaacttaccacaaaaccgatgtctttttcggacagaacaacgtttatccgagtatgactatgatgtactgtttatcgcgtcagaatcagtccctctattaagttctgtggtcaatgtgctaaattacgcggctaataatggcagtttttctgaggaaatcccttctaatagcgtatccattgctccgcttactgagtcaaataaagcgggtgctttaggtgatgataatcgcttttttgatccctatagagggttctttaaaaacttgcttgaaaataaaacagagaggctggtctattgttttaattcatctgcgaataactataagctgtacgttgatcctgtgagaaaagtttactattgtgcaacgaatttaaaaagcctcgattcctgtttaatcgttgaagaggctattgaaattaatgcggtttcacaggcggaatgggacaattcagtagacgtggcggcgttagtaaccagaccattgagtaatttaatttggtatatagggtttagattgtctcatgggcggttattacttggacattcaaatgaagactgtgtgtatttaacacggtggccagatttgggcgtagcgggctgtggtcaatatgttaaattagcggtgtttatgcgtaacaatgcagtgtctttaacgacaatagccgataaaaccagtatgccactgagtaatgtttataatttctataatgcctgctatttgattgatattgttgaaaaagcagaaacagcagagttatatacaaaaagtcttgacgaggataaacgtattttgttgaaaaaaatcactgcacgtttaaacgatattaacaacggtaagaaggctacttaggtggatgataatcaaaaaattaaagttgtttttacaggttctgttggtgcgggaaaaaccacagctattgcgacgattagcgagattgatccgattagcacagaagcaaaaccatctgaagccagtgtgttgaatcgaaaaagttcgaccactgtggctatggattatggtgagctaacattggaagatggctctaaactttgcctttatggtacaccaggtcaacgccgctttgattttatgagccatattttaacaaaaggtgcattaggattattggttctgattgataatagccatcaaacgcctttagacgagttggattattacttgaatctcaatgccgaatttcttctcaccagtccagcagttattggtatcacacattatgacgaatcaattaaaaccagtattgatgattattatgatgttttaaatgaacgcggcgttttttggcccattattcatgccgatgcgcgtaaatctgaagatgtaaccttgttattacatactttattagctacgttagaatacggttagccttctctgtcttgattcagttgggcaaccaagagagggctgtacggatgcgcaatttgctatttatgatcgtgaacaacagaaggttacttttctagccttaccttacgataacgcgcctgttatacagaaatgcaacgttatgattttcgagaagttttatggaagcggttattaacggggaaatgatggagcaaatagagacgcgaagatcgcgtctctacgataagattaaggtgttaaaccttgtcctacaacaattactttcaacgcattggtgccgccttcaacgccattcaaatcacctttagtgataatgaatttatcgccgtctttagctgcattccattttctgagttctttaacgatattgcgattaacttcagcgtggtcttgattttcgcccaatttgaagtatattggaaatacgccacgaaacaaagtgactttacccaaggttttttcttgctggctaaacgcatagataggaataccagagctaatgcgtgacatccatagcggtgttgaaccagattcagtcaaggcaacgatgcctttaactttagtatgattcgccatgtacatagctgacatcgcaatcgcttcatcatcacggttaaactgaatactgatacggtggtctgacacacgcacagcggattgtttttcagcctcaatacagatgcggttcatcgcttcaacggctttaatcggatatttacccgatgccgtttcggctgacaacataatcgcgtcggtaccatcataaaccgcattggctacgtcaaacacttcagctcgcgttggaatgggattatcaatcatcgattccatcatttgcgtggcagtgatagcaatacgattgagttcgcgggtgcgtttaatcaatagtttttgcactgcgggtaaattggcatcaccaatttccacgcctaaatcaccacgcgctaccattactgcatcggaagccagaatgatttcatccatcacttcaggcacaatggcttcagcacgttcgactttcgcgacaatacccgcataacaaccgacttcttgtaataaacgacgggcttcatctaaatctgcaccacaacgtggaaaagaaatagcgacataatcacaacccataacagcgatggttttaatgtcttctttatctttttcagttaacgccgctgccgataaaccgccgcctaacaaattaatacctttgttattagacaatgcgccagcaacgacaacggtgcaattgacacgcatattttcaacattaaccacatctaacacgatgcgaccatcatcaagcaataaacgactgccttttaccacttctaacgccagtggttcataagtgatacccacttgcgtgttatcacccatcaacggatcaaaattaatatcaagtgcgaaatcctgaccttcttctaaaatcactttcgtgtctttaaagcgagcaatacggattttagggccttgtaaatctgccaaaatacccacgcgtctacccgtttttttactcatttcacggatagcgttagctctgtcaatatggtcttgtgctgaaccgtgcgagaaattcattctcactacgtccacacctgccgcaaataaaccctcaagcacaccttctttatcggtagcagggcctagcgtggctaaaattttagttcttcttaacattattattccgcgttcattaaagcgacagtggtatctaacatacggttagagaaaccccattcgttatcataccaagacagaacttttacaaagttgccgccagtgactttggttaaagaggcttcataaattgaagaatgtgggttgtggttaaagtccatagacactaatggctcatcattaatcgccaaaatgccttttaatgaacctgctgccgccgctcttaaaacgctatcaatttcttctacagtggtgttgcgtgacgcttggaaacacaagtcaaccacagacacgttgatagttggaacgcgcattgcaaaaccgtctaatttgcctttcatttctggcaataccaaacctaccgccgctgccgcgccagttttagttggaatcatcgattgtgttgcagaacgcgcacgcagtaaatcactgtgataaacgtcagttaacacttgatcgttagtgtaagaatgaatagtcgtcattaagccatgttcaacaccgatagtgtcgattaacggtttaattaacggagctaaacagttagtggtgcaagaagcgttagaaataacggtatcagtggcttttaacgttttatggttaacaccataaacaatcgttgcatccacatcactaccacctggagcagaaataatgacttttttcgcgccagctgcgatatgtgcagaggctttttctttgctagcgaagaaaccagtacattcatgaacgacatcaacacctaattcagcccaaggtaattttgaagggtctctttctgcaagaacgcgaattctgtcgccgttaattacgatatagtcgccgtcaacgctgacatcaaagccgaatttgccatgaactgtgtcatatttagttaaatgtgcattggtttttgaatcgcctaaatcgttaattgccacgatttgaatttcgttagtgcgacctgattcatacagtgcgcgcatgatattacgtccaatacgaccataaccattgattgcaacttttattgccatttgagtttctccagagtgatgagctatctattaatattaaaatgtgccttcgcacgtcgaaaacgctctaactataccaaaatagtcactacttagtctatgtgctgatgtcaaattggcttatagggacaggtgctagcaaatttatttcaatatgaaaggttaaaacctccgacaagagcttccccttgagttcactggcggatttttcctttaagcgaacattccctaatatccgctttgcctatcgcctttgtatgtaatgcactggcgactagcacgctgttaataccaagggttttaagctgttgcacgtcgttaatattgcgcacaccgcctgctgcgataaagtctatctgtggataggtttgttgataataacgtaacttttcactatcaacccctgagtcactgccgactcgcgccagtgtcatgataatgacttgctcagaccataggtgactgttatcaaataagcgcgattcgcctaacggttgattgtctgaggaaaaatctaacgacagcagcgcgttgtgagttgctgccagttgttcagcggtacagcattcgctacctaagactgggcgataattactgactcctgtaaatgccaaatcaggcgattgatagcctgcatccagccaaaaagtaatcagtggataacgctgtagcacggtttgaattaacgcttgattatcaccctgctgtataaccgcattcaaatcagctatataaataattttaaaatcagcaagttgcaaaaatgcgtcgatgacatcatacacgttcgcgctagggcataagggggaattaatcggcaaataatgttcacgttgaccgcgttgggcatgaaccactacgccatcttttaaatcaagcacaggaattaagcgcacgaccgcttattccttatcgccagcgattagcaatgccgcttgatacaacgatttctttctcgcgcccgtaatttctactgccaatgctaccgctgttttaatagagcattcagtcaataatattcgcaatattttttcctgttcatcggtcagtagttggtcgcttttatcaaccgcttccgcgccatcgacaatcaccacaaattcacctttgcgcatattgtcatcgcgggtgactaaggctagtgcgtcttctaggctcattttaacgatggtttcatacaattttgtgatttctctggcaatcacgatttgtcgattcaacggtaacacggtcgccatatcttgtaaggaagccagaatacgatgactggattcataaaatacccacgttgttgggcagttcagttgttcactgaaaaaggttttgcgagcggaggacgtgcgtggtaaaaatccaaaaaaagaaaattgggtaacaggcagacccgccgctgataaggcagcaattaacgcacacgcccctggaatcggaacaacatcaatgcctgcctccttgactaatttaaccaatggcatacctggatcacttaataacggcgtgcctgcgtcagagactaaagcgatagattgcccttcgcggagtttttctaataacactaacgccgctttatcttcattatgttgatgcaacgaggttaatttattggtaatgccgtaatgttgtaacaacaatccgacgtggcgggtatcttctgcggcaatcaaatcgacttcttttaacgtagcaatcgctctgaaacttatatcggctaaattaccaatcggggtagcgactacataaagttttccgtgttctggtgtcatttttattgggttactcatcatcaaatatatcgtttaaatcaatcgctaactcaggaaataaatacggtctggctaagccgttcgcgtacatcgctttcaattgatactgcccgttatcatctaagacaaactgataaatggcctgctcataaggatacaccagccaatattcacttacgccactttcggcgtacaactcatatttaatctgcatttcccgcttggaattacctttagacaaaatttcaataatccaatcaggcgcaccgttacagccttgttcatccagtttatccgtgtcacaaattacgcataaatcaggttgcacgacggaatgaatttctttattcgctaaaatggattttttgcggtcgtataaacgcacatcaaacggcgcagcatagacacggcattttttatgtctgaaaaagttgtacaacagccctgttaaatgagtagaaatcccttgatgcttcacattgggcgcaggtgacatgagcatgattttgcctttaatcagttcaatggcttcatctatctgccacgttaaataatcggcataactgtaggtttttgttaaatctaactgggaaagttgggtgatttttggcatggcgaaggctcaaggtgacaaaatataatggctggcataatacgtctattgtccactaaagacacgaaaagattaccgttttttcgtggacaatcaatacaaatcgacgggatcaacatccagtgaccaacgtacttttgcagcgatttttagttttgccacggcgggaatcagcgttgttaataaggcttgcaaatcgctacgctgattactttgtaacagcagttgataacgatgaaaacccgcacgtttcgccatcggtgcggcgactgggcctaataacagcacattatgctgaggtgtttgcgccgctaactcaataacggcttgcagaaaagtagctggtaactccacatcacgcgcttgtgcgttgactagggcttgataactaaacggcggtaaacctgccgcgttacgttcagctaaggcactgattgcaaagcgttgatagccgtgttgtatcagcgtggtcaacaatgggtgatcgggctgacgggtttgcataatgactttgcccgctttttctgcccgccctgccctgcctgatacttggactatcatttgtgcgactttttcagcggcatgaaaatcaatgctgaataaaccgctgtccacatccaatagggcgaccagcgtgacattcgggaaatgatgccctttcgccagcatttgtgtaccgagaataatatcaatctcgccttgatgaatttgttctaagtaagtttctaatgaacctttacggcgcacggaatcagtatctaaacgcaaagtgactttatcgggaaatacttttttcagcactttttcgacgcgctctgtgcctaaacctaagggcgtgagttcgcctgttttgcaagcagggcaagcgttaagcaaatggtgttctgtgccgcaatgatggcaacgtaatagcgattcatcctgatg

SEQ ID NO: 665 - DNA, 23105 bp, synthetic construct
  misc_feature 1..23105: note = Synthetic
  source 1..23105: mol_type = other DNA
aacagcaagaagttaaggataaacttgaggctgaaaagcaagccaaacttgaagaagaaagggcggctgaagcggctaaaaaagcagcggaagaagcagcggctgcaaaacaggctgcagaagaagcggccaagttagcggcggccgaaaaggagaaaacccccgaacctgctgataaagaaagcagaatggctagccccgaagtgatggcaagaataaaagcagaagcggatgccaagaaagcccgtgaggcagcaagaaagccagataagaaaaaaggcagctctaagtttgatggcggcattttacatatagataagaagccacgacgtatcaaaaagaagggggctaataaggccggtgatattcgccttgagtcgggtgaaaaacatggttttgaagtgcctacgaagacaattgtttatgatgtagaaatccctgaaagtattatcgtgtctgaccttgctcaacgaatgaaggttaaagcgggtgaagtcattaaaacattgatgggcttgggcacaatggcgactattaaccaggcgctcgaccaagataccgctgttattgtggttgaagagatgggtcacaaagccattttacggagtgatgaagacattcaggctgagttattggctgatgttatacaaaaagatggtgaagaggtgccacgtggtcccgtggtgaccattatggggcatgtagatcacggaaaaacctcattactcgattatattagagaaagtcgtgttgcagcgggtgaatcaggtggtattactcaacatattggtgcttaccgtgtgaaacaaggtgatagcatggtaacttttatcgatacacccgggcatgcggcattcacagccatgcgagcgcgtggtgcccagattaccgatttggtcattttggttgttgcagcagatgacggcgttatgccgcaaacaaaagaggccgttgaacatgcacgggcggccggtgtgccgattattgtcgctgtcaataaaatggacaaagaaggcgctcaaccggatcgagttaagaatgaacttgcttcgattgaagtaacccctgaagattggggtggagatacgcaatttgttaatatctctgcattgaccggtcaagggatagatgagctgttagaagcgatcgctttacaggctgaattattagagctgtctgcgccagttgatgtggcggcaaccggcgttattgttgagtctcgtctagacaaaggcaggggggctgtagccaccatccttgtgcagaaaggcacattaaatatgggtgattacctagttgctggtgaggcacatgggcgtgtaaaagccatgttcgatgagaacggcaaggctattaaatctgcgacacctgccgtacctgttgaagtgttagggctttcaagtgctaccgaagcaggcgaggaagtttatgcggcgccaaacgaacgtaaagcccgcgaaattgctgaattccgtcaaaataaatcgaagcaggcaaggcaagcaaaacagcaggcagcgaaactcgagcaagctttttcacaaatggaagaaggggacagtgcgacactcaatatattattgaaaacggatgtccatggtagtttagaggccttaaaggcgtcacttgtgaacctttcaacagacgaagtgaaagtatcaattgtcgccggtggtgtcggtggcattaatgaaagtgacgttaatctagccgctgcttcagatgcgctcattgttggtttcaatacccgtgcggatgcaagtgcgagacgtatgattgaaaatcgcggtgtttcagtacgttactacagcattatttatgatgtgattgatgatgtacgcgatgccttgtccggtttattagctcctgatattaaagaacagatcgttggtattgcgaatgtgcgtgatgtatttaaatcgccaaaattaggtgcaattgcgggttgtatggtaaccgaaggttacgttaagaaagacctgccgattcgtgtgctacgtgaaaatgttgttattttcgaaggtcagcttgaatcgttgagacgttttaaagatgatgttcaagaagttaaaaatggcatggaatgcggtatcggcgtgaagaattacaatgatgtccaggaaggcgatcagatagaagtctttgagcgtgttgaagtaaaacgtaaattgtagtgtgcgcgattaatgcctagagagtttttacgttttcagcgagttgcccgccaattacaaagggagctagccgaagtgatacggcgtgatcttaaagaccctgatgttggctttgtaacagtcagtgatgttgaggtcacaaaagacctggcggtcgctaaggtttttgtcagtgtcttaacaacgaatgacaaggacagcaaatcgtctagcgttaaggccctaaatcgagcatctaattatatacacggtatggtatcgaaacgcatgcgcatgcgtatggtgcctgaattgcgctttttcctggatgagtctattgagcaaggtattaaaatggacgcgttgcttaaagcgaccgatcctgaaaatgagaaataatcagtggccgatcgaaaaaagagagggcgcgatattagtggaattcttattctagataaaccgcttaatatttcttccaatcgagcggtgcaaattattaaacgattatacgacgctaaaaaagtgggccatacaggcagcctggaccccttggcatcgggtgttttgcctatttgtctaggacatggcaccaaagtatcaccatatctactggcttcagataaaacctaccaattcacgatgaaacttggagaaacaaccgacacaggtgatgctgagggtcgtgtggttcacaaaagagaggtgcctgacatcagtgagcaacaaatagcggctctcttgcaagcctttacaggcgatattcaacaagtgcctcccatgtattcagcacttaaacacaaagggcaacgtttatatgatttggcaagagcgggccaagttgttgagcgaccggccagaggtgtgacgatcaaatcgctatcactgctctctaaaacaagcgacagcttgacccttgaagtctgttgcacaaaaggaacctatgttcgcactttagcggaagacttgggtgaaaaactgggttgcggtgctcatgttacttttttaaggcgtattaaaacagggccgtttgaattggaagacgccgtaacgatttatcaattagagcaactaaacggtgactttgatccgttggatcaacagttgaaaagcctcgatatggcgttgcaagactaccctctggtgagatgtaatcgagaagaaacaagtgatttatgttttggacgccggatccaattagttgatttagccccaagtccattgattcgtttatatgatgccaatggcgatatttttggcttgggcaagtggcttgaaggtaactatttggcaccagtaagaatttttgcgtaaatacaggcgacggtttcatcataaagcttgttagctcttagagcgatggagtacaatgtgctgttttttcaagattaatattatagaaagtggagtaaatatgtcgttcggtacagaacaaaagcaagagattgttaaagaatatgcgttatcagaaggtgatacagggtctccagaggtccaaattgctttgttaacggggagaattaatcatttgacaccgcatttttctgagaacaaaaaagatcaccactcacgtcaaggtttgttaagaatcattaaccgccgccgtaaacttttggattacttaaaaggtaaagacgtagaacgttaccgtgcactcattgcgcgtttaggattaagaaaatagataattaataggcagacaaatagtgaaatcagtaaaaaaagagtttcagttcggcaatcaaaccgtttcttttgaaacaggcgaaattgcccgtcaagcagacggtgcagttttagttgagattgatggtaccgttgttatggttaccgcggttggtcaacgagaaggtggagaaaataactcattctttccgttaaccgtcaactatcaagaaaaagcatatgccgcaggtaaaattccaggcggtttttttaagcgagaaggacgcccgagtgaaaaggaaacgttgacttctcggcttattgatcgccccatccgccctttgttcccaaaagggtataaaaacgaaactcaaattattgcaacggttatttcgctaaaccccgaagtagacccggatattcctgctttgctgggtgcatcagcagcgttagctatctcaggcttgccgtttgaagggcccattggcgcagcacgagtcggttatattgatggcgattatgttttaaacccatcaaaaacagcgatgtctgaatcccagctggacttggtcgtggcaggtactgctgaagctgtcttaatggtagagtctgaagcagattgcctctctgaagatgttatgttgggcgccgttacgtatggccatgagcaaatgcaagatgccattaatgctatcaatgagtttgcagctgaaacgggcaaacctcgcatggagtgggttgcagtagagaaggatcaagcgttggttgataaggttgccgaacttgcaacagccggtatagcagaagcctacacggtattggttaaattggatcgtcaagcaaagttaaaagaagtccgtgcagacgtgttggcgcagtttgaggctgaagaggccgaagaagttgcagatatttttgcttcattagaaaagaagcatgtccgtgagttagtgctttcaaccaataaacgtattgatggccgtgatttatcaactgtccgtgatattcatgtgcgtactggtgttttaccccgtgcgcatggttcagccttgttcacacgaggcgaaacgcaggccttggttgtggccacattgggtacagatcgcgatgcgcaaatgattgatgcggttgagggcgagtaccgtgataattttatgttgcattataacttccctccattttgtgttggcgaaacaggttttgttggctctccaaaaagacgtgaaattggtcatggtcgtttagctaaacgaggtattcaagcggttttacccagtcaggaagagttttcctatgttttgcgtgttgtatctgaagtaactgaatctaatggctcaagttcaatggccagtacctgtggtaccagtttagcgctgatggatgcgggtgtaccaacgaaagcacctgttgcgggtattgcaatggggcttatcaaagaaggtgacgattttgcagtcttgtcagatattctgggtgatgaagatcacttaggtgatatggactttaaagtgtcaggcacagattctggtgtaacagcgttacaaatggacattaaaatccagggcatcacgcacgaaattatgtcgactgcactagagcaagcgaaagcagggcggttacatattttagaaaaaatgaacaccgaattatctgctgggcgaacagaaatgtctgattttgcgcctcgtattttgacccttaaaattgatccagctaaaattagagatgtgatcggtaaaggtggtgtaacgattcgtgcgattacagaagaaaccggtgcggcgattgatatttctgatgaaggcgttgttaaagtagcttctgtagatcgtgaagctggcgagaaagcactaaagcgtatcgaagacattacagcagaagtggaagtgggtagggtttatgaaggtaaagtggttcgattaatggatttcggtgcttttgtgtcaatcttgcctgggaaagatggtcttgttcatatttcacaaatttcagctgaacgtgttgaaaaagtaagtgatgagttatcagaaggtgatgtagttaaagtgaaggttttagaagtagatcgccaaggtcgtgtccgtttgagtatgaaggaagtagaataaagagataattgctggggtaatacactatgactaattcccgtattattaaaaagtaccctaaccgtcgcttgtatgatacggaaattagtaaatatgtaaccctcaatgatgtgcgtcagcttattattgagcgcgagccgataaaggtgcttgacgctaaatctaaagaggacttaacgcgtagtgtattactgcaaattattttagagcaggaagaagatggtgaaccgataatgagtgccgagatgttagagcagcttattcgtttttatggtgatccttttcagcataactttgcaaagtacctggaaaattcagtaaagctcattgccgagcaaagatccaaggtaagaagccagctggaacaggccgcagatcccttcacgatgatggcatctctagcaaatcgcaatatggaagtttttaaagaaatgcaggaaggtttgtttaaaaaagtcatgtcatcatcaacagtaaacaaaaagaaataagccgtagaatctatgaaaagcccctgaaacggggctttttttgtgtttacagatttatcaaaaagaatgaatgacaatgggcatgttcaaaggtgcccatagggccaataaataagtaaactagcctctatggataagaaggatgactcaacaaaatttgatagcgaacatttccttaaaacgctaacgcaaaagccgggcgtttatcaaatgatcgatcgccaagataattgcatttatgtaggtaaggcaaagaacctaaaaaaaagagtctccagctattttaataagacagataaggatgctaagaagcagctgatgttgtcacatgtccaacgcattgatattgttgtaacacataccgaaggtgaggctttactccttgaaaaccaactcattaaaaaattaaagccaagatacaatatctgcctgagggatgataaaagttacccttatatttatttgtcatcacaccaagaatttccaaaattaatattccatcggggcgctaagaccaaaaaaggtcgttattttggcccttaccccagtgctggtgctgtccgagaaagcttgcatgtattacaaaaactgtttccagttagacaatgtgatgacagttattttaaaaacagatcaaggccgtgtttgcaatatcaaattaaacgctgcacagcgccttgtgttgggcttattagcccacaagagtatcaggacgatgtggatcatactgtgctgtttctcgaaggcaaaaacaaacgactaataaccggactggtaaaaaaaatggaacgtgcggcagagcgtttgaattttgaaaaagcggcacattaccgcgaccagattgcacaattaagaaaaataatggagaggcaatatgtcagcgggaatgagggagatattgatgtcgtagcgtgtaacattcaacagaacatagcctgcgtacaagtgttttttatccgaaatgggcaacatttgggtcatcggacatttttccctaaagtaccgctaggaaaaagagaaggtgaagtgcttaccgccttcttaatgcagttttatcttgataaaaaatttccaaaagcgattatattgagccatgacttgtcagagcgggatttaattcaacaagttttagaaacacaagctgaaagacgaatagcgttaattcaaaaaccacgaggggacagggctcgttggcttaaaatggcaaaagataatgcaacaacagccttaacccaacgattggagagccgagaaaacaccaaaagacgtttgaaaaagctagcagtattattgggcgtggaacgggacattaatcgtttagagtgttttgacatcagtcatttacaaggggaacaaacggtagcttcatgtgttgtactgaatgaagaagggccgctaaaatcagattacagacggtttaatattaccggtgtaatagcgggtgatgattatgcggccttatcacaagcagtgactcgccgatttgttcgcgccaaaaaaaatcagcacatagcaccagatgtacttatcatagatggcggtaaaggccaggttcatgcggttactaatgcgctgaaagatattcattattcagatgttgtggtgattggaatatcaaaaggcagtgacagaaaagtgggtatggaaaaaatctatcgcgcgagcgatggaaaaaccctcattgttccgtctgatgaccccgctctattaatcgttcaacaaatcagagacgaggcacatcgttttgccatcagtggacaccggcaacaacgcggaaaagttaagaaaaaatctacattggaagaaattgaagggctgggtccgaagcgtcgtcagcaattgctgaagcaatttggtggattgcgcgaaattcaatcggccggtgtggatgacctgtgcacggttgatggaatcagtaaatccttagcgcaacgggtgtataacttttttcatgacggagtgagtggataaaatggtactatgccgtaaatgtaatgataatttttgttgaatgattcttaatattccaaccattttaacgctgctacgcattgcctccataccggtcatcatgattgttttttatcttccaatagaagattcgagattatggtgcacagttatctttattgtcgcctctatcacggactggtttgatggttttttagcaagaaagttaaatcttcagacagcttttggtgaattcttagacccagtcgcggataagttaatggtcgtgattatattagtattaattgtgcaggctgatccaatagcttatatcgctataccggcggctattattattgcccgtgaagtatcagtggcctcgctacgggaatggatggcagaaatagggcaacgttctgttgtaaaagtgtcttgggttggaaaatataaaaccggatttcaaatgacatccatcctttgtttgctgtataacgagagcctttttggtttttcaattcgcacaattggtattgtagcgatatacatagcggcccttttaacaatttggtcaatgtggcagtatatacagctggcactccctcaatttaaaaaatagtagggattctgacttgacagttttgctacgaaagatagaatacacggcctcaaagcgggaatagctcagtggtagagcacaaccttgccaaggttggggtcgcgagttcgaatctcgtttcccgctccaaattttaagccgtgtcaccaccacgactttctcatataagccctctctggctgagtggcagagtggttatgcagcggcctgcaaagccgtgtacagcggttcgattccgctctcagcctccataaactcatttcttaacgtcccataccgtttcaaaaccctttaaacgtaattgcgagcaacatatttaccctgaacagtatcactaaattgaatgactctttcgtacgggttttgccagtacttttcatcaacatgaatttcaatatggtttgggactggaaaatgttttgtttctaccagctttataagtttatgggtcaagctgggcaatagtaacgtaaagtagctttgtttataacgccactaagaacaggcgagattagtaagataactcccgggtaaggatttagattatatacgatatgcattaacaggtagcaatcataagatacagaaatacttttgaaacgtcattccaaaatttttttgcagaccacttgcaattaaatcaagttgttcttggagggaaaggtttttgtataatcagggtgtttagcgaccttcaatcccatattctaaagaggttatttcttcgccaaggccagttgtgatttttccatctctgccggggagataataaataattttattcaaaccacttgtttgatgaaatgggtaaactcgtcatagctctttcatcataaaaaactgtgaaaaacgcttttttaaacgtgagtaatatcgaacataataaaaagcccccgctgggagggctttggtcgcttgaaagcgttgcctacgaaaaatcaatttcattggtatgaaaagcaattcgataagccttagtcggttacactattaaaaatattatatattcagggaagataaatgggcaagaaaatattaggactagatttaggcagcaattctataggctgggctttacttgaagaagttaatggtgaagctaatagtattattgatattggaagcagaattttcactaaagcagtcgaagaaaaagttccaacaccaaagaatgtaaagcggcgtgatatgcgacttggcaggcgagtgctacaacgtagagcaaggcgcaagcagcggatgcttaactatttagtctccttagatttgttatcaaacgaattactaagaaaccatcaacctgaaatcattttaaatgagctgggtgacccttacgaactaagaagtaaagccttagatgaaaagctaacgcgctatgaactagggcgtgtgttactacactttgttgctaggcgtggttttttaagtacaaaaaagcaagtcgctggtgacttgattgatgaccctgacactatcgcttacctgaatgaaattgaagataaacctacgcaagacaaagaagaaggggcttttaaagctgatattagcgaagtaagaaaagccattactctatcaggcgcgcgaactcttggggaatatcttcatcaacttgataaaggggtttgtaaacgcaatagaagtcatgaaggtggccaccttcgtactgatagagccatgtataaagacgagcttgatttaatatggcagcagcaacaacaatttttttcagaccttccagctgattttatggaggacaacaaaggggtaaaagaaattattttttatcagcgccctttaaagcttaaaaaagacagaattggcaaatgttcgctagagcctaaaaacaatcgagcatcaatggcaaggcttgaggtgcagcgttttagatatcttcaagatgtgaataatttgcagtattttgagcgccaaacagatcaatggttagcttttactcaagcagataggcagaagttaatagaatattttgaacaacacccaaaaatcacaataacagcgttaaaaaaactattaggtttagacaaattaaccaaaattaatttagaagcaaaaaacctaaaaggtaatatcacagcgtgtgaaattaggaatgtgttaaaagaccggtgggataattattcagataaagagcaatttaatttagtagaagacctgttatcaattaagaaaaagtcggctttaaaaacaaggcttattaaacattggggcttgggtgctgaagtggctataaagttatgtttacttgagtttgaaccgagccacagcaacctttcattaaaagcgattaacaaactacttccttttttacagcaagggcttatatacagtaaaaaagaccaacagactggcgagttaggcgcgttacaagcagcaggctatagtgatgaaatcaaagagcaggaagttagtaataaacttggtgcgccgcttgaaaccagcaacccgatagtaaacaaagccatgcacgaattaaaacgggtggttaacgcacttataaaggaatacggtaagcccgacatcattcgtatagaaatggcgcgcgatctggaaatgaataccaagcgttataaggaaaacgaagctcggcagaataaaaacaaaaaagcgaatgaaggcgctgttgaagcatacaaaggcttgaatcttggtaaatacccaagttatgacgacaagataaaataccgtctttgggaagagcaaaatcgccgttgcgcctacagtaacgaaatgattccgcttcattctgtttttacatcttccgttgaaatagaccacatcttaccgtttaagaaaagccttgatgattcttatatgaacaaagtactttgttatgtagcagagaaccgaaataaaggcgatcgaacaccaaaagatgcgtggagtggtaatgtagaaaagtggatgcaaatcactcaggcaattagtaaatggaaaggtgtggattcaaaagtaaaacgttttcatcaaacagaagcagacttgcaaaaaagggattttatatcctctcagttaaacgatacccgctatatttcaaaacttgctttagattatatggcggagcttgttgggaatagtaatgtctctgtcacaaaaggttcggttgtttcgcaaatccgacaccagtggggctttaatgaccttattggtgaagtggagaaaaaagatcgaacagatcatagacatcatgcaatagacgccgtggttattgcggccacatcacggagcttgtacacaaaagcggttaagcaaattgagcgagataaacttaaaattgaaccgccttatccaaatatacgaaatgaacttgcggagcgtttagagcagatgattgtttctcatgctagcaataggaagctatctggtgcattacatgaagaaacaggtgccggctatatcgaaaaacacggtggcttagtttaccgaaagaacttaacgcctgacttcacagtaaaaaatgcgaagcaaatagtggatgatacgataaagttaatagtgcttaatcatttggagcagtacgataacgaccctaagaaagcctttgcagataatataaaagtaatgcataaagatggcaaaacgcctattaagcgcgtgcgtgttttacagtcaaacaccactttaaagaaactagagcaaaataaagtaagtataaaagataaatcaggcaaggtctttaaatatatgtcgtatggcaatatgcaccatgtcgaaattattcaaaatatagaaacagggaagtataaaggcgaatttgtcaccatgatgcaagccagccatcgagccaaaggtattcaaagcaaattaaacccagaaggtaaaaagctaccgctcgttaaggtagaccatggcgatgaatggcagtttattatggccttgcatattaatgatttggtgagtgttagcgttgatgggggcgggaggatttactatcgggttcaaaagcttgaagtacctagtggcctaacattgcggctgaatacttcttctacaattgagaataaaatagaaggtattaggaagtcgattaccgcgttaatgagaaacggattaaagaaacatttcattaatgccatcggggtctgtgctgatgataaaacgaaccattgatatcagtgaggcggcttaccttcatttaaaaaacaagcaattattaatcgataagcaaggcgaaacggttgggcaagtgccgatagaagatttgggcgtgttgattttgcaacaccccgcaatcgtgttaactcaacaagtgatcattcattgtcaaaaagataaggtgattattatcttttgcgatgaaaagcacttgccttactccgttattttgccaattgcagaaagtcattcactacctaataaaatattaaagcagcaaatcacaataacagaacccactcgaaaacgcctatggcagcaaattgttcagcagaaaattattgaacaagtaaaaacccttactgctttaggtaaaaacacaagtcgtttagatcgaatagcagcacaagtaaaaacaggggatagcacaaattgcgaggcgattgccgcacaagtttattggcgtttattatttggagatgactttaggcgcaatgtggatatggaaggcattaatagcctgctcaattacggttattcaattataagggctgccgtagcaagaagcatctgtggtgctggcctacaccctacgctcgggctttttcatagcaatcaatataatgccctctgtttggctgatgacataatggagccctttagagcatgggtggatatactggtttatcaacttgctaagcaaggtgaactagaagtaaaccagcaaactaagcaagtgcttctaggtcttttaagtgagcctgttaagtatgaaaataaaaaaatgccactaatggtcatgctgcattacttaacagccaatttaaaacgctgctacaacaaggaggtaaaaaaccttgtttaccccgtaaagcaggtgaggtagctgccgtgagttttggcgggctgaataccatgtggattatagtaatgttcgacctgccaacagatactaaagcagcaaggaaggaatacacacggtttagaaaatcattaatagaagatgggttcacaatgatgcaatactctgtttatatacgacacagtagcagtgatgagaacgcacatgtccatgcttcgcgagttaaatcaaccttgcccgatgacggagaagttaggattattaaaataaccgataaacaatttgggcgaatagaggtgttttttggaaacaaaagaaaaccgattgaacaagccccccttcagcttcaattcttttaaaactaaagtggggctttgcaaacaaaaacaacatcttatattgaggatagtgtaaccgactaaggtttatccgcaaatcacaacgcgcgtacagatgcgagctgcatagcagaaagtgtaaccgactaaggtttatccgcaaatcacaacgcttgctgttaatggtgccatgctcgtatcagtgtaaccgactaaggtttatccgcaaatcacaactgtaggttcctgagacttctttgatcgcttagtgtaaccgactaaggtttatccgcaaatcacaaccgttacggtttttagaacgatcagttctcaagtgtaaccgactaaggtttatccgcaaatcacaacagcataaacgtcacatacatgatgatgactagtgtaaccgactaaggtttatccgcaaatcacaacttcgctcattttaatatctcctgtaattcagtgtaaccgactaaggtttatccgcaaatcacaacgataacttcttatagataactcgaaaggggagtgtaaccgactaaggtttatccgcaaatcacaacaaactatgttaaaagtgtcgttaatgccgaagtgtaaccgactaaggtttatccgcaaatcacaacttagatttttaactaaaaagaggaaattgaagtgtaaccgactaaggtttatccgcaaatcacaactttctcgctctttctatcgaatgtgattagagtgtaaccgactaaggtttatccgcaaatcacaaccgttagatgacttgatctttcaatcgtttaagtgtaaccgactaaggtttatccgcaaatcacaacggagttataaaaattttgccccgttttattgcagagcaggcagcttagaaaagagggttttctctcattcattaaaaccagaggagtaaagagtgtggaataagatgaaaatattcgtgctttaaaggggaagaagttctttaaaatgtcgtataatttccgttatttaaccaacttaatctgttcatggagaaacaatgactgttgaaaagtccaaaattatttataccttaactgatgaagcgcctttattagcaacggcttcatttttgccaattgttaaggcttttgcaacagccgctgatatagacgttgagttaagtgatatttctcttgcgtcaagaatactggcgactttttctgatcagttaccggaagataaaaaagtgcccgatgcacttgccgagttggggcttcttacgcagaaagctgagacaaatatcattaaattgccaaatatcagcgcatctatcccgcagcttaaggatgctattgccgagctacagagtaagggctttgaaatccctagttaccctgacgatcctaaaacggaagatgaaaaggcactgcaaaaaaagtttggcaaggttctaggaagtgctgttaacccggtcttacgcgaaggaaattctgatcgcagagcgcctaaggcggttaaagagtatgcaaagaaaaacccgcattctatggggtattggagtcaggcatcaagaacacatgtatctcatatgcactcgggtgatttttattccagtgagcaaagcttaacgattgataagccttgtcgtgtaaagattgagtttgttgctaaaaatggtgatgtcacgacgttaaaagacaacattgctcttttggaaggtgaaattattgacagcatgttcatgagtaagaagcagctgtgcgagttccttgaaaatgaaatgaacgatgcgaaagaaacgggtgtgatgttttctttccatgtgaaagcaacgatgatgaaagtatctcatcccattgtttttgggcatgcggttaaaatttattacaaagacttatttgaaaagcacggtcagttgtttgatgaactgggtgtgaatcctaacgacggtttaagtagcgtttatgagcatattgaaaagctacctgcctctgttaaggatgaaattttatcagatatgcatgcctgctatgaaacgcgtccggaattagccatggtggattctgcaaagggcatttcgaacctgcatacccctaatgaagtgattgttgatgcatctatgcccgcaatgattcgtgcgggcggaaaaatgtgggggcctgatggcaagttgaaagacactaaagcggtgatgccagaaagcacgtttgctcggatttaccaggaattaatcaacttttgcaaaacgcatggggcttttgatccaaccaccatgggcactgtgccaaatgttggcctgatggcgcaaaaggcggaagaatatggttcacatgataaaacgtttgagatggttgctgatggtcgaacacgtattgttgatgatgaaggcaacatcttgcttgaaatggatgttgaagagggcgacatttggaggatgtgtcaggtaaaagatgcaccgattcaagactgggtgaaattggctgttacgcgtgctcgtttgtctaatacaccggcagtgttctggttggataagtaccgcccacatgaaaatgaattgatcaaaaaagttgaaaaataccttaaagatcacgatttgacaggtctcgatattcaaattatgtctcaaaccagagcgatgcgttatacattggaacgcattcttcgaggcaaagatacaatttctgtgacgggtaatattttgcgtgattacttaacggatttattccctattttggagttaggaaccagtgcaaaaatgttatccatcgtacctttgatggccggtggtggtttgtttgaaacgggagccggcggttcagcgccaaaacatgttaagcaactaatagaagaaaaccatttgcgctgggattcgttaggtgagtttttagcgctgtgtgcatcacttgaacacaccgctataaaaagcggtaatgaaaaagcaagcgtgctggcaaaaaccttagatgaagcgaccgcgaaattattagacacagggaagtcgccatcacgcaaaacgggtgaattagataaccgtggaagtcatttttatattgccttgtattgggctcaggcgcttgcggagcaaacagacaatatggcattacaggcttactttaaaccgttagctaaagcacttgccgagaatgagaatgagattgttggtacgttgacgacggagcaatggcatgcagtggatattggcggttattacaaaccagactttgataaagtgactgatattatgaggccttctgccgtatttaatgaggcacttgctgcattaaagtaggtcttttaaaggaagacataaactaaagccgggtgtttgccattaagccaccggctttttttatgtttgaatgttaatcgtgtcgatggctgctcgcaacctcaaacagttctttgtacgaggttccttgttcgggaaattccgcaatacccactttagtgtttagcttgatagaggagccatccattagttggatcggttcagccagctcatttttaagtttttcaaccaagatagacacgtggtcttcgctggttttaacagtaagattggcaaagttcattccatccaagtgtgcgtagatgtcagcatcgcgtgctttagagagcaatcgttcggcaatggctttaagcgccaggtcattttgttgactgttaatctcattgacctttgaatcaaaggaaataataagcataacggctttagcatgagttcgcgtacaaaatgagagtaattgttctgtttgttctgcaaaagttgctgcgtctgggagtcccgtgagggagcaaaaactttctttctggtttagggtcatggtagttaatcgtttaatccgaacatactttaataatggcaggtaattaaaaatttgctaggtataaaagaaaaataagtttaaaaattggccgccaaacgacggtttgaactcgttgttcacttgcgatgctgttaaagtatagaaacctttttttctaacgatacttattcccttgtttccaacgaccacaacccctgcacaggacgacaatttaaagtatttaatgtccttacgggtgctaagtgttagcgggcagctaatcgctattgtcgtgtcgatttattaccttgatatatcgcttcctatccagcctcttgcgatgatcataagtgggttgattgtatggagcttggtgacactgtttttacttaaacaggcatcgcaaataacgcacaatgcttttttcgttcaattagttgttgatgttattgcattgacaggtattttgtatttcacaggtggagcgacaaacccatttgcttggtttttattagtaccacacagtattgcgtcaaccttgttgactcggcgtcatgcctggttgatggcgttactgacgtcggtatcttataccttgttggtcttttattatcagccgttagttcatagcaaccatgctatggaaatgtcggccagtggacactttgctgcacacgtaataggcatgtggattgggtttgtattgtcgagttttttattggcgtttttcgttgcgggtatggcggactctctacgcaaaagaaataagctgctctccgatatgagagaacgtatcttccgtgatgaacggcttgtggctttaggtacccttgccagcagcgctgctcatgagctgggtacgccactaggaaccatggacatagtgttgcatgaactggatattgacctacgtgaaaaggtcgatgaatcggcaatcaacaagttatccattcttcaagggcaaattaaacgttgcaaaaaagtattatcttcaattaccgaaaaggccacctctgagaagtttgattctggacaatgggttcaagtggaccagtatctagcgagtattgtggctcaatggcgaatttctaatctcaatatcaacttaattgaagaggtgaaagggcaaggcgaggccccaaaattgctatctgacgttgtgttaactcgtgctttgatgaatgtgctggacaacgcagctcgagtatctcctcattacattagattggaactgaactgggatgaccatgatattcgtctttttattgaagatgaagggagtaggatggataagctccatttagacaagctgggcaagcacattatggcctcaaaagacaatggtttgggcttgggtgtttacataacaaaggcaacattagagcgactgggtggcagtatcaggtgggaaaaccgcaaacctaaaggtgtttgtgtgagtattttgcttcctgtaaaagtataggaggggtatagctgatgacacataataaaaaaatactgatcattgatgacgatcaaatctactgctcagtgttgagcgatgcgtttcaacgacgtggttatcaggtggaatcagcctatacagaagggcaagcgattcagaaaattgaagagtttaagcctgaaatggcggtggtggatttgcgcttggattatagttcgggcttgcatttaattaagcatttaaaatctaaagacgaaaaaaccaaagtggttatgctcactggctatgccagtattgcaacggcggtggaggccgttaaattaggtgctattcaatatattactaaaccagcaaacgcagatgaaattttggctgcctttgaagaaaaacaagcagattctgatgttatgccatcggataaaccgttgtctgtgaaacgaatggagtgggaacatatgcagaaagtattgctggagtgtgatggtaatatctctgaagcagccagaaggctcaatatgcaccgcaggacactgcaacgaaagttagctaagcgacccgtcaggcaataaacggaagtattttaagtaaggtgtctaggtcagggcgagcgaatgtttgaagtacgccgtgattgatgtgcttggcgagtttaaacaaaatcagcgggtggtctaaaaggcggcttattttctaacgggctcaatgaagggcgttttttaatgggccagttataagcgattggcagaatgtaatctgccatttgtgaaaaactttatgctcttttcttgattgatggcgcgcaatggtggacaatccccttcctgatttacaccaatgaacaatggtgactcatgtcggtcccctcgcaacgtgaaatcgtgaaccccgccaggcccggaagggagcaacggcagcgatggaatcgtgtgccggggtgcggctggcatgggttgccacccattctttatatgtgctggttaagcgccttaaaaattcgcacaatttcatcgcctttgttaccctataaaacttatgagttataaagtctttgcaagaaaatggcggccgttaaattttgctcaagtggttgggcaggaacatatcgttcgagctttaattaatgggcttgagaatgatcgcttacatcacgcgtatttgtttacaggaacgcgtggtgttggtaaaacgacaatagctcgtgtgctcgctaaagctttaaattgccagaataaatcgggtgcagagccttgtggaaaatgtgatgcctgtttggacgttgatcaaggctgttaccctgatttaattgaagtggacgcagcgtcacggaccggtgttgatgacacgcgagagttgcttgaaaatgtgcagtattcgcccagccggggtcagtacaaggtttaccttattgatgaagttcacatgttttcgaaaagtagctttaatgcgctgcttaaaacgttagaagaaccccctgcccatgttaaattcctgttagcgacgacagacccacaaaaaatgccggtaacggtactgtcccgatgtttgcaatttaatcttaaacgtttagtaccggatcaaatagaaggtcaatttaaactgattttagaaagtgagggtattgaatatcaacaaaaagcgactgagctgttagcgcgagcagctgatgggagtatgcgggatggcttgagcctgttggatcaggcgattgtgcatggtaacggtgtgctgaatgaagttgatgttatcgacatgctgggcagtgttgctagagagccagtacttgacctgctgaatgcgttgttaacgcagcagggtgctgccgtattagacagtatccaggcgttggatgaatttgcgccagattatgctgaggtgctccaatcattgttaatgtacttgcatcaaatcgcggtgtgtcaactgatgggtcatcaaactgaagatgagtctttagcgcaattagccgagaagctgggtaaagaagaagtgcagctgtattatcaaattgccttgatggggcaaaaagacctgccattagcgcccacgcctaaaatagggtttgagatggtgttattgcggatgttagctttttcacctgcagacaatgaaacgcagcagaatcattttaagcaaccgaaaactcaatcggtaataaaaccccaaacatcgagtccgcggttgaacacgcaaacgacggaacccgctgtaaaaaacagggctgagccgaacaggccaccagagcaagcgaagaaagcacccaaattagttattcctgaaaaaaaaacacttaaaaatatagagccgagaagagcgcctctagctgaggcggttaacgtctcaacgttggcagaaaaaccagagttggatacaccggctaaggtggcagtaacttcagataagccttggcatgagcttgtgccaacgctgagtttagatccgatggcacttcagctagcgaataatgccaccttattaaggttagatgaccatgagtgtgagttgttgttggtgggtgggcatgtgtcgctgaataaaaaatcggaacttaagctagagcaggcgttgtcggagcactatggaagaaagttaaaactgattctaaccgaaggggcgaaggaccttgtcacgcctaacagtattgcgaatgagaaagtcgctgataggcaacgtcaagcagaacaagaaatagagaacagcccgatcgttaagcaaataatcgcgttgtttgacgctaaaattgcagaaggttcgattaagccgatcgattaattaaaaagtgtacggagataaaaatgaagaaccaattaggtgacttaatgcagcaagcgcaaaaaatgcaggagaaaatgcaagaagcgcagcaaaagttggcggaattagaagtgacaggggaatctggagccggtcttgtgaagttggtgttgacgggtaaacacgaagctaaacgattattgatagaccccagtttattgaaagacgaagatcaagagatgctcgaagacctgattgtgtcagcaattaacgatgctgttcgcaaagtggaaaacgaaaataaagaaagcatggcaggcatgaccgcagggattccattgccaccaggctttaaattgccgttttaatgcaattagaaccgattcttcaagacttgatgcaagctttgcgctgcttgccgggtgtcggtcaaaagtctgcacagcggatggcatttcatctgctggagcgcgatcgtcaaggagcgtttaccttagctaaaagcctggctgacgcagtggataaaataggccactgttctgtttgccgggcattatcctcatcggaagtttgtattctatgttcagatgagcggcgtgatcagaacgtgttatgtatagtagaaacacccgcagatgtactagcgatagaaggtgcaacacgatttaaaggcatgtattttgttcttaatggtcgtttatcaccccttgatggccttgggccgaaagaaattggtcttgataagctggcagagcgattaacaacaggtgttatcaaagaaattattctcgcgacgaacccaacggttgaaggtgaagcaacggctcactacatcagtgag

SEQ ID NO: 666 - DNA, 23096 bp, synthetic construct
  misc_feature 1..23096: note = Synthetic
  source 1..23096: mol_type = other DNA
tttttacgtgatgccatactagctcatcaggattgagttccggtgaatacggcggtaaccatactaacgtgagcctcccttggctagtgcggacaaattcttgcaccttcttggctcgatgaattcgatggccatcaacaacccaatagatcgatcccttggcgttgtgcagcaaacgccttggaaagtcgataaaaacgtccgcggttacccgtgattcgctcaccatgaaacgcaggtgacccttcggcgaaacggctgacagcctattcacgctaaagcgccgacccgttttcgctacaactggcgtatcaccccgtaccccccaagtggtacctcgatgataatccgaccggatcgtcgattcgtcgccaaaatagacctgcgctcggcgccttttcgcttcttgttgtacttcaggccaagtttctcttaaccataccttaacctgagcagggtctggctcgtatgccttaaacccagggcgctgcgcactcatcccccaacgagacaggctattgcccaccgagcgctcactgacctcgatgccgaatttgtcttgcagtcatatctgaatcatcgagcgcgtccacagggcatcgtgaaaatccaattgcaacggattcgttttaacccgttcacctaagcgatccgcatattcatcgggacactttcttgggcggcccgtgatcttgccggtagacagcgcctgttcaccaccttgctcatacctggataaccaatcgtcaatgcaagaacgatgaaatccgagggctttaattactttttcagggctttcacccgataatacttgcgcaaccgcgtgcctgcggatggcttctcgcgcggaatggggcagtgagcgaccgtctgtctttttcatagcatcattgtaacatatttattaatttgtgtcgggtaacttttttctgaagtagtaactttccgtttgctgttaccaaccgagattgttaatcctttactccaggatacagcatcggaatgtgcgattagttcttttgttctatcctttcttatgtttatttcgaactgtccatcaagtagggcctctattaaagggcacctctgaaaattcaagaataagctccatttctatccacatgactttgggatttctcagtcaacatcgagtgacggctccttcatgccggatgtcgcgtttctcagctttgataggccgacttttcctgtccaaaaagggtcattttccctttttctcaaattgcacacatatctctcctgcacaaagtcaccaagcgtctcatgttatacactctattcatcatgccaaccttcacttgagtacgcacaagccctatcactcgtgagtaaagtccgccttgctcatgggtcaatgacccaaaaatgtgctcgactctagcacggatcgttgaacgcctagcattcgacttcttgctgcgctgcgatagcggcttatgcctattgccctttgtgtgaacagggctacgcatctgcatcgcagccaagctgatttcatggttctcgccttgataagcactatccgcccatacatcagccgatgtgttgtccgccaatatttcaataaagacctgtgaatcgtgaacttcagcacaggtcacttcatagtcgcggacccacttgtgcgcgttatctaccgccacatgattgttatagccaaaatgcgtttcctcatcctttttcgcccagcgcgcatcggtatccttttgcctgcctacgttgggattatccttaaaacgctgatgcagtactcgccagattgctgtaacgcgcaccagtgttatggccgcgctaccgatgaacctttgtaaccgtgcaggtcataccgcggcgcgttcaaacaaaacctcgcccgcgggcgccgtccgcagatcgttcaagccgtggcgatcaacgccgctcaccatgacgcatggcagcaagtcgcctgggacaattttagcgtctgaaaagccatagtcgcggcaggcaacatctggacgtgcgtaacgcgcgaccactgcgactctgctttgcgcgctcttgttgggtccgacaaagtgccagagcccgccccaagtaaaaaagaactgtccgctcgtaacggttatcgactgtctttgatgtggccgcccccagggcgccgtcacgtccgcccaatacaccgccgaatcgggatcatcgtagttcaaatcacccacctcgaccgcgctgctgaggctagaacgataaagatgtgaccctgggatgatttgtaggcaaccgttgtcttccgtcatatccgtcaatgcaacagtaacgtggatcccgcgaatgaactggttaatcgagtccgagtgccagccctgcccgcggctgccgggctggcggacaacaatgtggctagtccaggacagaatgtcattgccgagaagggatctgagcctatccatgatcgagcgacacgagatcaagcggaacagcatctgcgaatgaacgtgagcattgcgcgtaatacttgcatcgagttctcggagccgccgcccaattccagccaagcgtcccggctcgaggagttcagtactgtgaggcgctagggtgaacggtcctagaaagccatttctctcaaaactgcgaatctgttgcgtactgagcatgctgaatattccccaaaaacctgtaacgaaatcgcagaacggcgataacgcttcgccgagaccacgctcacgccagtcacgcctctatcctcgactcatggccagggcccttatgctcgtggaatactgctatccgttgccgctcaaccggtacgcctgcgaacgagaggatgcgctcgatacccggtggcgcgttgaggtcctgggtgttaaatacacggatgcgacgcggatagtggcgcatcaactgagacacacggacgtagtacgcatcccagtatcgagacaatgcctctcttcgatcgtgcaggtccggataggttggaaagcaatcgctccataggctcttggtctccttagcaggcgtccagtgctctaccgggtctagccagtccaggaagctttgaatgacggcggcgcgcgctcttcgcaggcaaatgatcttgacgtcttgactggcagccagcgcgtgctcgacgtagggaagccacgcgctatggacatctccaatcattccttccccagagcttttaataatatcgcgaactcgcgcctgacgagttgactctgtggcctcccatttgagctcataactgaaccgttcatgggtgacggccgctccttcctgcgcattcaacaaagtggcgagcgagagggtcccgcagcgcccggttccaatacctaaaataaccggaagtctcattgctatctcgggcgatcaacttcgctggtggtcctcgatcaattgcttgacccattggaacttgccgtgctccacgctcgacatccattcaccagcatgtcgctctaaacgcaccaccttttctgcaaatgggggcagcccggtggcgctcagaagccatttccgtaaatcatcgccttgctggaaaacgccggccagcaagaacatcagcgcacgatcatttagacgttcgtcgtaccaccttggcaacatatcgagccgcttggcatcattgtagatctcagggcagtctctgtggaccgattctggacctctgaaatggacgacgaaacctcccatttcataacctttgtgaaattgccctaagtttacgtaggacttgtcagcgcaaaagcaaaaaaggctgaactcgaacatcgtatcgaccaattcgcaatccagaaactccggcaaccgtatcgggtcgcctgcgtgaagagtcttcgacttcgtcgtgaagtgtgacgccagcttgggctcgaactgccggtacatggatgagcccggtctggaccgctcatgacgattgccgaaactcacattgtgctcgattgcttctgccacgatccgtgccggtaccatagtcgcaccctcccaaattctgggataaacccggcgctccgcagcctcgtagatcgacagataaggggagtccaggttcaggacaagcttctgttcccgaacgcattgctctacctggaccaacgcaggtacggtaaacaggatgtcttgctctatgaacagaaaagccgaagcgtcttcgagaagggtggcaagatagccgaagatatcgtcccagaacatatagtaagagaggggatcgctcacctgttttgttagataccgcacgttcgattcgttaagcttccaattcgcgaacgtctgtacatgtatcgcgtactcacacccgttcaatgcccaacgcaaattccgcaaatgcagcgcaaaccctttgggatgatgagcgattgttgtaatgacgtgcagcaaggtaagtttccacgttttactttgaaatcgtggtcatgcccaatgatcgatgcgcaaaccagggacccgtttgaatgcattcgtgttgttggtgactagagggcacctctaaaaatagtaatgttttcgtgagtgcaaggaagcaccgcgcgcacaaccgcagtgtataggtgatccgtgaggattcgagcacggagctgacgccgcaatcgcggaaaaggtgcatttttagaggcgccctagaataagtccgagtgatctcgcgtggcctgcgatcatctggtcatacgggccgatcggctggccgatatttgccagctcagcgcgtagttgtccaaaatgagtggccgccgggctgtcgaatggcagcacttcaagccgggctgcaagtccttcgatatccgcaagatttcgttctggttgcatggatttttccgcgccgtagataagttcaccaagcgtgacgaccgatatggccatctgtcttgaatgttgcttgaaggcgtctcttactttcaccggccggttcttgatcgcgtcaataacaatgttcgtgtccagcatgaacttcaacactagagaggggctctcggttgttgttgcggctgttcgcgctcgggcatgaagtcatcggagacctcggctccgtcaaaccaataatcagtgcttcgccgatgacagcgccgtggatattgggcggatggcgcaagcgggaaatgtcttctaggccgtgcacggtaccgctcgaataaataggaatgaccacgttggctttcatttccatggtcagggccagggcagtagacgcatcggccagccggcggtctatgtcaacgtggataatgccggcaacgcctgccatctgcaggtcgtagacgatgtcctggggcctgaaggcggtctgggttcgccagccgtcgatcatgacgtaaccgtcctcagtggcgaggttggcgacgatggccgctgggtagcgggcgcaagcctcggccaacaaggcttgaccggtgaccgccacagtgcccagcaccacctgcgccgcgccgcgctcgaaccagccctcgatctgggccaaggtgcgcaggccgcccgccgccatcacggggatttgggttgcatttatgagcgactcgatgagttcggcatgagtggcctgtttgcacagggcggcatccacgtccagcaaaacaatacgctcagccccctgggcctcgaaatcgcgcaccgccgtcatgggttcgatgccgtggacgacgttgggggcttcgggacagacacgtgtgacgacggtgcctcctgctatctgaatttccggtagaagtaacacgctggcaccttgagcggttgagcggacggcgggctagtgtatcctcgccggctaatttgcacatataacgcaatagcagatgggtattcccagcggatgtggcgcggtgttcgcatttgatttcgacggcgtgatctgcgacagcgtgggtgagaacgcgcttacgacgtggcgcgccctgcgcgcccattggccgcagcgcattgccggtgagctggcgccggatctgcggcagaaattcaccgcctgtaggccggccatagagactggctttcagaacataccgctcatgtggcagttattggacggtgcaacgcctgagcaaatcctggctgatttcgatgcatgggtggccgagatcatggagcgtgaaggtctgggtgatcgggatctggagcgtatgttcggcgcagcccgggatgagtggttagcgcaagactacgacagttggcttgatgctcaaggcttttatccgggcgtggtggaggccatcaatcgcgtctaggcggccagtgggatcatcaccaccaaacagcaccgcatcacctgatggttcggtcaacgacagcgcagttgccagtttcggcgtactgcgttaggacgaacagatcttcacagccccaggagcgctgcttcttgcagcttgcgacttcagcaggtgatggtttgcgaaggtaattgacctcaactgcgccattaatgcgattgagacgaaaaccggttgagtcgtgcggaaaatcccggaacttcatactgggcacctctaacaatgcactttttccgcgattgcggcgtcagcgccgtgctcgaatcctcaggtatcacctaatacactgcggttctgcgcgcggtgcttccttgcactcacgaaaaaattactatcgttagcggtgcccataagagcgctgtattatgattacctactgcagttaaaagaaccaaaataccccgcgtcaggttcagcgctttgttatgctacttgctttgatagctgcaataactttgcttgagtagactctagtattgagtctcttataaatatacttgcgctgattatttcaatgcctataagttcaccttcttcgtttaattctgcagtaatatttgggctaatctcaacactgccgaattctttctcatcagaaattgccagatgcaatatatcctctttctcaaaatacgttagtttaggatcattcattttgaaaccttccaccttttactctgtaattgatttgctgacggctagtggcatgtattgtgattggtgtgattgtgttttcttcatctctttcatatggaatcattaccataacattaccatctttcccaataactaccaatctacctgtagcagtatctaagtatctttcggtgctacgcttaagtatctcttcaacatttaagatattaaaaccacgaagtttcactctgtatttaaaataatcagtccatacgatttgtttcataattactcgattaaggggaatcagaattacttgttctgtagcatgacggcagggcttaggggcgcgcagcgaagcggagcggggagttcctacgaaaaagtcgatacccgttggttagttgcctgctccctctggtactcgctaggcgtctgctatccgaggctcgaatgtagccgttcttcgttgtagaagtccacgtacgcattgaccgcccggcgcacggctccatccgactcgaacgggcggcggtgatacatttcccctttcatggacttgtaccctgactccctatgcgcgttgtccgtcactggtctaggacgattaacgcttcgaacccgtccatgtcgctccacgcagtggccgtaggcgttcgatatgaactcgacgccgcgctcgctgtgcacggtcgggcccggcgcaggctagcgctttgcgatggttttgcgagtgccctacgggtcaacccacccgtcttgctcggccctggatgccagcccaaacagtttgcgcgagcatcggtccatcactgtggctaagtcacgccattgtcctcttactcgaagatacctcaggtcggcgacccatacccggtcgggcccattgactggcgcctccagggtgcggttccccaacttcgtgaacaaacgagtcaggcctggaacccgccgatacagcatcgctgtgcagcatcgaataccgttctcgcgcatgacccgctcaactcggcgtcttcccactcggttaccgattgctttagggactcatgcacccgcggacttccgtcacgcggctcactcgcttcatgcaccgcccggctctgctctagccattcacggtcttggcgagcccgctcactctcgcctcgggcgcaccccgcgtagtagcccttgcgggcacctctaaaaatgcactttttccgcgattgcggcgtcaactccgtgctccaatcctcatgtatcacctatcactgctgtcccgcaaaatagttaaacacagcgtataatctattgatttccataaaaaattgaccatagcattgtgtttgagacatgaaaacagtttttccagagatttcaaagggttagtatgctctatggggagggtagtgccttgacacaatgtagcgttattggccagtctagccctgttataggctttgtagggcgctcccaatgtcttccccgtcatcggtccaaatcatttcacgctcaggcaatcggattaagtttgaagtacagatggagttaaccggctcattgctagatatggaaagcacgattctatcagtgagtaaccaactgggttgctgtgcgaccgcccaagcccttcatcgttttgataccgatgcaagcccaatcgaggtgggcggtataaaactgacttcgcgcacgcagagcaacaaaacgtattattcgccctacggacctgtggatgttgtccgccctgtgtaccaaacctctaggggcggtcgtattgactgtccattggaagcctcagcacgggtcatccaaagcgcaaccccgcgcatggccaagctattgtcaagcaaatatgcccggttgaacgccaatgaaactcgccatgaccttgcggataatcatggctgcacggtttcagtgaactattgacagaaagtcaccgagcgagtgggtgcgattgcccaagccaaggaggaggcatggagctatcagacaccacagttcgatgaggaagtagaagtcgtgagcctgagcctggagggtgggagggtgttaatgcgcgacagtgcttggcgagaagcgatggccggttgtatatcattgtatgacggtcaggggcagcgactccatagcatttatctgggcgcctctccagagtatggcaaggcgtcattcaaacagcggtttattgcagaagccgaacacgtcaagtcgctctaccccgaggccactcgtgtgggcattgctgatggcgcgagcgataacgggtcgttgttaacgcccctgacgcagtatcggattttggatttctatcatgccacagagtatttggcgcaggcgtctaatggggcccatccggaaaagacaggaaagtcaaagcgaaaagcttggttaaaagagcaatgccacagactcgaacatgaaagtaatggtgcacaaaaagtgctcactgagttgaaaagagtaggccgtaaacacctaacaaaagagactaaagacaaagtcaaagacgccatccgatacttcacccatcagcggcccatgatggactatgcggggtatcgtgagaagcaatttccaatcggttctggagtcacggaagcggcctgtaaaacgctgataaagcagcgattgtgtcgttcggggatgagatggaaagagaaaggcttgaagacagtattgagcctgcgcgcgttagtgctgacccaaggtcgatggcaacaattttgggagcgcatcaatcagtgcggcattgaggcttgggtttagaatatacattatttagaggcagaaccctctatggggccgatagagcatactaaccctttgaaattcgtggaaaaactgttttttatgtctcaaacacaatgccatagtcaatttttatgtaaatcaataggttatacgctgtgtttaactattttgtgggacagcagtgataggtgatacatgaggattcgagcacggcgctgacgccgccatcgcggaaaaagtgcatgttcagaggggccctgaagaaatggtgacttgcaaggtaaccgttgcatgactgcgtttgactatgtccgcacggctcataatggatattcatcgcttgatcaatgagaccagattataactcgactaccgataggtgaatacattatattaagagcgcgcccggcaagagcattttgggattggacttgggaagcaattccctggggtgggcactcttggcggcgaacgatcagggcagccctcaagccattagagctgcgggtgtgcgcatcttcaataaagccgtggaggaaaagacgcctacgccaaagaatcagaagcgacgcatggcgcgactagcacggcgcactattcagcggcgcgcgcggcgcaaacgcaaacttgagaactacttgctgcaattggggttgttgcccacagcgctgacggattgtgttaaccgcgaaggcgttttgaacgggctgggtgatccttaccaattgcgggcaaaagcgctagatgagccgctgagtgcgcaccaacttggacgtgtcctgttacacatggtccaacgcaggggattcttgagtaataaaaagaccgctatcgggacggacatgctcgacgatccggatgtgcaagccgtactcgcgtcggaggacgaggccatcacggggagcgatgctgaagagagcgctttcaaagctgacatcagccgcttgcgcacagcgattgaggcggcgggtctaagaacactgggcgaatatcttgcatcgctggatccacacgagtgtaagaggaaccgcgacgggcagctgctgcgcacggatcggcaaatgtaccaggacgaactcgcgctgattttcacgcaacaaagccttcaccacgctgtgctggacgacgatgtacaggtctacatcaatcacatcatatttcatcaacgcccgatcaagcttaaaccagatcgcgttggccgctgctcgttagagcccagttgcaagcgtgccgccgttgcacggctcgagtatcagagatttcgctaccttcaggacatcaatcacctggagtatttcgacgcctacaccgaccagtggtgtcggctgagcccagagaaaaagcacaagctcgtcgagttgttcgagcatcatgcagcgccgagctttgccaagatcaggaaggaactcggtctggataggaagaccgaattcaatttggactccggtgtcaagaaattgcgtggtaataccaccgcctgcgctattcgcgagatttacactggctgggatgcactggacgaccaacagcaacatctgctcgtagaagacttgctcagcatcgaaaagccggcagcgttaaagcgccgcttggctggacactgggccatgagcagggaggccgcggtccgcctgtgtatggtcgagctagagcccgaacacgggaatgtatcgctcaaggcgatccgtaagctgctgccacaccttcgcaaagggcttatctactcagacgcccgggtcgcagcaagttatggctacggcatcagcgaacaggcccctgccgccaaactcgcggcaccgcccgaactcccgaatccgatcgtcaataaggcgctccacgagttgcggcgcgtggtcaatgctctgatcgctgaatttggcaaacctgatgtagtgcgcatcgaaatggcgcgcgacctcgagatgaacaccaagcgttacaaagagttcatcaggcgccaaaaggacaataccaaagccaacgacaaggctgtggaggtctttcaagacgaggcgcgcaagaacccctctttgaaactctcaaaatatccatcgcgtgatcagaagattcgctaccggttgtgggaggagcagggttaccgttgtgcttacagcgggaatgcaattaaccgtgcgacgttgtttagcgcggaagtagaggtagaccacatcatcccgtatagccagtcgctggatgactcctacatgaacaaggtgttgtgtttcgcacgggaaaaccgttacaagggtcaacgtaccccgatcgacgcattcggcggaaacgaggataaatggaatactattaccaaggccattagtcattggccgaagacacttcgcagcaaacgcgaccggttttacaaatcagccgaccaactcgacaaggacttcgtcaacagtcaactgaccgatacacgctatatctccagggaagctggcatttacctcaagactctggggtgcgatgtcacgtttacgcgtggtgtgatgaccgactggttgcgccaccagtggagtttgaacgagctaattggtgagaccgatcaaaaagaacgcacggatcaccgtcaccacgtcatagatgctgtagtaaccgcctgtatagaccggcctctgtacacgatgcttgcgcaccaagcgaaagcgttggagcgcgagcgctctgcgctaagtatgagggacctgcattgcgacccgccgatagatgcgatcaaggcggagcttgagacccaactcgctggactcgttgtttctcatgcgtcgcaacgcaagatatccggagccttgcatgaggaaaccggcgttggccacgtggaaggggtcggcgcggtaacgaggaaacgcctgacgccggagttcaaaaccgctaacctaaagtcaattgtcgatgatgtcgtacgcgagcgggtgcgcgcccatctggcgctgcatgcagataatcctaaggaggcgttcgcggagagcttcgagctttaccacagcgacggcaagacgccgatcaagcgcgtgcgtgtcgtacagtcaaaaactacgcgcgatgccttgaaccaggacaaattcgccgtaaaggaccgtgccggtagagtcttcaaatggcacgcctatggcaacacgcaccatgtagagatatttcggcaccgcacgaagccgaagaagatcgatactcgtttcgttaccgccatggaggccgctaagcgggtgtcgagaagggaaccgatcattcgagtcgagcacgatgacgactgggtgtttttgatggccctgcatatcaatgacttggtgcgcgcctgccaagacgggaactgggggatttaccgaatccagaaatttgatatgaacgatagccgcatgatgctacggctgcataccgctgccagactcgacaacgcggaggaatctcttcgcaagaccataggcacgttattgtcggcgaataagatggaaccgctacgcgtcaacgctatcggtgtaaggatctgagatatgatcaagcgcacgattgatatcagtgagcctggctatctgcacgtgcaacaccggcaactgtgcgtggatcgcgatgacgagactgttgctcgtgtgccggtggaggacctggccgtgctcgtgctggcaaacccagccatcgtgattacgcaagcagtcattgcgctttgccaacagcataacgtagccatcttattttgcgacgagaagcatctgcctatctctgtcactctaccgctttggggtgggcacagtctgcatgccaaggtcctgcgtgcacagataagcattacggaacccacccgcaagcgtctttggcgagagattgttcaagcaaagattacgcagcagattgttacgcttgagcgggctggcgtgggcgcgcccggcttagggcgtttgcgggctaacgtcaagagcgcagaccccagcaactgcgaagcgcaggcggccagacagtactggcgggcactgatgggcgagactttccggcgcgatagcgaagccggtggtatcaacaacttgttgaactacggttatgccgtaatgcgcgccatgatcgcgcgggcaatcgtgggcacgggcttgcacccagcccttgggttgcaccacaagaatcagtacaacgggctgtgcctcgcggatgacctaatggaacctctgcgtccctgggtagactgggaggtattcaagatgacacgcggcggacgcgctcccgctatcgacagggccagtaagcaagttttgcttgggttgctcgccagcgacgcacgtttggacgagcgtgtcatgccgctgatggttgcatcgcattccatggcagcagggctgaaggccgctatgactgaaaaactgcgccttagttttcccgcacgcgtgcactgagggtgagcacatatggcggagacgagaccatgtggatcatcgtgctcttcgacttgccgactgacaccaaagcttcccggcgccaatacacccggttcaggaaattcctgctggacgacagcttttcgatgatgcagtacttctgtctacatgcgacactgcgccagcgacgaaaatgcgacggttcatatccagcgggtcaagcgctcgctgccgcccgacggcgaggtacgtattgtcaagataacggatagacagttcgcgaaaatcgaggtcttctatggaaaaaagcgcaaaccgaccgagcagccgcccgcgcaactcgaatttttgtagaccttacagctgctctgtttgtatacgaatcaacggcttatcgcgcagatagtgtatccgaccaaggactatccgcaattcacaacaagtattaggcttgggcaccacggacaatcagtgtatccgaccaaggactatccgcaattcacaacgggggtcaccgattatctctaccggcgggtgatgtcgctcggggacagcgaacacgcagcttaaccttaagcgtcctgtcaatggcaggatcggcctcaagccaagcgccgccgcactgtccgaatggttaagtgtattgacaacaaaacgatcacccgtgattctcttcaccgctaactaaagagtaggaggaggaatctcacgtgatacctgtgtcacccctgaaagcggccctgttcggtaccgccgtactgtgcttgagcatcaccgctgcgcccgcttatgcgcaaataggcgcttgcttgattaccaaaaccgataccaatccgttcttcgtcaaaatgaaagagggcgcgcttgccggcgctgaggccaacgggatcgaactgcaaacatttgccggcaagatcgacggggacgtagagacgcaagtggcggcggtggaaagctgcatcgcctccggggccaaaggaattctgatcaccccatcggattcgcgggctctggcgcccatagttcgccaagcgcgcggtgccggcttgctcgtgatcgcgctcgatacgccgttcgagccagccgataccgccgatgcaacattcgccacggataatttcaaggcgggggttttgatcggacagtgggccaaggcaaaactcggcaccgaggcggccaacgccaagatcgctctgctcgatctgaatccatcgcaggtttccgttgattatctgcgcgataacggctttcttcagggcttcggcatcgacataaaagaccctaagaagatcggcgatgaagacgatcctcgcatcattggcaacgacgtgaccaacggtaatgaggagggtggccgtagagccatggaaaacctgttgcagcgcgatccggatatcaacgtggtctataccatcaacgaacccgcggcggcgggcgcctatgaggcgttgaaagcgtttggcaaaacgcacggtgttctgctcgtctcggtcgatggcggttgcccaggggtcaagaacgtgcaagaggggatcatcggcgccacctcgatgcagtttccgttgttgatggcatccaagggtatagaggccatcaagcagtgggccgacaccggcgccaagccaaagcatacgccgggacttgatttcttcgacactggcgttgagctgatcaccgacgagccagtcccgggggtgccgtcgatcagttcggcgcagggcctgcagaagtgctggggctgaggctgaacgctcaagctctttcatagcgtctctttcatgatgctcttttaactagtgcccttttaactagcgcatggttgcgccatggtcccggacccacgtggctagtacacacaaggtccgggtccattgccgcgcctgaggactgcggtgacccggaaaacggcttggctgaacccgttgctggaaaagacgcaacactttcttcaccgcaattcgactatggtgccggttattgtgctggcgctgagcgtggtggtgttcgggttcattgccggtgagcgttttttctcgccgttcaatctttcattgatcgtgcagcaagtgtcgatcatcggcattctcgccgccgcccaaagcttggtcatcttgacggcgggcatcgatctgtcggtggcggcgattatggtgttgatgtccgtggtggcgggcaatctggccgtgaacatggggatgccggcaccgctcgcgctgctggtggcactggcgggtggcgcggcggccggctgggtcaacgggctgttcgtgacccggcttaatctgcccccatttatcgtgaccttgggcacttggaatattttctttgccctcaatctgtggctctccggcgcccagtccatacgcggccaggacattgatgacaaggcgccgctgctcaagtttttcggcgagagcgtggcgcttggtggcgctaagctcagttatggttccttcttgatgatcggcatcttcgcggtgctctggtttatgctgactagaaccgcgtggggccggcatgtttatgccgtgggtgacgacaggcaagcggccgaactctgcggtattcgtaccggcagagtcctgatctccgtttacatgctggctggtgtgatctgcgccatcggtgcctgggcatccataggacgggtgggggccgtatcccctcaatctttttacgaagggaatttgcagtccatcaccgctgttgtgatcggcggcatttctctgttcggcgggcgcggttccatattgggtcctctgctcggcgctctgatcgtcggtgtcttccagtcaggactgcgcatggccggcatggatgttctgtggcaggtgttcgccatcggctggctgatcatcattgctgtggccatcgatcagtggattcggaagctggcctcgtgaacgcgcccactcccgcgatcttgcaggcccgtgctctagtcaaacgctacgggcgggtcaccgccttggcccaggccgatttcgacttgtttcacggtgagattctggcggtgatcggcgataacggtgccggtaaatcttcgctcatcaaggcgctttcgggcgctattcgagtggacgagggtgagattttattggaagagaagccagtaagatttcgatcacctctgcaggccagggacgcaggcatagagaccgtgtatcaatcgctggccctgtcccccgcgctgtctatcactgataacttgtttatgggctgcgaaatacgcaaaccgggcataccgggatcggtctttagaatgctcgataggccgcggatggagcgcatcgccaaagagaagctctacgagctggggctgctgaccattcagaacatcacccaagccgtggagacgctgtccggcgggcaacgccagggggtggccgtggcgcgggcggtggcattcggctccaaggtggtcatcatggacgaacccactgcggcgttgggcgttaaagagagccggcgagttttggatctcatcttggatgtcaaagcgcgcggcctcgcggtggttctgatctcccacaacatgccccatgttttcgaggtcgccgacaggatccatatacaccggctcgggcggcgcgaatgcgtcgtcaatccacgagactgttccatgtccgatgcggtagcgatcatgaccggcgctatgccagcgcctggcgaggcccgctgatcgcactcgcgggccgcgcagggcggtaatccccacgcgctcgaggccaaggcatcaggccatcaggctgggcagatacagagcgatacccgggagcagcaccagcgccgccagccgcacgatgtccagcagccaaaacggcgtcacgccgcgaaatatggtgcccgtggcgatatccggatgcatcgcttttagcacgaacacattcataccgatgggtggcgtgatcagactgatctccgtgaccactactacgatgatgccgaaccacaccatcaccaactccggctctataccggtgaattgaagccccgccactaccggatagaacaccggtacggtgagcaagatcatcgacaagctctccagaatgcagccgagcagaagatagatgcagagcatcacgaagatgaccagcagcggcgccacgtgcagctcggcgatccacgctgtcagcgtgtccggcaggccggcgtagctgatgaaattggaaaagatgatggcgccgatcaacacgaaaaacagcatggcggtggtttgcaccgtttcgatcagaatttccaccagcacgccaaaggtgagccgtcttcgtgcaagggcgatcaggaatccgcccatggcaccgatgccggccgcttcggtgggggtgaaaacgccgccgtagataccgccgatgatgagcacgaatagcgccagcacggcccacgtgttgcgcaccgcccgccagcgcgcttcgagatcgctgcgctgcgctggcggcccggctgaagggtcgcgccagacggtgatcttcactgctgccatgtacaggagcacaccgaggatcccgggcagcaagccggcgatgaacagcttgccgatgtcggtttcggtcatatggccgaacaggaccagcaccacgctgggcgggataagaatacccaaggtgccgcccgcggcgatggcgccggtggcgagggcgtcggagtaccggtaacggcgcatggaggggatggtgacgcgggccatggtcgccgccgtggcgatggaagagccgcacacggcgctgaagccgccgcaggccactactgttgccatcgccagaccgccgcggcggtggcccaggaatgcattggaggcggcatacagctcatcggacaggccggcgcgggtgacgaaattacccatgagcacgaataacggcactacggataaggtgtaggacacaccggtttcgtaggcggtcccggccaccatggagccggcggcgctccaggacaccagcagggcgaagcccacgtaaccgaccagcgccatggcaaacgcgatgggcacacgcaccaggatcaggaccaggagtacggcaaagccgagcagggatgcggtcatagtgcgcggtcttcggctgctggcgccgctatccgccgcccggtcaccaccaggatcgccgccagcaaagtactcagcgtcgccagcgtggccatggtgtaacaaaccggcgccagtgggatgttcagcactgccgtctgatcgttgtaatgcacgaaatcgccggctttgccgaacagccgccaggcgatataacccagggccacggtcaccagcagcgagacaaagcggtcgcgcagctcgcgcaaccagcccggaaacaagccttccagcagatccaccgtgatatggccgtcacgcagggtaatgaggggcagcccgaagtagatcatggctgccagcaatagctcggttatctcgaagccgccgggcaccggtgcgctgaacagataacggcccagcacgtctataaacgtaagcgccatcatggccgccaacaccgccgcccccagccattcgagcacccgggtgatcaggcgcacgattttgacccgttcgagtgcagccgttttcatgatctaaggcgcaatatctaaggcgcgatcactgcacctgacctgggctgggtgcgatgcgattaagggatgtacgcgctggagtacacggcttgcttactggccggcgagttttttgatctccgcgcgcatggcggccagcgccgccgcgccgtctacccctttcttggcggtctgcttggcccagccggcttccaccccggcggcaaaaccgcggatcttatccagcatggccgccggcgcgttggtgatcgtgccgccgttggccagcagctttttctcgccggcgatgtcacgcgcctggaaagctttgccagccagctgcgagaacaccggtcccgacacactgtctatggccgagcgatccgccgcggacagcgactcccagcgggctttgttcatgacgaagaaaaagctggtgttgtagaggccgccatcgatacgggtgacgttggtgacggtcttctcgagcttgaagccgtcaatggcttccagcgggaacatgacgccatcagccacgccgcgggtgagagcttcgtacaccgccggtgccggcatgaacatctgcgcgatgccgaagttggcggtcacttgtttgacgataccgccgccgatgcgcatcttcatgtctttgagctgcgagagggcagtaatctctttgctcttgacgttcatgatatggcccgggccgtgggtgaacaggcccagcaacttgacgtcgcggtgttcacccgctttggccattaacttctcgtaggtgcgccagtaggccagcgagatgtgctcggcgtcgttgcctaggaagggcatctcggtgacgctggtcaacaaaaagcgcccgggctgataaccgtgaatgccgtaagtgaggtccgccgtgccttcgcgggcgatgtcgtagtgcgctgggggtttgcccaggggcttgggcagaatcttgacctcgatccggccttcagtcgctttcttcaccgcgttgatccacggcaccatcatctcggcgacgataacgtgcttgggcggcagccaattggataaggtcaaggtggtggcggcgcccgcggcgggtgccaggagcatctgggcagccagcgcgccggccagtgcgccggtgcggatctggccggtgcggatccgggttgtgaggcataagctcatggacacgttcctctggtgttctagggttctgaatgttcttgaaaaccctccagcccatttgacctggagtggtggcgtggggaggataggagaatagtcccggcaggtcgagtgtattcgaagcgagcgagagcatgacgcaaaccttatatcgtgccgagcacataggcagtttgctgcgccccccggcggttcaccgagcgcgcgagcagtgcggcgctggccggttgaccggcgggcgctttaccaccagcgatgcattgcgcgcggtcgaggatcaggccatcgccgaggtggtgggcctgcaagagagcgtgggtctaccggtggtcacggatggcgagtaccggcgctcgttttggcattacgacttcatgagtggtttgagcgggcttgatttggtggagcgcgacgcgggggtgcaattccacggcatcaaactgcgccctatccatccgaccatcacgggccggctggactttcccgatgaccaccccatgttggcgcacttcagctatctcggctctgtcgccaaagccttacccaagatttcgatccctggccccagcgcgtgtcatttccgcaccgccgcggcggacatcgcgccgcaggaatacaccgagcaggaagtgttgctggaagatatcgcccgcgtctataacaaagcggtgcatgctttctacgccgccggctgccgttacttgcaaatggatgacatctttttcgcttatctgtgcgatgacaaacaccgtgagcaaaaacgggccgagggtttggatccggattggctcatagagcgctacgctgccatgatgcaacaagccatcgctgatcggcccgctgacatgaccatcggcatgcatctttgccggggtaacttccgttccacctgggcggcagatggtgcttatgatccggcggctgatgccatcttcaatcagaccagtgtcgatgtttatttcatggaatacgactccgagcgtgccggcgggctggaaccgttgcggttgttgccgaagggaagcaagcgcgttatgccgggctttatgacgactaagacgggggcgctcgaatcgatggacgatctgcggcgccgttttgatgaggcgtcgaagttcgcggatttggatcagctcggtattgcgccgcagtgcgggtttgcttccaccgaggagggcaatattttgagtgtggatgaacagcagcgtaagttggagcttatcgtgcacacggcggagcggatttggggtggggtggcggcttgagtggtgcgcggcttgcctgccgcgcggtgattcaagtcctggtgtttgattaggtattgggatgggaaaaattcctgggatcggcacttaccgtttggaaaactaccgtttgtaaaactacagcgattgtaaaactatggcgacgagctttggcggtaactcatgagtgaatcattcgagcagttgctggcgggcggccatcccaattcgttgggacgcaccttggaagtggtggcgttggtattggcggataagaggcggctagagccactgtaccggtgttatttcagcgcagacgaggtggtgcggctcagaacctccaatgccttgaagcgggtatcgcgggagcagccgcaatggttggtgccgtatatcgataagctgatcggcgaggtaggtaacatcgagcaagcctccgcgcagtggacgctggccaacttgttgcagacgttgacgccattcatggacacggcgcaaaagacgggcgcgttgaaactcatgcagcgcaacctcgcccagcacagcgactggatcgtgctcaacaacactatgcagaccttggcggcgtgggctattgaggacgaggcgctgcgccaatggctgctgcctcatctagaacggttgagtggcgatagccgtaagtcggtggccaagaaggcggtgaagtttgccgcggctttggctaagagcgccccttgatatagatgggcaactcgggggcgcgcaccccgaagcgccgggcgctatgccgagcatccgctcaccctcggtgattcgccctcggtcattcggttaagcgggcagagggcgggtatcaagacgcgctaaactaccaagatccatcctggtactctcgcgttggctggtactctcgcgttggctggtgattgctcgatagggcgtttcatccaacattcgtgctgtctaattcggggagagttccaaggtgagccgtgctgttgaggttcagcccgtcattctagccggtggttcgggcacccgcctgtggcctctgtccaggggcgattaccctaaacaactgttgtgcttggagggcgattcgaccatgttgcagcgcaccgcccagcgcatccgccctggcaccggcttgtcggtcaaagcgcccaccgtgatctgcg

SEQ ID NO: 667 - DNA, 23096 bp, synthetic construct
  source 1..23096: mol_type = other DNA
  misc_feature 1..23096: note = Synthetic
gctgcggtggtggaactggttattatggatgatgcagaaataaaatattcaacggtacaaaactggtatccaggtgatgaaaatggtgttggtggtatttataattttgtcaccaaacgtgcagaatgccgtgggcataatgccaaagtttcctggactcaagttgaaacaggttctgctattacctggaagtatcccagttgtgttttattaggtgatgattctacaggggagttttattcagtggcattgactaataattatcagcaggcggataccggtaccaaaatgatacatattggtaaaaacaccagcagtaccattatttctaaaggtatctctgctggtaaagcacaaaatacttatcgcggtttggttaaagtcggtaaaaaggctgagaatgcacgtaattatacccaatgtgattccttattagttggcgataaatgtggagcacatacttttccgtatatagaagtcaaacagccttctgcacaagtagaacatgaagcgacgacctctaaaattagcgaagaccagttgtttttttgtcaacaacggggactttcagcagaagatgcggtgtccatgattgtgaatggcttttgtaaagaagtatttaaggaattaccgatggaatttgcggtagaagcacaagccttattagggattagtttagaaggctcagtaggctaattcaatgtagcttggataaacgccagtgcaatctgacaacaagcaaaagaaaagaattgataaaacaggaaatacaatgctcaacatagaaaaccttcacgttaatgtcggtgataaagctattttaaaaggtgttaatttacaaataaagccaggtgaggtacataccattatggggcctaatggtgctggtaaaagtaccctttctcatgtgctttccggtaaagcaggttataccgtaacccaaggtaaagtgacttatatgggaaaagatttattgggtatggagccagaactaagagcgcgggaaggtgtgtttctagcctttcaatatccagtagaaatccctggtgtcagcaatatttatttaatgaaagcggctttaaatgccaatagaaaacatcagggtttggatgaagttgatgcgatggattttttaacactggttaaggataaaatcaaattactgcaaatggatgaaaagtttctttatcgagccgttaatgaaggtttttcaggaggtgaaaagaagcgcaatgaaattcttcaggcagcgatacttgaacctaaattatgcgtattagatgaaaccgactcgggtttagatattgatgccttaaaaattgtagctaaaggtattaattccttacgcacagagcaacgttctttcttaatgattacccattatcagcgaatgctggattatgttaaacctgattttgtacatgtcttagctgatggtcgaattgttaaatcaggtgggccagagttagctttagaactggaagcaaaaggctatcagtgggttggagggaaggcagcgtaatgagtggcttacaaaattataagaccgattaccagcaaatacaggctgacctccctgggcagtctttagcttggttacagcagataagaatcgatgcttttagcgtattttcggataccggttttccttcattaagagaagaagaatggcgatataccaatatttcagccatagaaaaaaagttattttcgccctcgacaaatgttgactcaaatgcaatagatcaagcatggctagatagtttttgcttaaaagatgcttacactttagtgattatcaatggccgtttttcaaaagcacattcttcattaaaaggtctgccggaaacagttaccattttgagtatgggcgatgctttagagcagaatccagaattagttgaaaaatatttgaccaaagccgtagcaaatgaagagcatagttttgtggcctttaattcagcatggtttagcgatggattatttgtacatgtacctgtaaagcaagtgttagataaacctgttcaacttattcatctagtgacacaggctgattgtttggcagttagtcgaaacatactcattgtcgaagacatggcacaggtagaagtgattgaaacttttgtgggtgatagcaatgcttatttaacggcttctgttacagaaatatttgtagaaaagaatgctgatttaacactgtataaaatgcaaaatgaaggtgataaggcttatcattttggcggtacttatgtaaaacaagcaaagcacagtcgctttaaacatcataattttgccttcggtagtttattagccagaaatgatgtacatactgatttagatatggcttctgaatgcgatttgaatggattgtatattggtgtaaaacgtcagcatatcgacaatcatacccgtattaagcacatgcaaccgcacgccattagtaaggaaatgtataaaggtattttaaatcagcgtgccaagggtgtttttcaaggactggtttttgttgctgaagatgcacaaaaaactgattctgtgatgaataatcgtaatctattgttatccaatgatgccgaagcggatgccaaacctcagctaaagatttatgcagatgacgtgaaatgtgcgcatggtgtaacggttggacagttggatgaaaaatcaattttttatttaaaatcacgagccatagatgaagcaaccgctcgaaatatgctgacctttgcttttgctaatgaaatggtgggtaaagtggataataaagaactacatacgatgttgcttgggcaattattacaacgattttcacaaaagtctgtggatgagaaatggttgtagggaatgtgaatattacaaaaatatcagtgatttcaatactgatattttgcagttgaaataaagtgaggactcagcataactcataaacgaagtaagaattagaagcttcaaatacaatatgttaataataaattagcagcaactactcagcttaccctctattttgtccgatagccgcgttgaaagtgtgcatttacacctgtaaactccgcgctttcgccttgctcttgaacgccttgatcttgaagagaacaggggggcaatctaagcagttacggagtacgccgagtagttacaattagcaaatcattaaagaaacaatacaaaatgacaacattccccatagaaaaaatcagagaagattttcctatattaaaagaaaaaatcggtaacaaccccttggtttatttggacaatgcagcgacatgccagaaaccacaggcagtgattgacagtatttctcatttgtatatgcatgaatatgccaatgtgcatagaggcgtgcatactctaagtgtgaaagcgacagaccgatatgaaggagccagagaaaaagtaaaaaactttattaatgcgaccagtacaaaggaaattatttttgtaaaaggtaccacagaggcgattaacttaattgcccagagctttggtaaaactaatattaaagcaggggatgagattttaattaccgctatggaacatcattccaatatcgtgccttggcaaatactctgtaaagaaactggcgctgtattaaaagtggcaccgattaatttacaaggtgaattgatttttgcagaatttgaacacttaatcagtgataaaactaaactggtttcagtagttcacatgtccaatgctttaggtacgattaaccctgttaaagcgattatagccgcagccaaagctaaaaacattgctgttttattggatggtgcgcaagctattccacatatatcagtagatgtgcaagcactggattgtgatttttatgcattttctggtcataaactttatgcaccctctggtattggtgtgctatatggcaagcaggccttattagaagccatgcctccgtaccagagcggtggtgatatgattcgtaaagtgacctttgaagccactgaatacaatggcttgccttataaatttgaagcaggtacacccagtattgcggatgtggtgggtttaggtgcggcgattgattatttgactgctattgggatggataatattgctgcttatgaggcagagttactagactatgctacagaaaaagccaagggaattgcagctttaaaaataataggcgaagccaaagacaaaggtgctattttatcgtttgtactcgataaaattcatcctcatgatattggcaccatgttggatagcttaggtattgcagtcagagcggggcatcattgtgcgatgccagtgatggatttttttgaagtccctgccacagcaagagcttcttttgctatctataatagcaagcaagaaattgatgttttaatgaatggcatagagcaactgattgaggtgtttggctaatgtttgatgatttacgggatctttatcaggaagtgatatttgaccataatagaaatccacgcaactttagagtgatgaaaaatccagatagagaagtcgaagggtttaaccctttatgtggtgatcgcttaactttgtttttgaagtttcaaggtggtgaaattagtgatgtcagttttcaaggttcaggttgtgctatttctacggcatcagtttcattgatgactgaaattgttaaaggaaagacagaaaatgaagcagaagaattatttcaacaatttcatgcgatgaccacgggtaaagatgatcaaattgacttggaagctattgggaaattagctgttttggcaggtgtcagagaatacccagcccgagtaaaatgcgcgactttagcttggcatactttagatgcggctttaaagaacgaagaaaaatctatttctacggaataattggttttaatgtatcagggaaaattagcgatactttgtcagcaacaagatgggttggatgaagcgatttccctagctaaaaatctggatgttccgttatatcaagagttaagccagagcacttccgagttgtattttctgacatggcgagagggttgtttaaaactactggatagagaactgctaaaaaaggggggcttatcagtagatatagagccacgctatggtgaacaacattcttggccagcaccaaaaaaaggggctttagcacaagctatagggcgaaagacaaaaactattgttgatgccaccacaggttgggggcaagatagtctacatatttttcggatgggttattcactgcgctgtattgaacgctcgcctattatgtatgaattattgaaagatggtttcaagcgtttatctaacaaagaatgggtgttgcagttatcgcttaacacccccgaattgttttttgctaatgcctgtgatgtattagttgcgttagaggataaaccagaatgtatttacatcgatcccatgtttcctacgaaaagaaaaaagtcagcactggctaaaaagtcgatgacagtcttacgtgatctattaggtgatgatgaagataaggaacaactatttgctgcggcagctaaaacagcaactaaaaaagttattgtaaaatgtcctgattatgcagagtcgatagcaggtaagcctgatgaaagtttcaaaagtaaattacttcgatatgatgtatacctaacataataatatgacagactggatagatatttgtgcagaaaatgcattgagtgatggagggcatcttgtgctagatgttgatggaacagaagttgccgtttttaaaatagaaggtcagttttatgcaattgaaaatgtttgttcccatgatggagctgaaattgccagtggattacttgagggagatgaaattatctgtcctcgacatggtgcccgtttttgtttgaaaacaggcgaagtaaaatgcccacctgcttatgaagatattgatacttttccgattaaaatagaaaatgggctggtacaactcagagatagtcgctgggattaataccattttcaaaaaaaataatagatgatggactttttagtttgggacatagaccctttatttatttcatttggctttcttaaaatacgctggtatggcttgatgttcgcatcggcttttatatccagttacatcttgatgaactggatgtataaaagagaaggcaagaatatcgaagagattgataatttactttggtatgtagccattggcactattataggtgctcgattgggccattgtttgttttacgaccccgcttattacttgagtaatccgttaaaaatactggctttctgggaaggcggtttggctagtcatggaggtattttgggtattgtatttgcattgtatctttatcaaaggcgtgttccacaatcttatgcctggtttttagatcgagtggcagtagtctgtgctttaggtggaacatttatccgtattggtaattttttcaactcagaaattgtaggtaagcctgcaaccgtccaatgggcagttattttcaaaagaatagatggcttgcccagacaccctgttcaattgtatgaatccatatcctatttttttattttcatcctattgctaacactttacattacagtaaaagataaaataagggcgggtgttatttttgccacctctttagtcgctgtgtttacagcacgattctttcttgagtttgttaaaactcagcaatctggttatagccatgacttctggatgacgacagggcaatggttaagcattcccttttttcttattggattgtgttatatcttattttcctttcgtagcaaagttgaataatagcctagctaacgcacaagcaataaaccaccctgcttgcaacgcctaagatggataaaaagacccacaagagtagcttatttgttgccagttgccttagccgttttctataaagtaagctcagttttaataactgagctgttacaataaatgtttaatttttaaattaaagtcgaagcttttgcttgctggctttatcagtcgcttaatattcatgcaagaaataaatctaataaaaaacagcattgttgaactcggtaaacgcggtgcagagattaaggactatctcgattatacgactaagagtgaaaggctggtcgaagtattaatggagctggaagtccctgatgtatggagtaaccctgcacatgcaaaagcattaggtaaagaacggggattgctggaaagtattgtcaatacggtgaacgatttggagcagggattagctgatgccgaagaattgttagcagtggcagttgaagaaaacgacgaagaaaccattgaaacagtgattgaagatatacagttgtttgaagataaggttgtcgcattagaatttagccgcatgttttcgggtgaaatggatgccaataatgcctttttggatattcaatcaggctctggtggaacagaagcacaagactgggcagcgatgattgaacggatgtatttacgttggggtgaagctaaaggttttaagacagagttactggaagaatcacgcggcgaggtggcaggcattaaaagtgcaacgattaaatttgaaggtgattatgcttttggctggttgcgtacagaaactggcgttcatcggctggtcagaaaatccccatttgattcgggtagtaggcgacacacttcatttgcctcggtgtttgttacctcagagattgatgatgatattgagatagctattaaccctgctgatttaagagtcgatacctaccgtgccagtggtgcaggagggcaacatgttaataaaacagagtctgcaatccgtattacccataaacccagtggcattgtggtgcaatgtcaaaatgatcgttcccagcataaaaacagagatacagcaatgaagcaattaaaagctaaattgtatgagctagaaatgtcgatacgatcagaatctttgcaagcagtagaggatagcaaatcagatataggctggggtagtcaaattcgttcctatgtactggatcaatcaagaattaaagatttaagaacgaatgttgaaacagggaatacccaagccgtattagatggtgatttagatcagtttatagaagcgagtttaaagagtggtttgtaaaaataagccgattgtaacttgcctcaatcctattgaattccaaatttaagaaaaataacaagaatataaaaaatgtcagaaaaccagcaagatcaacaagaacagattcaacaacggcgtacaaaattaaccgcattacgtgaaaacggcatcgcttttccaacagattttcgccgtaatgtagtcagtggagagctattggccgaatattctgataaaagcaaagaagagctagaagagcagcccatacgggttaaagtggctggcagaattatgacccggcggattatgggaaaagccagtttttgtcatattcaggatatgtcgggaaaaattcaattatatgtgaccagagatacattacctgaaggattctataacgaacaattcaaaaaatgggatattggcgatatagtcggtgctgaaggggttttatttaaaacaaaggtaggcgagttaagtatcagggttgatggtattcgtttattgaccaaagccctgcgtcctttgccagaaaaatttcacggcgtagtagaccaagaaatcaaatacagacaacgatatctggatctgattatgaatgccgattcacgcaagacttttttaatacgctctcaaattgtggcttatatccgtcagttttttgcccaaagagattatttggaagttgaaacaccgatgatgcaagcgattccagggggagcaacagcacgaccttttgcaacccatcataatgccttggatatgggcttgtttttacgcattgcacctgagctgtatttaaaacgattagtggtaggtggttttgagcgggtatttgaaatcaaccgtaattttcgtaatgagggtttatcaacgcggcataaccctgaatttaccatgctagagttttatcaagcctatgcagaatacagtgacttgatggatttaacggaagctttgttaaaaggtttggcagaagatgtggttggcagtaccgtagtgaaatatcaagatgatgaatatgacttcggtaaatcatttgacagaatgaccgtagttgaatctattttgcattttaatccagatttaacgctagcggatattaataatcgtgaagctgctgttaaagtttcagaaaacttaaatattcctgttaaagatggctatggactaggtaaagtgcaaatagaaatatttgaaaaaacagtagaacatcgtttgctgaatccaacttttattactgcctatcctgtagaagtgtctccattagcgcgtagaaatgatgatgatccagatgttactgatcgatttgaattttttgtcggtgggcgtgaaattgccaacggttttaccgagcttaatgatgccgaagatcaagccgagcgttttcagcaacaagtaaaagaaaaagaagagggtgatgatgaagccatgtattttgatgccgattatattgttgccttagaacatggtatgccgccaacagctggagaagggattggtatagatcgtttagtgatgttgtttacagatgcaccatcaattaaagatgtgttgctatttcctcaaatgagacctaaaagctaaatattaatcgttgcataaggtctcgcagtgtaaaacatgcaccgaaggtatttaataagaaaatcatgccgcaagaaattttgcaacgatcaatagaatgctgatatttgtttataaaggcagttggtattatagaatctaaaaacgaagataagcttttaaaaaaatactagcccttcagagttctattggcgggcgaagcagtacttgatagtgatttaaaataatatttttaggcaataaaaagcccccactgggagggctttggtcgcttagaagcgtagcctacgaaaaaacaatttcattggtatgaaaagcaattaatagaccttagtcagttacactaaggattggtattatacacgaggatttaatatgagcaagaaaattttgggtttagatttgggtagcaactcactaggatgggccttacttgaagagacaaatggaaaggccaaccgtattattgctattggtagtcgcatatttactaaagcagtagaagagaaaattcctaccccaaaaaatgtaaaacgacgtgatagcaggcttggcaggcgcgttatacagcggcgatcacgccgtaagcagcgcatgttaaattaccttgtgtcgctggacttattacctcgtgagttacaaggtcacactcaacctgaaattattcttaaccaacgaggcgatccttatgcgttgagggcaaaaagtttagatacacaattaacagcatacgagtttgggcgagtcttactccactttgttgccagacgtggctttttgagtacaaagaaacaagtggcaggcgacttgatagatgatccagataccattgtttttttgaatgcgctagatgatacaccaacaaaagataaagaagaaaccgcgtttaaagcggatattagcaaagtaaagaaagctatagagtgtgcaggggcaagaacattaggtgagtacttgcacaaattagcacaaggtgagtgtaaacgaaaccgtagccatgagggtgggcatttgcgtacagatagaaaaatgtatcaagatgaactagagctgatttggcaacaacaaggtcagtactttagccacttacccgatgacttcatggaaaaagaccaaggcatcaagaaaattatcttttatcaacgccccttaaaactaaaaaaagacagaataggtaaatgttccttagaacctaaaaataaccgtgctccaatggcacgacttgaagttcaacagtttcgctacttacaagatgtaaacaatttacaatactttgaacgccatacagataaatggctgagtattagtgatgatgataaacaaaaactgattgagtactttgaacagaaccctaaaatcaccataacagagttaaggaaacaactcggttttgacaaattgaccaagatcaatttagaagcaaaaaacctaaaaggcaatatcacagcctgtgagattagatcagtattagatgaacaatgggataattattcggatgaaagccagcacgcattagttgaagatttattatcaataaagaaaaaatcagctttaaagacacggcttactacccattggaatttagataattcaaaagccatagaattatgcttacttgagtttgaacctaaccatagtaatctttcgctaaaagcgattaacaaactgcttccttttttacagcaagggcttatttacagtaaaaaagacaaagaaacaggtgagctaggtgcattacaagcggctggctacactgacgaaattaaagagcaagaagtgcttaataaattagctcaacctattgcaaccagcaacccgattgtcaataaagggttgcatgaattaaaacgggtgattaatgccattattaaacaatatgggaaacccgatgtaattcggattgaaatggcacgcgacttagaaatgaacaccaagcgttacaaagaaaatgaagccagacaagccaaaaacaaaaaggaaaatgaaaaagcagttgatgcctatagagatttagaattaggcaaataccctagccataatgacaaaataaaatatcgcttatggcaacaacaagactacttctgcgcttatagcaataaatcaatcccattaagtgctgtttttactgcacaagtagaaattgaccatatcttaccctacaaaaaatcactggatgattcctacatgaataaagtgctgtgttttacagcagaaaatcgaaataaaggcgatagaacacctaaagatgcttggggtgaaaatactgaaaagtggacgcaaattactcaagccattagtcgctggaagggtgtagattcaaaagtaaaacggttttatcaaacggaagctgatttacaagaacgtgattttatttcatcacagcttaatgatacccgttacatttcaaaactggctatagattatgttaagcaacttggttgtgatgtatcggtaacaaagggctttgtggtgtcacaaattcgtcatcaatgggggtttaatgacttgcttggcgaaaccaataaaaaagagaggacagatcatcgtcatcatgccatagatgctgttgttattgctgccacatcacgcagtttatataccaaagcagtcaatcaaattgagcgagataaacttaaaatagaactgccttacttaaatataaaggaggagcttgctgagcgtttaaagcagaccattgtttcacatgccacgcagaggaaattatcgggtagtttgcatgaagaaacaggggcaaactatattgggaaacatggaggactggtttatcgcaagaatctatcccctgattttacagttaaaaatgcccagagtattgtggatgatacagtgcaagcactcgtcctatctcatttagaaagctatgataataactctaaaaaagcctttgctgaaaatgtaacgctctaccataaggatggaaagacagcaataaaacgtgtccgtgttttgcagtcgaagactacgccgaaaaaactagaacaaaacaaatttggtgttaaagacaaatcaggcaagacttttaaatatatgtcgtatggcaacgcacaccatgttgaaatactaaaacaccaagaaacaggtaaatataaaggtgaatttgttactatgatgcaagctagtcatcgtgccaagggtattcaaagtaaattaaacccagaaggtaaaaaatccccgattgttaaggtaagacatgacgatgggtgggaatttattatggctttgcatattaatgatttggtgagtgttgatgaggaaaaaggagaacgtaaatattatcgtgttcagaaaatagatacacagaataataaaattgttcttagagataatagagcctctacacttcaaaacaaacagcaggaattgaatgtatccatcacagtagataattttggacgcaaagatgtaaaatcacacaaaataaatgccattggcataatgactaatgattaaacgcattattgatattagtgatgccgcttatcttcatctaaaaaacaagcaattattaatagataaacaaggtgaaactgttgggcaaataataattgaggatttgggcgtgctgatcttgcagcacccagcgatagtattaacccagcaagtgattattgcctgtcaaaaaaataaagtagttattgtcttttgtgaccataaacacctgccttattcggtaatcttaccgatagctgaaagccatacattacacaataaaattcttaaacaacaaattgcaataacgcagcccacaagaaaaaggctatggcagcaaatagtgcaacagaaaattattgaacaagcaaaaacccttactgctttaggtaaaaatacaagccgtttagaccgcatagtagcgcaagtaaaaacaggcgatagcacaaattgcgaagcggttgcagcacaagtttattggcggttattatttggtaatgactttagacgtaatgttgatatggaaggaattaatagcctgctcaattacggttattcaattataagggcagccgttgcaagaagtatctgtggcgcaggactgcaccctacactcgggatttttcatagtaatcaatataatgccctttgtttggcagatgacatcatggaaccttttagagcatgggtagatatactcgtttatcaacttgcagaacaaggggaattagaggtaaaccagcaaactaaacaggtgcttttaggtcttttaagtgagtctgttgaatatgaaaataaaaaaatgccctttatgattgctatccattatttaatggctgatttaaagcgttgttacagcaaggctcagaaaaaactgctttacccctcactagaaactaggctttttgagtgacatttggcggcatacagaccatgtggctgattgtattatttgatctaccaacagacacaaaagaagcgagaaaagaatatacccagtttagaaaattcttgttaaatgatggttataccatgatgcaatattcagtttatatgcgtcacagtagtagtgatgaaaatgcaatcgtccatgtaaaacgagtaaaagcttgtttacctgatgatggtgaggtgagaattattaaaatcaccgataaacaattttcaaaaatagaagtctattatggaaaaaagcacaagccagcagaaaaagcaccacttcaacttgactttttttaagttgaagtggtgttaattactattaaatcaatagcttgtgtgcagtatagtgtaaccgactaaggtctatctgcaaatcacaactcctacactgatcggcacatctgacggctcagtgtaaccgactaaggtctatctgcaaatcacaacctatgggtgcagatgcagatgcaggtattgagtgtaaccgactaaggtctatctgcaaatcacaactgggaaatagcagaagaggcatataatgagtgtaaccgactaaggtctatctgcaaatcacaacagtagaactaatatagaaaaacttgaaataagtgtaaccgactaaggtctatctgcaaatcacaacatacaaatgtctctggctttacttcttttaagtgtaaccgactaaggtctatctgcaaatcacaacatacataatgctcagcaaattcaacttttaagtgtaaccgactaaggtctatctgcaaatcacaacctgtataaattgcgacccatcaccaccttaagtgtaaccgactaaggtctatctgcaaatcacaacagtaaattatcctaataggcatgtttatgagtgtaaccgactaaggtctatctgcaaatcacaacgcaaaggacatcctttgttttcaggctttgagtgtaaccgactaaggtctatctgcaaatcacaacactaattgcactgttgttacaaatccgctagtgtaaccgactaaggtctatctgcaaatcacaaccatcaatggacaacactctatgatcaccatagtgtaaccgactaaggtctatctgcaaatcacaactggacagtcgttgacaccattctcattccagtgtaaccgactaaggtctatctgcaaatcacaacctgtagtcgtcaacatcggcaaaagttttaagtgtaaccgactaaggtctatctgcaaatcacaacgacttatcacattattaatctgcatttaatagtgtaaccgactaaggtctatctgcaaatcacaaccttgtcaggatgcttgacgaggttaggtagagtgtaaccgactaaggtctatctgcaaatcacaactcggggttacgatcataggccaccattgcaagtgtaaccgactaaggtctatctgcaaatcacaaccattacaggtagcgatgttataatagttaaagtgtaaccgactaaggtctatctgcaaatcacaacagatgctaaggtcttaaacatatttctatagtgtaaccgactaaggtctatctgcaaatcacaacagcttgtcgtgtttgtcgtcattatgctcaagtgtaaccgactaaggtctatctgcaaatcacaacgcaaagcagagcgagatcaaaaacaaaaagagtgtaaccgactaaggtctatctgcaaatcacaacagcaaagcagcttggcaaatacagtgggaaagtgtaaccgactaaggtctatctgcaaatcacaacagcaaagcagcttggcaaatacagtgggaaagtgtaaccgactaaggtctatctgcaaatcacaacctcgcactcagagtaagaagccttgtctaatagtgtaaccgactaaggtctatctgcaaatcacaacgcgcggtagtagatgtactcgctaattcagagtgtaaccgactaaggtctatctgcaaatcacaacagtgccagacaaggggaaaatgcaacatcaagtgtaaccgactaaggtctatctgcaaatcacaactgcaactgacaatactcagaaagaacaatcagtgtaaccgactaaggtctatctgcaaatcacaactgcagccctttgtgcctgccattttgtgctagtgtaaccgactaaggtctatctgcaaatcacaacaggaaccagaacgcactaaaatccgaaaagagtgtaaccgactaaggtctatctgcaaatcacaacctaattggatacggacagaggttgaatattagtgtaaccgactaaggtctatctgcaaatcacaactattcgctcggtcggatggaaccatcacccagtgtaaccgactaaggtctatctgcaaatcacaactgtaaaatgtaagccctgaaactacacttaagtgtaaccgactaaggtctatctgcaaatcacaacaagaacacctgcccaagtgcgtaggccgagtgtaaccgactaaggtctatctgcaaatcacaacgggaaactcaataagcttttagttatttcaagtgtaaccgactaaggtctatctgcaaatcacaactctgagctcctcgttagttgcattgtcaaagtgtaaccgactaaggtctatctgcaaatcacaaccaaaagcagctacagcgttgagtgtaggtgagtgtaaccgactaaggtctatctgcaaatcacaacagagcttcgataatatcgcgaagatcgttgagtgtaaccgactaaggtctatctgcaaatcacaactgagccggcacggctgggatcactacggcagtgtaaccgactaaggtctatctgcaaatcacaacctcgtaaaagaagaatgcaagcttgcacaaagtgtaaccgactaaggtctatctgcaaatcacaacctatggggaaaaaaggacaacttttttaagagtgtaaccgactaaggtctatctgcaaatcacaactaccgcccctgcctctagcaccaaatgcaagtgtaaccgactaaggtctatctgcaaatcacaacgtgcaacccgtagctaaatccttaatatctagtgtaaccgactaaggtctatctgcaaatcacaactttgcgtgtggtgaatatggagataaaaatagtgtaaccgactaaggtctatctgcaaatcacaactgttattcaagcagggttgccacagcgaccagtgtaaccgactaaggtctatctgcaaatcacaaccgtacagataacgcatgcgttatctctacccgtgtaaccaaccaaggtctatctgcaaatcataaccgtacagataacatgcgttatctctacccgtgtaaccgactaaggtctatctgcaaagcacagcaaccaacacattgacttgtagctactttatagccataatatagccactttatacataactcatagagaaattgaacatggtagatactgtaatcagggctaaggttgacccaactttaaaagatgctttttattccgtctgtaaaaacaatgatataacaccatcgcaagctatacggcgatttatgaaaaatacagtgagtaacattgaacctaacccattaactgttgaaatactgactaatagccaaagaggagatgatgtccatcaagcaaaagatattgatgatctattcaatcaattatcaatctaatgcttaatattgaatattctggtcagtttaaaaaagacctaaaactagccaataaacgtagaaaggattttaagaaaataaagaggtgatgcgtttattaatcagtgaagagccacttactaggcagtatttagatcatcctttatctggaaattggaaaggataccgagatttacacatagagttagactggttacttatttatcatcttgaagctaaaaccatccgttttgaacgtacagataacgcatgcgttatctctacccgtgtaaccgaccaaggtctatctgcaaatcacaataggtgaaataactttggaatgggctaaaactatgacatggaaaacttctagccttttttatccgttcatgagttatgctgagttctcattatgtaactatccattctcaagttggataatgggtgggttatttttttccaattgcctaagtctatgtatatgcttggacgataaatcctcactccttacgctttattgaaagaaaaatatggataaaattcaactgctttatgtggaaaatataatcagcaggcaggatcaaactgtgcagcaagaattgaccttttttatgcaaattgaaaatatcaattttgacaaacaggttgatgtaatctggtctggcgaagatggtatctggcatactttaatggctaaatatcatagtatgaatggctctgataaagaatattggcgggtaagcagtgcgtttttactgcaacaacaaacattgcctggcaatattgagtttactatacgttatcgagtgttgggtgctgaatattgggataccaatcatgggcaaaatttccttagtgaagctgattcaggcattcaattagcgcatggtcgcaaagttcaaaacatagtttttgataagtgtttgaatgatgatctgtcagcaatccctattgtcgtggcaatagatcatacttttaatgctgaaaaagtaggggttaaatggacgcttgataattggaaaaccagccagtattcagcttgtcagacagcaagaaattactgggataaagtcgctcagagcaatgccagaaatccaaatcagtatggcagtcaaatatgggcgggtcatattgagcagactgatttttttaaactacagtatattatttgctgcgagagtcatgagcaaaccatttgggataataatgaggcaaataattattctttacagcgagagcaacttaaactgttaattcttaatttacattgctaccaggaagaaaaccaggataaaaagttcactcagatagccaaagcaattaatgcgctggaagttgatatagtctgtttacaggaagtcgcagaatattggcgagatggtcagggtgattgggaatcgaatgctgctaaattgattaatgatcgcttaacacatccttttcatttgcataccgattggtcacatttgggctttgataaataccgagaaggggtggctattttaagtcgatttcctttatcgaatcatcaatccagatatgtctccgatagtgatgatatttataatatccattccagaaaagtagtgatggcatgtgtccatgtgccttatatgggagcaatcaatattttttctgcacatttaagctggatggaagatggctttcaagagcaatttcaacagctacatcgctgggcagaggaacataatacagataatattaaagccaccatgctatgcggcgattttaatattacagcgggttctgaggggtatcaaactgtggttgaaaataaccattatgatgatcaatacttagcagctaatgaacaagctgtttttgaaaaaatatttagagtaaatgatgcacactggcaggatttattgaccgatgattatcgcattgattatatatttatgaacaaatccagtgcattacaagtcacctctgccaaggtgatatttacagaacaagattatggtcgagtgtcagaccattgtggttattttatgacatttgaacccaaggcaactggcaacaaataagctacccgtcttgtgagtctttcatccatcttaggcgttgcaacttagaccacatagcctgttatgctcccttcgttgcaccttaaagatgaataaaaatcctgtgcaacccaaggtgtttatttattgcgtgttatctaaagtagaaatattaagcgagaaagaagaataatatggaaatagcagaacattatgccagacccgttagaggcgaattaggagggtcttttgccagagtaaatgactataatcatgaattttttgtacgttggggcaagattgagtttgaaatgtttcatggtgacagtattaaccttaaagtcatattaaaagccttcagcaatgataatatttgtgagacctatgtagtagatacagatgcctatgatattgaatgggatcggcataaacgcagcaccagagatttttatatacatcctttttccagtacttacggacaggtcaattgcgttaaagtctcttttatagtgcataaagatgggcgttctatagcatcagcgaatgagtatatttatatggactggccgcagttacaggccagtcctgatcagcatcagtaccgagatatatcccctgatcatattaccgagaatcattataaaacttatgagttaaacgcgagtgaactacaatctgatgtagactggatcaatcatcattttgactcaatggaactgattccaaaattcaccaaaggccagcccacacacccgtatcaccccaaaagttacattcatcatttgattgataaagtgatgcaaaccaagtgggacgatcacagccgtttatgcaccattaaagtgagtgttgattgtatagatgatgccgattttgtcagccatttgattcatgccagtgaacaaggggtctgggtgcaatgtattgttgactggcgaaaaatgaccctaactaatagtcaaagttatgcccgcttaaaacgcgctggcattgaattgatcggggtggtttgtagcccaaaacatgatctgattgaagttgaacctgatatgcacactaaattcatcatctttaatgatgaagattgcattttaggatcatttaatattacctttgacaggtggtgggctaattgggagtcgggcatgacctttcattcaaaaggggtatgtcgattattggataatattttccaaagccagcgtggtggtgtcatacaagcttatgggatcgatccctttagctcttttaatttactctatacctttggcaggcacagcactcaaaatggggataattatttaccgcatcatgccattttaggcgaaataaaccgtgccaagcatagtattaaaataaccttatttttgattggtgagttagtaggtgatcattatgacagtgttatttgtgccttaatcaatgctaaaaacagaggggtttatgttcatatcttgtttaacggacacttggcgagagagggtagggtgggtgttgaacgctccatggatgatgaattaaacagaccactattacctgtagtagacagattgaaatctgcatgtatagccgtaggattagtgtatggcaaggatgatcatgaagtgccgtattctcctattcattccaaatattgcattatagatgactatattgttattgaaggtagttttaactggtataacacctctgtcttttcacatgacttagtagtgattgctgccaatcatgaagtagcaaaaccttatttacatgaatttgacgaaattcagcaattgttgcgagtttattattgagagaactcagtataactctggcgatgagaaaaaagtgatagaatttttttatccgttcatgagttatgctgagttctcggtttattaatcgtaggggcaaccccctgtggttgccttttaattaagccaataattgcaaaacacaaattagactctaattatttcaccctattattctattatttaacgaggaaatcttatgaatattgcagcctcagccgaaacgacgcattttccaatttatgttgctggtgactttaaaacgactcagcagacattagaagttatcaattcgtattcaggtacttgtgtttttagtacctacttgggtggtcaagatgagtttgataaggctgtcaattcagcctgtgcagtacaagaaaccatgcgtgacttacccatttatcagcgcttccagatattaatggatattgccaataaattacaggctgaacgcagcaagatagctaaaattatttcactagaagctgccaagcctttaaaactagcattagcagaagttgatcgttcaattcagacttttgtggtatctgcggaagaagcgaaacgcatacccggtgaagttataagtattgattggacagagaccagtgctaataaagatgcgattgttaagtattttcctgtcggtgtggttgccgcgattgtaccgtttaattttcccttgaacttggcggcacataagattgcacctgccattgcagcaggttgtcctattgtgcttaaacccgcttccaaaacgcctattacagctttgtttctagctcaaattattgatcaaacaagtttacccaaaggtgctttttctgtgttacctatggacagaaaagtgggtaatcaattagtgactgatccacgctttaacttactaagttttactggatcagcggatgttggttgggaaatgaaaaagaatgcaggtaagaaaaaagtgattctggaattaggtggtaatgcaggattaattgtagataaagatgccaatattgaacgtgccgtcaccaaagcagtgaatggtgccttttcctttgcaggacaaacctgtattcatacacaacgtatttatgtgcatagccaatgttttgacacatttattgatcagtttaaacaaggcttgttggcgttaaaaataggcgctccagaacaagcggataccgatttttcatccatgattgataaaaataacgccaagcgcatagaatcctgggttaatgaagcggtcgtatcaggtgctgatgtggtttgcggcggaatacggacaggtacagtttatccacccactgtattgactaataccaaaaatgatatgaaagtctgttgcttagaagcctttgcacccatagtcatcatagaaaaatttaccgatttcaaacaaacaatcagtgctattaatgcttctgattttggtcttcaaacaggtatttttacccatgataatcgtaaaataaattacgcctttatgcatttgcatgttggaggggtcattattaatgatgctccgacatttcgtgcagatcacatgccgtatggtggtgttaaagattcaggcttaggcagagaagggcctaaatatgctattttcgatatgatggagccaaaagtat

SEQ ID NO: 668 - DNA, 23096 bp, synthetic construct
  misc_feature 1..23096: note = Synthetic
  source 1..23096: mol_type = other DNA
ttccttataaggcatgccgtaaacaagctctcgggcttgttcataatccaccgctacgccccgctctaacgcagctgccgcataccatttcgccagacaatttcggcaaaaatcagccaaaatcattaactcaatgttttgaacttcagtatgctcttgtaaatggctgactaaacgtctgaacgtggcggcttccaattctgtttgaatatttttatccatgggcttcctccaaaatttagaattattctagcagaaactactatcgggtcatgtacattcttcgctaaagattttacaatagaaaatatatccagtttgcataagccgtccgctcatgtatgaaaattcacagctcctcattagctttttcacctattggttttaatcgacagcaggtcgataaaaacaacaaggcacgaaacacaaatgcggacaatgaactatcgattgctaaaaaagcgcttgacaaaaaaaaatcggacaagtcaatcgtgcctgcctattcgtcagcaggaatcaggcaaactctaattaatcccggctcaagccttaatgaggcaaaacgggataacattaacattattgatacaagaactttaagagcgcttacggcctaccatcaggagctcaataagcctcttcaggaacagtctgccaagttgatccagggaatagatatttatgcctgaccttacttaactacataatatgaaacagctttttgaattttttccggttattttattttttatagtatttaagctctacgatatttatgcagcaactgctgtcgttattgttgccactattgttcaggtgaccttcacgtggtttaaataccataaagttgaaatcatgcaatggattactctggctctgattctggttatgggaggggccaccctttatttgcaggatgagcaatttatcaaatggaagctttccatcatagaatggttattcggcgtagtttttttaggcagtcaatttattggcaaaaaaccaattattgaaagaatgatgtctgacaatctagccttgccgtcggtaatatggaaacgcctcaatacgatgtggggctgcttttttatcagcataggctttatcaatctttatgtcatgtataattacagcaccgaggactgggttactttcaaaactttcggcgtacccggattaatggctgtttttattctgctgcaaatgatttttttatataaatacattccggaggcaaaggaataaatcgtgttatatgcaattgtctgcgaggacacggcggatagtctggaaaagaggctatcagctcgacccgcccatatttccaggctacaggaacttcagaacgccggaaggctgcttttagccggaccccatcctgccgtggatagcgacaatccggacttggccggttttaccggcagtttgataattgctgaatttgatagtcttcaggatgctcaacaatgggcgaatgcagacccttacagggaagccgaagtttacgccagggtttcagtcaaacctttcaaaaagatctttccacaatgacatctgaattaattaaacaagcattaactgcggcatttaagcctgcactaatagaaatcatagacaatagcgcggcacatgccggacatgcaggcagccaaagcggcggcggtcactttcatgtcaccattgtagctcaagcctttgaaggcaaatccttagttcagcggcaccagttggtttataaagcgctgggcgatatgatgaagcagcagattcacgcattaggtattaatgccctttcaccctccgaagatactaaaggaagcttgtaaatgaaaaaaaaaataatccctctgcttgtggccggtaccgtattgattgccggctgtaatcaacaaaaaactgccggtacaacgagcacctctacggcaacgcctattgaaaaagccgatgctgtggccgttgtcaacggccagtacatcagcaaatccgcccttgcagagttggaaaaagacattgccgagcgtagtcacggacaaactttccccaaagaaaaattagtcgaggagttggttcagcgggaattgctggttcaggatgccttacaaaaaaacctggataaatcgccggaagttatagcccagcttgacgttgccagaagatcaatactttcccaggccgctctgcaagactttcttaaggctaatccggtaacggatacggatgttaaagcagaatatgagagtaaggtagccagtgaaaaaggtactgaatacaaagcgcgtcatattctagtcaagactgaagcagaagctaaaaagattatcgcacagttaaacaaaggcgcagattttgccaaactagcgaacaagtattctctcgatgctaaagagtcgcaaaatggcggcgatttaggctggtttgtttccacgcaaatggtggctcccttttcggaagcgctggttaaacttgaaaaaggccaatatactaaaacgcctgttaaaacccagtttggctggcatataattttaaaagaggattcccgtgtccaaacccctcctcctctagaagcagtaaaagaacagcttatgccttacctgcaacgccaaaaagtccagaacatgctggaggctcgacgcaaacaggccaaagtagaaattctggtgccgctgacggaggaaaagcccaaacctgaaacttctgcacctgccgttacggaacctgcggctcccccagcgcaaccggctactacaggagaaagcggtgaaaaagctgctccagctggagcagtaaaagaaacaaatccggcaactcctgctgaacccaagaaataaataattactgtatttaaaaagggcggtttaaccgccctttttttatattactttttccagatactgcaaaacaagctgtatattgcgagtgcccctgaattcatttatatccagcttatagaccgcatgaatctgccttaagcccagccattgctcaggtttatcaataaaaaaggcaattgcatctatcagggaattctgaccgggttttctcaatactaatttaagatgccgctgcccgacaatacgtgattgaataacatcaaataccccttcaaaaacaggctccggaaattcctgtccccagatactggcattctgtaacaggtcagcgaattcaattgtcatatcctgttccgtcaactcgccatcagtaacgattttttgttccaggtcgatgtcagccaggcgttttcctaccatctcatcaaaagccaaggcaaaaggcggataatcatgcaatgttaaagtcattcccgctgccatcgcatggccgccaaacttgttgagcaatttcggatgcgccgccgcaatatccgctaatacatcgcgaatatgaaggccgggaattgagcgtgccgagccttttatcagatctttgccagccggcgcaaatgcaataaccgggcgatgcaggcggtcctttatccgagatgccaaaataccgataattccctggtgccagttggcatcgaacaagcagacaccggcaggcaaatgatgtgcatcaagcgttttcatttcacttaataatgctatcgcctcctttttcatttggccttcaatttccttacggtcattattcagctcatcaagctgtagcgccatgtcttttgcatgaacaggatcttccgttaacaggcattgaatccccaatgacatatcatccatgcggcctgcggcattaagcctggggcccagtttaaagcctaaatccgctgccgtaatagcattatattttttgcccgctaattcaatgagcgcctttaaacccggatgacagcggcccgtgcgtattctcaacaggccctgataaaccagaatccggttaatctgatccagcgccactacatcggccactgtacctaaggccacataatccagtaactgggcaagattcggctctggaatctgcttatgctcgaaccagttccgctctcttaaccggcttcgtaaagccatcaggacataaaaaatcaccccgacgccggcaagcgccccgctcggaaatttatcatcaggcaggttgggattgacgatggcatctgccgccggcaactcatgccctggcagatgatggtcggtaaccaggacttttatgcctgaatccttggctgtcctcaccccctcaacactcgatataccattgtcaaccgtaataataatgtcgggagtttgttgcttgaccagttcgacaatttcaggcgtcaatccatagccatattcaaaccggttgggaacaacgaatgatacttgccctgctcccagcaattgcaaacccttgaccgcgacggcgcaactggtggctccgtcagcatcaaagtcggctactatggaaatgcgttgctgctcctggaaagctgtaagcagatgagatgtcatctcttccatgcctgataacagccagggagaaggcagttttgccagagttctgtccagttccgcctttgaagttaatcctctggctagaaatatacgttccagaatgggatgaagatcgccgaattgagcgcttttttttggtaccggccgagaaactatgatttttttttcgccttgataatacatactgttcctgataaagcgggctttaccagctttatattacttgcttgacattataatgatggattcatcaaggagacggaatttaattcaatcgtaatagtaaactttcaccccatactcagattaatgtgttccaggctaacatccggtggaccgcataactttccggatcctattctgtatgatgaaaataaagcttccgataatgagaagcctgtgacttattcatggaaccaaaccatatttttccggaggctcagtagcttaaccgggaaataccccggtcgataaataccggtctccccggtcgcagataataaccacaatcagcgcgtttttgacttcttcagacaatctcaatgcagcagagacagcgccgcccgaagatacgccggcaaaaatgccttccttcgcggctaaggcgcgagttgtttgttccgccgcttcctgatccacttccataatccggtcaacccgatcggcctggtagattttcggcaaatattgttcaggccaacgcctgatgccgggaattttagagtcaccttcaggctgtaccccgataatctggatagccgtattttgttcctttaaaaattttgacgtccccataatcgtgccggtggtacccatggagctgacaaagtgggtaattttaccgcgcgtatcacgccagatttcagggccggtgccttcataatgagcgcgcggattatccggattcgaaaactgatccagaacccgtcctttgccggccttttccatcgctctggctaaatcaatcgccgcttccatactgcccgcagcaggtgtcagaatgatttcagcgccataagctttcatcgaggcccgacgttcttcgctcatgttatccggcataatcaagatcatcttgtaacctttgatagccgccgccattgccagggcaataccggtattgccgctggtggcttcaattaaactatcgccgggcttgatctcacccctttcttcggcatgtttaatcatgctaagggccgggcggtcttttaccgagcctgccggattattgccttccagtttggccaggatagtattgccggccgtgacggacaagcgctgaagcctgactaaaggcgtattgccgacaaaagattcaatagtggaaaaagtcatagcggttgtggtgatgtggacagagaatgaattatcccataaaattaaaagcggattttactaaatggccggatagccataaaaccgcctcctattccggcgctatactcttcatttgaaattacaggccggttccgctttgctgttgattgggcaggataattgctagaatagcggacattctatttaaattaaaatcaagattatgaccgcaagagatatagtagtaatcggtgcttcggcaggcggtatacagcccttgattgaattgattcagtctttacctgaagactttagcggttatatctttattgtggttcatatacccccgcactcgcccagccagctccctgagattctgacttgttcgggctcattgaaagccgttcatccaaaagatggagagaaactcaaacaaggcatgatttatatagcgccgcccgatcatcacctgttgctggagcacgatcatgcagtagttagaaaaggaccgaaagaaaatcgctttcgcccttctattgatgccttgttcagatcggctgcttatgaatttggtcccagagtcatcggcgtagtattgtccggtttattaaatgacggcacttcaggtttatggtctgtcaagagaatgaacggaatagccatcatccaggatccgaatgatgccgatcacgatagcatgcctgtcagcgtgcttgaatatgtagacgttgactattccgttcccaaagaagaaatcgggcctttgatagtcgggttaatgaaagagaaaatatccaaaaaggccgctatcagcaagagtgaaaaaaaactgttacagatggaagtaaaaatagcccttgaagataatgcttttgaaaaaggcattttggatatgggagaattaaccacctttacctgccccgagtgtcatggcgcattggtcaggcttttggagggaaaaataatccgtttccgttgccataccggacatgcttatactgccagcgcgttattgtccggtattaccgaatccgttgaaaacactctttgggaaaccatgaggggaatggaagaagctatcttattattgaataaaatggcagagcagtttaccaaagccggccagttatcagatgccgaattatttaagaaaaaagctgatatgacggctgagaaagccagaatcattcatgagtctgttttttcccaggaacttctcagtgaagacaagattgtcaagaaacctgaaaatataaaaaaatcaaagcataaaaaacacaaacagaacaataaatctgaccgggcgtaaattacggcatgcctgtttcacagccttaaaaccctatcccgccaaattaaccttagctttcataaatggatattactgatatcgccgctgtaaaaaattatttgcttgccctgcaagatcgtatttgcaccgcacttgaacaggaggaacccggatcgcggtttattgaagacatctgggagcggactgaaggcgggggcggcagaacccgggtattatctgatggccaggttatcgaacaaggcggggttaatttttctgacgttaccggtttcaagttaccgccatcggcaacagctaaacgccctgaacttgccaaccggcaatttcaggctatgggcgtatcattagtcatccatcctaacaacccttatgtaccgacttcccatgccaatgtgcgttttttaatcgcagaacaaccgggcgagccgactatctggtggtttggcggcggttttgacctgactcctttttatcccttcagggaagatgtcctctattggcatcaaacagcgcgggccgcctgccagccgttcggcgatgacgtttatcccctgtacaaaaaatggtgcgatgagtattttttcctcaaacacagaaacgaaactcgcggcataggcggacttttttttgatgacttaaatgaatggagctttgaacagtcttttgcttttatgcaaagcgtgggcaatcattacattaacgcctatcttcctatcgtgcagaaacgcaaaaacatgccgtttggtgaccgggaacgcagcttccagctttaccgccgcggccgttatgtggaattcaatctggtttatgaccgcggcacgctgttcggtcttcaatccggcggcagaaccgaatccatcctgatgtccatgccgccggtagcccactggaaatacaactggcagcctgaacccggcagcgccgaagcacttctctatagcgattacctaaagcctcaaaactggctgggtatttgaagtaggcagcccattctcaggccgcctagacataactctcggaaatatcatcaattacttcttgccaagcaaataaaagagttagttatttttagaagatttaatagcgcatacaattactcaaacggtatgtactgtattacattaataaaccattctcttgcccctccgggcgtatgcacgataacctcatcattcactgtttttccgataagcgccctggccattggagaatttatgctgatggcattattttcagggttaaattcatcagaacctacaatacgatagtgaaaaacttccccggattcgttttcaagctccacccaggcgccaaagaaaactttaccttcctgttcaggagcataatcgacaatttgtaaaacttccaaacgcttggtaagaaaacgaattcgtcgatctatttctctcaaccggcgctttccttccttatactcggcattttccgatcgatctccatgggctgcagcctcggtcaccgactggactacagatcttcgttcaatacgccacagggagtccagttcgttttccaattttgaccggccttcacggctaatcagattgcttccgtcgttcatggattatctccattaatttattgactatgaagattcaatgcttttagtcctgctgcaccagggaaacctgtttgaatacaggcatctttgacgggatcatcattatcttaaataatattatcaaaacatctgcgatgattcgagcctttttccctgctattcggtcaaattccgaatgattttaattgactttatgccaattaaaaattgattttttaaatcattgcgttattataccctgcttgctggagaggtggctgagcggccgaaagcggcggtcttgaaaaccgttgagggttgatcccctcccagggttcgaatccctgcctctccgccacacttcgcaatgttattgattagaaatactttttctaaaaaagcccctcaatataaaatttgtgtaatacaaaggggttggcgtaaccaaagtcagctatttgtttagacgcattaacgcgtatcatttccgcattcgacatacctgtcgaacttcagattgctctcgacgctcgggaacaggtatttcaggctctctttttgaccgctgcaacaataaaatcagaggccttttttattcaccctgagtttaagatacctctataacccccacctcttctgtacgtaaagacacaaaaccaaagccgcatctttgctccgtgtgcttgcctcttggacaaattgaattagtaggagcaaatgcaattgttacgctacaagtcttttcttttaaagcttgcctaaagcttcaaggtagtgaaggaaagctgaaaaattctgagcgtaataaatccctgtcttttccgaaatacccaaacgttatacttaggcaagagttgataattcttgaactcattaaataacgtcgtataaaagcccaacaaaataaacttgattagcaaaaatcttccgctgagcgcgaatatcggcagggagtcatgtcagtatacagggaggcgggctaggaaagctatccctggcttccggattcctgcccaaatccatctggaacgaatttgcattaacccgaagggtgtcaggcagtgaggatagcctgacatgactccctgcctgaacgacgaaaattaatacatttttcgtattggcggacgattcttgctgatcagaaataactattatgctgaaatctatactttaaccagctgaacggttggcattaaagcgagctcgacggcaaatcaataagcaataaaaagcccccttaagttttaactttgcgagggccggggtcgcttgaaagcgttgcctacggaataacgttccattggtatgaaaagcaaaacaataggctatagttggttacactatggccttagattaaccttaatgacaccaatgggcaagaaaattttaggactggatttaggcagcaattcaatcggctgggcattacttggagaaaaaaacggcaagcctgctgaaattatcaatcttggcagccggattttcaccaaagcagtggaagaaaaaatacccacacccaaaaatgtaaagcgcagaaatgcacgattagcaaggcgaattatccagcgacgagcgagacgtaaattaaggatgctcaattatctgataatgttaagactgctgccgcgagaattggccggccatgctgcgccggaaattatcctcaacgaactgggtaacccttattttttacgcgccaaagcgctcgataattccctgactccgtttgagttaggccgtgtatttctgcatcttgtccagcggcgcggttttttaagtaacagaaaaaccttattaggcgatatggcagatgatcctgatgtgttagatgttttaaccgagcttgaaggtaaaaatgacaatagctcagaacgcgccaaagaagaaacggcctttaaagcggccattagtcaattaaaaaatactatcgctgaattgggttttcgcacggttggggaatatctcgcttccttagaccatcatgactgcaaacgtaaccgctccagagatggcgggcatttgcgtacagatcgtcaaatgtatcgtgacgaactggatttaatctgggaacagcaaaaacaacatcatgctgctttaaccgacgacgtaaaggaacagctggaagaaattatttttaagcaaaggcctttaaaactaaattctgaccgcagagggaaatgttcgttggaacccgcccgaaaacgcgcccggatagcccgactggaaagccagagattccgatatcttcaggacattaacaatctgcaatattttgactactacacagaaaaatcagtatccctcaatgaacctgccaaacaaaaactggtgcaactgtttgaaactaccgcagatgtgagttttgcaggcataagaaaaaacttgggttttgataaaaccctggaatttaacctggaaaacggcaataaaaaactgaaaggcaatattaccgcctgtgaaatccgcaaacaattgcccgaatgggatttatttgatgatgccaagcaacacgctttagtagaagacctgcttactatcactaaaaaatcggtacttaaaaaccgactcatgaatcactgggcattcagcgctaatacggcagtacaactttgcctgttagaatttgagccgggacatagcaaccattccataaaagccatcaataaactgctgccttttttgcaacaaggccggatttattccgatgcgcgggttagcgcaggttatggctatgaagtaacaaacataattgccaatgacagattaggcatacctccacaacttcctaatcctatcgtacaaaaagccttgcacgaattacggcggctcattaatgccattattgctgaatacggcaaaccggatgccattcgggttgaaatggcgcgcgatctggaaatgaataccaagcgctatcaggagtttatcacgcaacaagccaaaaacgccaaagccaacgatgaagctgtcagcaaataccaggaaatggcacagaaaaatccacagctcgctttatcaaaataccccgccaaaacagacaaactcaaataccgtttatggcaagatcaaaattattgctgtgcctacagcggcaaatccatcagcctggctacattattcagcgccgagattgatatagaccatatcctgccttacagtgcatcgctcgatgactcattcatgaataaagtggtgtgttttgcaggcgaaaatcgctttaaaggccaaaaaacgccagtggatgcttttggcggcaatactgataaatggaatcagattactcaagccataagccgctggcataaatcgcttaaatccaaaaaagcacgcttttttaccacggctgccgaattgcaaaaacgtgactttatcagtacccaacttaatgatacacgctacattagcaaaattgcgcaaacctacttagccgaattgggcgcggatatttctgttagcaaaggcattactacggcttggctcaggcatcaatggggattgaatagtttaattggcgagaccgataaaaaagagcgtactgatcatcgtcatcatgctattgatgctgtcgttatcgcgtgtgtcgataggcgcttgtatcaggatttagttaataccgcccacgaccttgaacgcaaacaatccgaactcaacatgaaagatattcatattgatccgccttggctgaatttacgtgaggattgccagcaagcactaaataacgtgattattgctcatacgccgcaacgcaaattaatcggggaactgcatgaagtgaccggagccggctttattgacggagtaggcaacgttaatcgtaaaaacctggatggcaacttcactcaggtgaataagattattgatcctgatgtcaagacgctggttgaagagcatttgagaatttatagcaataatccaaagacggcctttgctgaaggcgtaaccgtttttcacaaagacggcaaaacacctataaagcgcgttcgtatcgtgcaatccaaaaccacgctcgccaagcttgaaaacaccaaatttggcgcaaaagataaacaaggcaaagtctttaaatggcttgcttttggcaacctgcatcatgtggaaataattagacacaacaagactggcagttattccgggcaatttgtaaccatgatggaagcctcgcatcgagccaaaggcattaaaatgaaccgccagccgattattaaaaaggatcatggtgaagattatgaatttatcatggcgctgcatattaatgacttgataagcattgagaaagacgggcaacgagtgttttaccgtatacaaaaattggattctggcggcaataggataatgattcgcctaaatacaacaaccgtgttggaccataaaagcgaggaaatttattttagtattaatgaaaactcatttaccacttggcaatttcaaaaacactcgataaacgctatcggaaaattaatcgaatgattaagcgtacactggacatcagcgagcctgcttacctgcatttaaagcatcagcaattattgattgataaaaaaggcgaaactatggcgcaaatagcaattgaggatttaggcgttgttatcttgcagaacccggctattgttattacacaagccgtaattattgcttgccagaaaaacaacgtagtcttgatattttgtgacgagcggcatttaccttattcggttttgttaccgattaatgaaggtaataacctacacaataaagcattgaaacaacaaatgggcttaaagttgccgactaaaaaacgtttatggcaacaggttgtcaaacgcaaaattaccgagcaagcaaacaccttaaaaatgctggataaaacctataaaccattggaacgattggctgaagtcgttaaagcaggtgatccggaaaatttggaagcgcaagccgcccaaaaatactggaaactgctttttggaaatgagttcaggcgcgatgtggaattggacggcatcaacagtttattaaattacggttattccattatgcgggctatggtagctcgcgccattgtcggcagtggcctacacccaactatcggtctgcatcaccgcaaccagtataacggcctgtgcctggctgacgacctgatggaaccctttagaccctgggtggattttaaggtatatcaaatggcgcaaagcgatccacagcttcaggtgaataaagcgtcaaaaattcctctgcttaatttattatctgaaacggtgctgtgggataaacaaaatatgcccttaatggttgcctgtcattatatgttggctaatcttaaacgcgcttatgaagacaataccattatgctggattatccgaaaataattagccagcggcagccatgagctttggcggattaaactcagtgtgggtgattgtcatctttgatcttccaacggacaccccgcaagccagaaaacaatacacagttttcagaaaacatctgcttgataatgggtttggtatgatgcagtattcagtttatatgcgccacagcgcgagtgacgaaaatgcacaagtccatgcaaaacggataaaatcccgtttaccgccagatggcgaagttcgaattattaagataaccgataaacagtttggcagaattgaggttttttatggcaaaaaacacaagaagattgaacaagcaccggatcaactgtcacttttttaaccacaaaagtgacagcttattctttaaaatcaagttattagcataaggcaagtgtaaccaactatagcctacctgcaaatcacaaccacacagaacctttcttgcttgagtgtgagagtgtaaccaactatagcctacctgcaaatcacaacaagacgcagatacaggcgcaggtggccggtagtgtaaccaactatagcctacctgcaaatcacaaccatgagttcagtaacaaaagaaaccgcatcagtgtaaccaactatagcctacctgcaaatcacaacatcgcctagtaattttcatcactatttcccttactgcttggctttggcttgctacccgttcctacacctaaacgttcagtcttatagccagtctcgagataacctccacctgttcctacgcccaatcttttggattcgtgaaagcgttttactatactgctgccagtgcctgcgcctatccgttctgaattgccagcggattcagggagtccctcccctgaccctgtccctgtgctcgcgcttccggaactatttttggttgccaataaacttgctattattatggaatttttcatttgatccgcagttgttggtaaaaatcgggcttgcttcacatcatgagtatctggaagaggtaaggccactatacggtttggtgccaaggtactaaaaagaaaggtcaggcaaaggggtagtagtttcataattattctccttatccgaggaattgttattaatatattttcggctctgtaaactcttcaggacattaaggtttataaaaatcatgataggaataatataaaatagcgtcggttcgaaatcgtacatacagtagctttcttataaatgattaacagcctttgtcttgatcgattccatacctcactaataatgactactcaccccatgcttgaagcatcaattttcccggcattgaaatccgccacgatgctcctttacattcaacaatatcgtaatttcccctaaagctatcaatgtaaaagggaaatgctatccttgacgataaagtgtattcacaggttcgcttgggcgccgacgttttttaagcatttatggaggacggcaaagtattatgtaccgatcagttagcgccctgccggcctatggtattcggttaaaaatctatctatcggcacttcaccttataactaaaacaaaataattactttctaaaaatcaatcgaaaggatgattcatgagaacgatagcggaatataaacacatgctaaacctgcgcgatcgcaggcgttatttgcgactggaagatccgggaggaaatgatgcaccgatcagaaacgagcttttcagcaacgaacgcctggcccaacacgcggacagtttagccaaagcgcaaaacataggcatagggcctaaaggccgcaaattaatcccgcgagttcgggaaaactcccgagtattactggaggcctataaagcggttggtaaagcctcaatcgagcagcgagccattactcccgctgcagaatggctgctggacaatttccatgtgatcgaagaacaggtaaatgacatcaacattcagctgccggaaagctattaccggcaattgcccaagctggctgctggatttctggccggatatccgcgcgtatacggcattgcctgggctttagtggcccatactgacagccgtttttcccccgaaacattgaccctttttataaaagcgtatcaggaaactcaatctctacatattggagaactgtgggcaatacctatcacgctgcgtatcatgttaattgaaaacctgcggcgtttggcgattagaataatgcgctcgcagaccgggcggcgcctggctgatgaatatgttgatcaacttgagaaatccgagtcggcaaccttgcctgtagtattgccgtccgcgccattacgtcgagcttttgtggtgcaactcgtgcagcgtttacatgatcctcatccggggctgactccttcgcttgagtttctgaatgaatggctggccgatcagaatatcaccgtagatgagatcgtccatcaggagcatgcccttcagatcgccgctaatctcaccatgcgcaatatcatcaccagcatgcgagcgatatcagccttcgattggccaaacttcgttgagaaagtaagtctggttgacgattgtttgcgtgctcatcctatctatagcgcgatggactttctcagccgcgaccgatatcgccatgcaattgaagaactgggcaagcactcgcctcacccggagctggaaatcgctcaaaaggtgatggataagattcatcgtcttcctgaaaccacaaccgacaaaagaaagcaggagccagggtattatctgataggccccggccgcactgaattcgagcgcgaattaaactgccatccgcccttccttcagcgactgctgcgcaaatacattacccatgcagcgctctcttatctgagcagtttgtttatagttaccgcggtgttgcttgcgctcatcgtagatgccgccagtaaagctggacttggcgaattgcagatttttattcttgccctgctcgctatattccctatttcagatatcgccgccgccctggttaaccgaattattatcagggtgattccaccggctcatataccgcgacttgagcttaaggaaggcattgacagcgaactgcgaacttttgtcgtcgtgcctaccctgcttatgagcgaagccggtgttaaaatgcaaattgatgagctggaaattctttatctatccaatccatccggcgatgttgtctttgctcttttatcggattgggctgatgcggatcaggaaactacgcctgaagatgctcacctgctaagcctggccactgccggaatagccgcgcttaacgtcaaatataacgagcagcgcttttatctgtttcaccgcaaacgcttgtggaattccagtgaagaaaaatggatgggatgggaacgcaagcgcggaaaattgcaggagttcaatcggcttctgcgaggcgcggaaaatacctcttttataaccattgacgggaaagccgctgttgccccggccggtgttcgttatgtcattaccctcgatgacgataccaagctgcctatcggggctgtatcagaattagtcggaacagccgctcatccgcttaatcatcctgttatagatacggtaacgcgttgtgtcattgaaggttatggaattcttcagccccgggtaacggctacgttgccgcatagaggcgagcgttctatttttcatcggcttttctccggggcatgcggtatggatgcctattcaaccacggtatccgaagtctatcaggatcttttcggactgggaacttacagcggcaaaggattgtacgatgtcgatgcctttgaaacttccctggccggccgcgtcccggaaaactcccagcttagccatgacttgtttgaaagtacttatgcccgttgcggcctagtcagcgacattgaagtgtttgaagaatttccttcggatattgaagttgcggcttatcgctcccaccgctgggcgcggggcgactggcagttgctgccctggattttcggacctcttggaaaaggcatgccgatgatcggccgctggaaaatgctggacaatctgcgccgctcgctgtctgcgccaggagcatttttccttttgctagcggcctggacaatgccaaatgctccgcaaatcgttctattaggcctggtattgacagcgttggcttttccggcgattttaaccctcgcaagcgggtgcgcatcaatatatgccgggcctctacgctctcagctgcgcgcccttgcagaaaatctgggcaagagtctgggtaatagcctggtcaacttaatgctgcttgcccaaaatgcctggcttatgctggatgcgattgtaacgaccctggtgcgggtttttataacccggcgcaagttactcctgtgggttaccgcccggcagacaaaaaccgctgccgaatattccccgaaaagagtaattcagcctttaggccgcactaccgttctcgttgtatctgtcagtctggtaatttttctttttaatcctgctgggctggaaattgcatggccaattcttttattgtggtggctggctcccgttttttcccatatattgagtcttcctccgcggccggagagggaggaagcactgctccctgaacaggctctgcaactgcgtcttatcgggcgccgcacctggcgtttttttacaactttcgtgacacccgaagagcattacctgccgccggataattatcaggaggacccggagccggtgatagctcaccgcagttcgcccaccaattttggcctctatctgttatcggtgctggcagcgcatgactttggctggctcggcatcctggataccgttgagcggctggaggccactttatcgacattgaacggccttcccagactgaacgggcatttttataactggtatgacactagcgatctgcgccccctggagccccgatatgtgtcaaccgtagatagcggcaatcttgccgccaacttactggtgctggcccaaggctgcggggatattgcccgccagccgctggcaatttcgatggcggcgaacgggattttggatacccacagaatcctgtcccatagttttgccaaaatcgctgacgaccggcgaatagttacagtaagccgggaagaacttcagaaaaaattaaccaagattgaaactttattagccaattccccaggcagccatgaagagggcctgcagttttggcggcaactgacttcatctgccgaaaccctgattgatatggtgcgcgcctataatacagaacgcggagactcaagcgatagcgaagtattcatctgggcttctttgctgcgggatgatattcgctctcatcaacgcgatatggagaagctggggccgtttatccataacatagtcccgcttgaacagtatacagactctcctcaagcgtacaaatggacagaagtgacagggcgtttacagaaaatttcggaaaatgcccgggaactgtttttgaatatgaatttcgggtttttatatgatcaggaccggtttttattttctctcgggtaccgcgtggaaaacggtattccggacgatagctattatgatcttttagcctcggaagcgcgtctggccagtctgatcgctatagccaagcgcgaggcgccgaaggctcactggcttcacctggggcgccgcgtcacgcgggcagccggaggaacggtattgttatcgtggtccggctccatgttcgaatacctgatgccatcattgatatcgtatacgccgcgctatagtctgctggatgaaacttgccggacagttattaagcgccagatcgaatatggcaaggaatgcggcgttccgtggggagtatccgaatcggcgttcaacgggcgcgaccgtgaattcacctaccagtattcgcctttcggcgtgccgggtttgggcatgaagcggggactcggccatgatttggtaattgccccttatgctacggctttggcggccatgtacaatattcctgcggctgccgagaattttcagcgcctggaagcaatcggcgcattgggacctttcgggtattacgaagcccttgattttacgccgtcaagactggcagaaaaccagcatgtggccatcgtgcgttgctatatgactcatcatcagggcatgtcgctgttagccctggcaaatgttttgcatgacggcaaaatgcgccaccgtttccataatgtgccattaatagaggcggcggaattactgctgcaggaacgggttccgcgcggtgcggaaagcagtattcccgaccacacccaggctcaggctgaggccgtgcagttagtgcagccgcccgtacgtcgtgtgcattcgcccatggccagcacaccttcagcgcatttgctctccaatggccgctatgctgtgatgatcacggccgcaggttccggctacagtatgtggaaaaagctggcagtgacgcgctggcgggaagatgtaacccgtgatagctggggcagctatatttatttgcgtaatttggcaaacggtcaggtctggtcagcgggttatcaacctactgtaacggttcccgacaagtacgaagtagttttccttgaagaccgggcgcgaattttccgggtagatggaaacctggtaagccgtctggaaattgtggtatcacctgaagacgatgcggaaatcagacgcttgagcctgaccaataacggagctcgcacccaacacatcgagattacctcctatgccgaaatcgtactcgcccccccgctgtcggacatcgctcatcctgccttttccaatttgttcgtgcaaaccgaatttctgcctcaggcacatggattaattgcgcatcgacgaccgcgctcgacaaatgatccccatacctgggcggcacatatactggccggtgcggatgctgacgcgggtcttcaatatgaaaccgaccggtttcgctttgtgggcagaggacaaacgctgcgggccccggtcgccgtaatggatggccgcccgctcactaatacggtaggggcggtgctggatccgattttcagtttgcgtacgcgtgtcagtattgaatcgggcgcaaccgttcacgtagctttcacaaccctgattgcgtcgtcgcgtcaagttgttgaagatctgatagacaaataccatagcccagccactttcgagcgggtttctgctctggcctggacgcacgcccaggtccagttgcgccatttgcgcatcaagccggatgaagcccagttatttcaagccctggctaatcgcttgctctacgccgatcagtcattgcgcccaagcagcaagctcatgcaactcaatagattaaatgtcaccggtctgtggcgcttgagtatctccggcgatcgccctctcatcctgctgcgagtgacggggacagaagaccgggctatagttgatcagttattacgcgcccatgaatactggcggatgaaacggctagcggtcgatatcgtcatattaagcgaaaaaggcacaacttatgcggatgaattaataaatttattagaaggaatggtgcgcgataatcaagctgttacagctcaccatgagcatggcgagcacggcgagatttttgtcttgcgcgccgatatgctctctgatgatgaaagattacttctgcgaactgctgctcgggccttgctcgtgagcagccggggtactttggctgaacaattattaagacttcccatccctgccgaaatcttcattcccgccaaaccagcctatgcatcgggcgctgaaacacccgcgccaaagccgccgaagcttgagtatttcaacggcctgggcggatttgccgaagatggacgggaatacgtgattgtactggataagggccaatggacgccggcgccgtggataaatgttatcgccaatgctgaattcggttttacagtatcggaattgggcagcggctgtacgtggtgtttaaacagccgcgaaaaccaattgacaccgtggtccaatgaccccgtcgtcgatccgcccggagaaattttttatttacgggacgataatacaggcgatttatggagtccaactgcgctgccgatccgtatagaaaatgcaagctatgtgatccgccatggtcacggctatagccggtttgagcatgcatcgcatggaatacacagtgaattactgcaatttgtaagtccggacgatccggtcaagatttcgtctctgctgcttaagaatatttccgggcgcactcgcaaattaaccataacggcttatatagaatgggtgttgggcgcttcgcgaacagtgactgcgcctcatatcattactgagctggatagcgctacaggggctctgtttgccgctaacacatggcacccggaatttggcgaacgcattgctttcgccgatcttgccggcacgcaaactgcctggactggcaacagaactgaatttatcgggcgtaacggcagcctggattcgccgacggctttacgtttgtcttcagaacttaaaaacagcgtcggggccggactcgacccctgtgcggcaatgggggcaagcctgcaactggcacccgatgaacaagtcgagattgtttttttgctgggtcagggcaggaatcgcgaccatgcccgcgagctggtaaagcgttatcgttctaccccggtgcaaaccactatcgctgcggttaaggagcaatggcggcaagtactgactaaagtccaggtaaaaacccctgatcgggctctggatttaatgataaacggctggttattgtaccagaccctgagctgccgcatgtgggctcgcgccgcattttatcaggccggcggggccttcggcttccgggatcagctgcaggatagcatggcgcttgccgtagccaaaccggatgtggtgcgcgcccatattctccgtgctgccgcccgccagttcgcggaaggagatgttcagcactggtggcatccccccgctaaccggggtgtacgtactcatttttcggatgaccgtatctggctgccctatgtcatttctcactatgtaaaggtaacgggagacgccgatatactcaatgagattacgccttttcttgatggcccgttgctgactccggaacaggaagacgcttatttcgagccgaccgtatccacccatcaggcaactgtgtttgaacattgcgcgcgagcgcttgatttgagcctg

SEQ ID NO: 669 - DNA, 23078 bp, synthetic construct
  source 1..23078: mol_type = other DNA
  misc_feature 1..23078: note = Synthetic
tattatgcgagtcagcctggcaactttatgacagctgcgagttaatcgttaaagtaaaagagccactagaaagtgagtggcggtatttaagcgccaagcacacgttgttttgttttttacaccttgcggctaatcgtcgtttagctgaacagttggctgatattggtttaaccgcggttgcatttgaatcggtcagcgagaatcagtgcctgccgttacttagaccgatgagtcaaatcgcgggcaaaatagcggtccaaaccggcgccaccttattgcatcaacagcacggtggttccggtgttttgatgggcggtgtatccccttcagaacacgctgatattgataatgcgcaagtactggttttaggtgcgggctctgcgggcacgcaagcagctttactggcaagtaatatgggcgctaacgtggcggtgtttgaccgatcaccgatggctctacgcgccttgcagcgtttaaacaataaggtagaactgattggcgatgcgccaacatgcttagaacgtgtaccatcaaccgatttgttggtcgctgctttattagtaccggggaaacaagcgccgcattttattacccgcgcgcacattgcatcgatgcgaaaaggctctgtggccgttgatatttcagttgatcaaggcggttgtatagaaacgacgcgggcgaccacgtatgaaaaccccacctatataagcgaaggcgtcatacatttttgtgttgccaatatgccaggagctgtcccaagaacggcgagtcaggctttgtcgttggtgttaccggattatattcatcgattaacacttaccaattggtttgagaatgataagataatgcaacaagctgttaatataaaagacggtaaattacttattaatatttgattaattatatttaataacatagcgttatgaaaatattctagaattagcgtgaagtacattgaataaaaaaaataatacagaaaccaccaccgaagcgcatcagcaagtgattaagttacttagggagtctgcctttcttgtcttgttggcggttagcgtttttttacttggttcgctgattagctataacgttgaagaccccggttggacgcacagtggcacagggccagtggtttctaatatcacaggtgtcgttggtgcgtggattgctgattttatgctttctattatcgggcttatggcgtttgcgttcccttttatgttactgagcagtgcctggaagtttttaacggaagcacgaactgcacaatccgacacggctgcgcaccaaatcattcgctggactagtttctttgtttttttgacagcgggctctgctcttttggatatgcattattatcaaacatggctcacgataccaggtagtccagggggtatcattggtttggagctgagtaattctttacgtcaactgtttgcttttcaagggacgactctgattttattaatcgcttttttggtgggtattaccttatcgaccggcttatcttggttgggcctaatggataagattggccgttatagcatgcaggcctttatcggacttagaaattatattgacgacagtagagaacgtaaggcgtcagacgcagcgaagaaaaagcgtggcgatacctttgaaaaacagtcgaaaaagttcttagccaaaccgaaggcgcgcattgaacctattattagagagattaaaaccagtgagcgcttagataaagaaagacaagtgccgctgtttgatgatgcagacggtagtttgccgatgttatcattattagatgaggcgaccgaacacgtagaaggctattccgccgctgcgttagaagcgctttctaggctggtggagctgaaattagaagattttggtgttgaagttgacgtagtggcggttcatccaggaccggttatcacacgattcgaaatacaacctgcgccaggtattaaagcgagccgtattagtggtttagcgcaagacttggcacgttctatgtcaaccaacagtgtccgtgtggtcgaggtgattcctggcaaatcagtaattggactagaaatacctaatgagtcccgagaaattgttaggctgagtgaaattctatcctcacaagcatatgagaaatcccactcacccttgacgttggtcttaggcaaagacatatcgggtcagccaaccgtggctgacttagcaaaaatgccgcacttattagtagccggtacgaccggttcaggtaaatcggtggcgattaatgcgatgattcttagcttgttatataaggcaacaccggaacaagttcgtatgattatgattgacccaaaaatgcttgagctatcagtgtacgagggcatcccgcatttattaacgccggttgtgacggatatgaaagaagcggctaacgccttgcgttggtcggtagcagaaatggaaaggcgatataaattaatgtcccttttgggtgttagaaatctaaccggttacaacaaaaaggttagagatgccattaaagagggtagtccattggctgatcccctgtgggagccaacagcttttattgatgaagatgaacctggcacgctcagtgagttaccgcaaattgttattattatcgatgagctagccgatatgatgatggtggtgggtaaaaaagttgaagagctgattgctcgcttggcacaaaaagcgcgcgcgtcgggcttgcacttgatactagccacgcaacgtccttctgttgatgtattaacgggtttaattaaggccaatataccctcgcgtattgcctttcaagtatcgtctaaaattgattcaagaactattttagatcaatcgggtgccgagtcattactgggtaatggcgacatgttatacctacccccgggttcaggtctgccgcaacgggtgcatggtgcctttgttgatgaccatgaagtgcataaagtggttaagcaattgaaaaaacagggtaagccaaactatatcgaggctattttatcggcttcagatccagctgaatttgacggctcatcgggcggctccgcggaagattctgatgagttatatgaccaagcattacgcattgtgacggaaacacgacgcgcctctatctcaggtgtgcagcggcaactacggatcggctataatcgtgcggcacgtatgatcgaagaaatggagcgctgtggtgttgttggccccttacaatcaaatggttcgcgtgaagtcctcgcgccaccgcctacggagttatagttcatgaatgtttatcgaaccagcttaacgctactcctcatattttgcgtacctgtttttgccagtgataatacccaagacttgcaaaaccagctaaataaatacactcagttaagtggccatttcacgcaaatcattagtaatgaacacggcaagcaaacccagtcgtctgaaggtgaattttgggtgaaaaaaccgaatcaatttcgctggaactatcaatcaccttacatccaaaaaattgtatctaatggcgataccttatggatttatgatgaagatttggagcaagttagtattaaagccgcttcgaaaacgatagattcatcaccgttatcaattattcttggctcaacgaatctagaacaattatttaaggtaacaaaattagcggataaagacggtatcgactggataaagttaacccctattacggataacagtggctttgactatattgatattggttttaataatggggtgttgaaccgcatgatcttgcgcgacagctttggccagaccacgcgtttattatttaccgcagtagcagttaacagccccattgatgatgaagtatttacctttgttatacccgacggggccgatgtgtttgaagaactggctgagtagtgcagcagttagaacctttagctgatcgattaaggccgcaaaccctacaaggttttgttgggcaaagccatcttctatcgactggtaagcccttgtttgaagcaatacagagcggcttactgcactcgttaattttatggggccctcccggggttggtaaaacgaccttggcacgtattattgcgcaacaggcaggtgctcaatgtgtggccatttcagcggtgttatcaggcgttaaagatattcgtaaagtagtcgaagccgctgaaagtaactggtccaataatcaacaaaaaacgattttgtttgttgatgaagtacaccggttcaataaatcacagcaagatgcttttttaccgcatgtagaggccggtacctttacttttattggtgcaaccactgagaacccatcttttgcgctaaacaatgccttgctatcacgtgctagggtttattgcttaaagcccctgcaaaaaagtgatttagcgactattttagacaatgcattaacaaaagacgataaagtatctattgaaccccaagcggctcaactattgattaattcagccgacagtgatgcgaggcgtttattaaattatttagaacttagtatcaagctctgcgatgtttctaatcagacgataataacatcagcagttattgaagaagtgatacgcgacgggctgcgacgatttgataatcacggggatgatttttacaatcaaatttcagctttacataaatccgttcgcggcagcgaccctgatgcgtctatttactggttaaggcgtatgcttaatggcggctgtgatccgttatacttggctcgtcgcatccttagaatcgcttcagaggacattggaaacgctgaccctagggcgctcgagatcgcgttaaatgcatggcaggttcaaaaaaagctcggtagccccgagggtgaattagcattggcgcaagcagtagtttatttagcctgtgcggctaaaagcaatgctgtctataaagcgtttaataccgtcggtgcggtcattaaaaacaccggtagtcttgaggtgccactgcaccttcgtaatgcaccgacaaaattaatgaaagagcaaggttatagccagggttatcgttacgcacatgacgaagctaacggcttttcagctggagaaatgtatttacctgaagccttgcaagggcagcaatattatcagccagtggaacggggcttggagattaaaatttcggctaagcttcagcaattgcgacaattaaataaagagagcaaaaatccaaagtaaccttatttgggttaatatgcatcaaatataaaatgaataggatggaataatttagatgaaacaaacactgacccttatattgattttaagtaccgttttgttaagcgcttgtacaaccttattagttgggggtgctggggcaggtggttatgccgtaggcaccgatgaacggccttttggtgttatttcacaggatttatcgattaccgccagcgttaaaacgaccttaattaaagacaagcaaatagatgcctttgatattaatgttgatacttatcgcggtgtagtgaccttacacgggcacgtcaaaacatcaagtcaattaaacagagcagtgcaattatcagcgtcggtcaaaggggttaataaagtgctgtcaaaactcaaagtgattgagtaggctgccgttaatgaaaattatcattatcctccttgttattgctcttgttttttatgttgttcaatatttttctaacgcagggtcaagcaaagcagctgaagaaaatataaaaaaaggccagcaatttttattggccaacggctccaaagaaggggttataacaaccgcctctggcttacagtacctggtacttaatgaagggtcgggcacgctaaaacccgtcgcaagagataaggttagggtgcactatcatggcactttgttggatggatcgatttttgacagttcagtacagcgtggcgaaccaataacatttgccttaaatcaagtcatccctggttggactgaaggtgtgcaactgatggtggttggtgaaaaaacgcggttttttatccctagtcatttagcgtatggcaaacgatctgcgggatcgataaaacccggatccacacttatctttgacgttgagttgctcgccatcaatgaaaagtcctaactatttaagacagccggtcaggctgcccacgcaactaaacgattaacttcccccacgctctaacaataaattaaaactcagctattattactttaactggctacgcagcgtcagagttaaataaaccttctattaatagggtgcttggacggggttgttgtgaacgaagttgacatactgtttcttaataaaacttacgagccctggtttgttgtatggtcattgctaatacctattctaggtgcgtttagtgcgttcaacaatacggaacgatccctaagtagcaactcacatagattaaaaataacctagcttgttttcggctgtctcaccatggggatgagtgtttggtcgatgcactttttggccatgttagctttacgcttacctatttctgttagttatgacttaaccatcacacttatttcaatcttacccgcgatgttagccagcggctcggttttttggttaatgaggcacaaacagccaaacctatacagcataatgatagccggcttattgctaggttctggtgtgggtgctatgcaccatatcggcatgatggccatgcgtttagatgctaatatgcaccatgatatggtcttgttttatttttcaattttcttggctgttttttttgctgttgctgcgttaaaagttcagttgctagcgtcaattgaaatcaattatcaattgctgaatacaaaaaaaataaccagctccgttttgatgggcagcgcgatagccagtatgcactacaccgcgatgatggctaccgactttattgcgttagagacacctaaagaaaccatgggtttagcccataaccagcttgcttatatcgttggtttggggattttattaatactaattatttctatactgttacccattgtttctcgttacaggcaagaaatcacagaattagacaaactctctaatgaaggcaaggccagattgttattgtttattgaaaagacaccagatggcttaattcaaatcgggccagacggaagaatcttagattggcggggtcaagctgaacaaatatttggttggagtaggcaaattgcattgggtcagttggtacatgaattaatcctgcctgaagcttctcatgagcaacacctaatcgatttaaagactttttcaaagacaggtgaatggccacattcgggggaaataacagaactaaaagcgttcaataaaaaaggggaggttattgatatcgcgcttaaagttgaagtcattaacttagctggccaacgagagcttatcgggtttattaaagatattactgagcagaaaaaacatgaaaaagcgcatcatgcgttaatcaaagaaagtgattttcaacaatacttcatcgatatgcacgcgatcgttagcgcaacagacgctgacgggaacattatttatgtcaacgatcagttttgtaaaatcagtcagtactcacgtgacgagttattgggtaaaaatcatcggcttattaaatctgattatcattccaatgttttttttgaacatatgtggcgtgagattagcgaaggaaatgtttggcaagggcagataaagaacatggcgaaagatggttcgtactattgggtacaatctaccatcaccccgcaaattgacgagtcgggtaaggtgcagcgctatattgccgtgcgaacggacgtgactcagataaaggaatttgaagcagaaaaactagtcttgcatgagtatgcgcttttacgtgaaaaaatttcgcaaaccttgcaacaaccgctacccttgaacgaacgccttcagcgttcgttaatgttaattaatgatatagatggcttagtactggacaataaggtcgctgtgtttggcttgtcagacgatggcttattgattgatacggacattaacttaacgggtggttcggatgagtttatgctaaaaccagacggtgtatggtataggccctgattactcccagtctggtcaaaatgggccctcaattttcccgaccacatcgctagcactgcgtttagcttatacgtttgatacaaactattatatacaagcggccattttagacggtgtgccaggcgacttaggtaacgataatgggacgcaaattcaacttggcgataatgagggcgccctctatgcacttgaactaggctatacacaaggaggagagggtgcagccgatcgttatgctaaatgggccttgggcgcatggtattactctgaaaaatttgacgacttaatggatatagatagtaacgataatccaatcaggcgtaataataaccaaggtatatatgcactggctgaatatgagttttttcgtgagtcagatctgtctgaacaaggcgcaacagcttttgtgcgttacggcatcgcgaatgatgacgtgaaccaaattgacagctattttggttcgggtatcgtttataccggactattgccgggtcgtgatgaagaccagtttggtattgccattgcaatagcaagcaacggatctaaatacaaacaatggcaaatcagcgaaggaaatagggtggatgatcgcgaaacggcgattgaactatcgtaccgtatgcaagtattcccgtggttggctattcaaccggacctgcagtggattaaaaaccccagtatggacccatcaatcagcgacgtaacggtggtcggtgtacgtacggagattgttttttaacgacaatacgtaagataaaccttgttaaaaaagccttgatgcctaaaaagtgttaaggcttttttgtttcatacgttaaggagctaagacaaaatcggctggtcagccttgcaagataaaagcgatttatttaagtggccggtgcaaattgcatggtggtttgtccactgagccgagaacagcaaagggtaaaaagcatccggctcaaaatgattttaaaaaagattggcgtaaacaaggcccacgaagagttgatgaaacctcacttgtttagtaatcggtgattctcaggaagggttattcgacaagtacgcgcatgtgaagggctaaagaattaaacgaataagggcttttatactgctagcttgtcatttgcttaaattcaaaatatgccattgcttcagaacgtaaaggctcatctaattcttctgggctgtacgctgaggttctaagcatgacatgaccaccgtcatcgtaaagtttctttttaaaccttaagaggttttctctagtatctaaccaactttgtaattccgcacttatattcattaataacgctcctttgtttatgtcaataaccaatttagcaacacgggtgagtcatcataataattaatgtaactatttatgcgttacattgtgtaacaaataatatagcatattaatatgtcacccaagaaaacaaccacactcaacctacgtgttgaccctgccataaaagaagcggttaaagaggctgctaatcgagagcaccgtagtgtcgccaatatgattgaaatgttaattcgccagcactgtgcaaaagaaagcatcaccgttcacgaacagcaggggttgtttaaagagaatgaatgaaaaaacaataagggccttagtcgaggcaggcgcggttaaaaaagtacaaatggtagccgatggcgcaaccatacacgttgatatagtcacccaaggcggtgcgacaaccgttaccacgcttaaaggcgcaataaaaacatgggcgactatcgatgccagtgcaaggtgggttaaaaacctaggaattgggcgtattcaattggttgttgataaatggttgccggggcaaagagggttgaatctgtaggcattaaaaagcccccgctgggagggctttggtcgcttagaagcgttgcctacgaaaaatgaatttcattggtatgaaaagcaaatcgatagaccttagtcggttacactatggttgttagtatacacaaggaggtgacatgggcaagaaaatattaggattggacctagggagtaattcgctagggtgggcattgcttgaagaagttgagggtcaagtatcaagtattatcgatattggtagccgcatctttactaaggccgttgaagaaaaagtgccaacgccaaaaaatcaaaagcgacgagacatgcggcttggtcgtcgggttgtacagcgtagagcaagacgtaagcagcgcatgcttaactaccttgtttcattagatttactatcaaatgaattgcaaaggaacttccagccagaacttatcctgaatagcttaggtgatccttattacttaagagcaaaagccttagatgagcagctcactagacatgaatttgggcgaatattactgcactttgctgcgcgtcgaggttttttaagtacaaaaaaacaagtggccggtgatttgatagatgacccagatacgctttcttatctaaatcaacttgatgacaagccctcactagacaaggaagaaggtgcgtttaaagcggatattagtgagcttagaaattccattgaaacgtctggttcaagaacattaggggaatacctgtataagttagaacacggaatatgtaaacgtaatcgtagtcacgacggtggtcatcttcgtacagatagggcaatgtataaagatgaacttaatttaatttgggaaaagcaaaaacaattcttccctgatttgcccgatgactttatgaccgataataaaggtatcaagcaaattattttttaccaacggccgttaaaacttaaaaaagatagggttggaaagtgttcgttagagcttgaaaagaacagagcaccgatggcacggattgaagtgcaacgctatcgttacttacaagatataaacaatttacagtatttcgagaggcattcagaacaatggctttctattagtaaatcagacaaacaaaagctcgtagagtactttgaaaaaaacttaaagattaccgtcgcggcgctaaaaaaagaattaggtttagataagttaacaaagattaacttagagacgaaaaatctcaaaggtaacattacagcatgcgaaataaggggagtgcttggggaacgatgggatcactattcagatcaagatcaacacgctctagttgaagatttacttaccattaagaaaaaatcagcattaaaaacccggctattaaaccattggactttgagcgctagcgaggcggttaagttatgcctgcttgagtttgaaccgggacatagtaaccattcattaaaagcgattaataaactactaccgtacctcgaacaaggctatctatattctgaagctagagttaaagcgggatatgactacgaaatagtaaaaatagaaccacacgatacattgtgcgctccagataccacaagtaacccaatagtaaataaagggatgtatgagctgaaacgtgttgttaatgcggttattaaacaatacggtaagccaaacgctattcgtattgaaatggcacgtgatttagaaatgaacactaagcggtataaggaaaatgaaaaacggcagggccaaaataaaaaagccaatgaagttgcggtagacgcttataaaggtttaaagctagggcgttatccaagccgtgatgacaaaataaaatatcgcctatgggaagagcaaagtcaccgttgcgcctatagtaataaaacgattccgcttaatgccgtatttactgcagaagttgagattgaccatatcttgccctttaagaaatcactagatgactcttatatgaataaggttttatgctatacggcggaaaatcgtattaaaggagatagaacaccaatcgatgcgtggcgaggtaacgcagaaaagtggaatcaaatgactcaagccattggtaaatggaaagggttagagtctaaggtaaataggttttatcaaacggaagaagatttacaaaagcgcgactttatttcatcacaattaaacgatacgcgttatatcgctaagctcgctcaggaatatgtaaagcagctaggatgcgatgtatcggtaactaaaggctttgttgtttcacaaattcgtcatcaatgggggctaaacgacctgttaggcgagacaaacaaaaaagaacgtacggatcaccgccaccatgcgattgatgcggtagttatcgcggcgacatcacgtggtttatacaaaaaagctgtctcacaaatccaacgtaacaagctgaatatacctgtgccgtattcaaatcttcgtgaagagttacaagaacggcttaaacatacgatagtttcacacgccacccaacgtaagttatcaggggcgttacatgaagaaacgggggcaggttatatcgagcgccacggtggcttggtttatcgtaaaaacttatcacctgattttactgtaaaaaatgccgccagtattgttgattcggtagtgcaggatattgttctatcgcatttagaaaaacacgaaaatgatcccaaaaaagcctttgctgatggaaaaaccgttttacataaagatggtaaaacacccattaagcgcgtacgtgtgttgcaatcaaaaaccaccctgaaaaaactagaacaaaataaagtaggtattaaagacaaagcgggtaatgtctttaaatacatgtcctatggcaatatgcaccatgttgaaattttacagaataagcaaacaggcaagtataaaggtgaatttgtcaccatgatgcaagttagtcaccgagctaaaggtatacagagtaagttaaacccagaagggcgaaagcaacccttggttcaaacaacgcatggggatgattggcagtttgtaatggcactgcatattaatgattcagttagtgttttggctaatagcggtgaaagaatcttttatcgtgttcaaaaattcatgaaggagcaaggctacctagtactgcgattgtgtactacttcagtgttaagtgacaagagtgaagaagtgcaattaccgattcataaattaatgacagaccaaatgcttaagctacataaagttaatgccattggagttattagtgatgataaagcgaataattgatatcagtgatcaggcttaccttcatttaaaaaaccagcagttattggtagataaacaaggtgagacagtagggcaaatacctatagaggatttgggtgtattgatattgcaacaccccgctattgtgttaactcaacaagtgataatttattgtcaaaaaaacaaggtggttatcattttttgtgatgagaaacacttaccgtattccgttattttgccgatagcagaaagccatacccttcataataaaatcttaaaagaacaaaccgctgtaacagagcctatgcgtaaacgcttatggcaacaaattgttcagaaaaaaatcacggaacaagctaaaacgttagcacttttaggtaaagatagcgtgcgtatagatagattagcgtcacaagttaagtctggtgatagcagtaattgtgaagcaattgcagcaaaattgtattggtcaatattattcggagaagggtttaggcgtaatgttgatatggagggcattaatagtcttttaaattacggctattcaattattagagcaaccgttgctagaagtatttgtggtgcaggcttgcacccaacgttagggttattccataagaaccaatataacgcactgtgtttggcagatgatttgatagagccatttagaccgtgggttgacttgatggtctatcaattagcgcagcaaaatcagttagaagtgaaccaacaaacaaagcaacatttattaggcatgttaagcatgacagtttcttatgaaaataagaaaatggcgctcatggtctcaatgcactatttgatggcaagcctaaagcgctgttatcttaagcaggataaaaagattatctatccacagaggcggagcgaggttcctgtatgagctttggtggtttgcaaacgatgtggattatagttttgtttgacctaccaacggataccaaagcatcaagaaaagaatacacgcgctttagaaaatcgctattggacgatgggtttacaatgatgcagtattcggtttacatgcggcacagtagtagtgatgagaatgcccatgtgcatgcaatgcgagtaaaggcgcaactgccagatgatggggaagttcggataatcaaaattactgataagcaatttggaaaaattgatgttttttatggaaacaagcgcaaaccaatcgaaacagcacccattcagcttcaatttttttaaagctgaatggggtgtttttatctcaaaaacatacgcttatctgcgaaatagtgtaaccgactaaggtttatccgcaaatcacaacctactagcacctgtccagttatccaccaccagtgtaaccgactaaggtttatccgcaaatcacaacttaaagggtggacgattcccgaaattagcaagtgtaaccgactagggtttatccgcaaatcacaacgataggaatgtggtgatcttgtggtttacaagtgcaacggactaaagtttatcttcagatagtaaacgcgcattgacccgacattgacccgctaaaataaggcaataaaaaagacctagtccgaaacgggctaagtctttgttatccaatggtgcctggggccggaatcgaaccggcacgaccgttaagtcgagggattttaagtcccttgtgtctaccaatttcaccacccaggcattcaagttgggctacttcatgtgagcgcgaattttaccctatgattgggtcgaagacgagcgcaaattccaaaaaattataaatttcctaataatccgtgatcaacggcgaggcggacaagttcaatatcgttatcgatgcctaatttttcatgtactcggtaacgatgggtattaactgttttagggctaattgataaggcttcagcgatatcggcaattttgtggccatcaacaattttaattgtgatttgtaattcccgcgcacttaattgactaaaggcgtttttttctggctcttgtgcgctaaaaattagattggtcgctacgtcattggataggtagtttttacccttgtagacagccatgatggccttgatcatctcatcaacggggcagcccttgttgatatagccacgcgcaccggctttaagtgcttggtgtggtacggggccatcgtcgtaaacgcttaacgcaataatttttgcggacggggtgtgcctcaaaatgcgtttgatagcctctgaaccacccataccaggcatgtttaaatccatgagtatgacatcaggggtgagttttttgaccagctcaatcgcttcttcgccagacgaggcgacggcgattacctcgatgttggggtccgcatctaatagatacttgataccactacgaacgagttcatggtcgtctactgtcaacaacgcccgaaaactgagccactccatcaactgaaaagtgagccactgtgttttattttatcgggctgattaagcccgcctgtttcttttcttttaagcgataactatctcctttaatttgaatgatatgtgagtgatgcaagatgcgatctagcaatgcagatgttaatgcggtgtcattagcaaaggtttgaccccattggccaaacggtagattactggtgagtatgatggagcctttttcatagcgtttagcaatcacatcaaacagtagtttagactcactaatatcaaaaggcagatagcctatttcatcaataatgagtaattttggtgctaatacgctacgttgcatcatggacttatatttaccttgccgctgcgcggttgataattgcaagattaaatctgacgcactgataaagcgtgtttttagcccagcttgtgcggctttatagcccagtgccgttgcaatatgcgttttacctacaccggatggccccagtagtacaacattctctgcacgctctataaacgataagctagcgagctgttgcacctgatttttaggcacaccggcagcgaactcaaaatcaaagtcatctaaggttttgatcgaggggaagccggccatgcgggtaaacatcttttgtttacgtgtgtgacgctcgttgatttctgacgtcatcagcttctcaaagaaggtcaggtagtcccactcttctttagcggcttgctgcgccaaatcatgcgcatgaagccccataccttggagctttaaagcatcggttaaggtgtttaatcgttcctgtatcatcagcttgccacctgacaataatcattgtagatgctcaagtcgtggtgtatgggttggtcgtcaaagttgagcggcacaatgaccgtaccggtttgcttcatgctaatctctttgattggcgaatacggcaagggttgcagtaccttacgttcttctattaagcgcgccgcaggctgttctttagtggtgtcatgaacgcgaacattagcaatatcattcaaccattggatgcctttaatattagcggtatcaacgtccatctttaaacccgatgatgccagtttagtcgacaaaggcgcataaaaactatcacgcacataacgcaccatgcgttcaaccttacccttggtttggggccgatacggtttacacaattttgggataaagcccaactctttagcaaactgataaaatccggcatgaaaacgatgctgaccaacaccataggcattgcgctctagaaccactgttttcatattgtcgtaccagacatccgtcggaataccttgaaaatactcaaaggctaagcgatggcaatgctctaacgtctcatagcgcatgttatcggtgtaatgcacaaacagagcgcggctaaagccgagcaccgccacaaacgcatgaatgggctttttaccaccgcgcatttgtccccagtcaacttgcatctgtttacctggttcggtttcaaagcgaataacctcaggcgtcactgcgctaccgcgcaactcaaccaagtgctcacgtagccgggtgatgccgccatcgtaaccgtgttctttaatctcgcgcatcataacaacagcacttaaatgaatcggcaaagccgattcaatacgttccttaatataggctttataaggatcaagcttatggcctacattaggtcttgattgataacttggctcatcaacatcctgagataaatgtttgttaacggtgttacgggacatgccgagttgcttcgcaatagcgcgttttgaatggccttgttggtgtaatattttaatggtcatgagttcctctattgaaatcatgatgctcctcattatgaaaagcaccagtgtgagtcttatggctcacttttcaaccgttggggtggctcagttttgcattgttggtaacatctacgagtaaaactttaataatttgcgtattcatgattaattttttttaacattatcaattgattttactcgcttgactagctttatataaaacaacgataatacgcacgctttcggttttgagtttgactttgtattaattaggcctttaaaacgtcggtttaagacaagacatggcttttaggtcactgactcaatgaaatgggaagtcggttaggtttgcttttgacaaactgatcccgacgctgcccccgcaacggtatataagtaaagtgtatcaacagccactgtgtcaaaacatgggaaggcgatacatcgattaaccaacattaatcacttatgagcccggagacctgccattagcacaacggtacgttgcgggtgggcaactttgctggcgttgataattacgtttctatttcaacctcatcatacttcttctcgtggcgtcattttaattggcgcggggctgcgccttataacgaggaaacctcatgaataaaaccttattagccgcgggtattaccgctgcgctatccttaacgcaatcaatcgctgtggctgaagatgatgcaatggttgtaaccgcaactcgtacggcacaaacagcagatgcaacattgccgtcagtatctgttgtcacgaaagaagatatagataagtaccaatataaaacgctagcggaagccattggtagcctatccggagtgacaattgctaactcaggcggtctgggcaaacaaacggcgatttttttaagaggaacggagtctaaccatacccaagttcttttgaatggcgctaagttggcgaccaatgcatttggtgcgcctcaactggagcatattccacttaatcaggttgaacgtatcgaattagtccgtggcccgcaatcaggcttatatggctcaggctctattggcggaacaattcagatttttaccaaaaaaggagcaggtgaagtcacaccgtttttatctgttggctttggtacgcatgatacgaaagaaacagcctttggcgtttcaggtggcgattcgacgtcttggtataacttaagtggtggttatactgaaacaaatggcttcaacacctgtgatgggcgtagtggtactttatttattggctgttttgctactgaaccagataaagacgcatatagaaatgccaatacttctataagaatagggcatcgttttgccaatacttatgaagtagagctttttagcttatatagcgaaggcgaaagtgaatacgatggttattttaataccactgattttttacaacatacgtttggcaccaacgtaagtatagatgtgaccgatgtatggcgtattaaggccacgttgagtcaaggtaggattgagtctgataacaagggagcctttgccagtagttttgctgataaccaacaagatcatttcagcattcaaaatgatattcagttaagcgatagccatttgctaacgattggttacgattatgaagatgataaaatcgaggagtctagcggtttcagtacgacacaacgtcatagtaatgctgtttttgcccaattattgggtgagtacgcgtcaaacaattaccagttagcgctaagaactgaagaggatgaacaatttggcagtcatctaacgggtaatatggcatggggaacagcgctatcagaaaagttacgcttaagtgcgtccttcggtacggcttttgttgcgccggcacttattgatctttactacccgtatggtgcaaaccctaatcttgaccccgaacgttccaaatcttttgaattgggtttagtgggaaaacacgccgatattacttggtctgcaaatgcctatcgaacaaaaattaaagatttgatcgaattggatggttcttgggttcctcaaaatatatctcaggctcttataaaaggtattgaacttcaagcggctactaaacttgccggtattaatgttgatggtcagttttcttggatagaccctgaaaatacaagtggtggtgtcaacgatggtaacgtgttgccaagacgggcagagcaaacgtttacgttgaatgcaagtaaagcgtttggtaattttagccttgccagtaaagtatttacctcaggcaggcgttttgatgatgccgcaaatactaggcatttagcggggtatacgacgtttgatgtggtcggtgcctacaaaatcaacaaagacctaacagcgcaagtgaaggtttctaacttatttaacgaggagtatgaaactgtctctggctataatactgacggcactaatatctttttttcagtcagttaccagcctgctaactaattataaaaaacattataaaagcctaaggggaggaacgattgttcctccttttttatgctaccaaggtaatacccaagacgtgccgtgatgggagccaaatattgcatctgtaccgtagacgtcgcgtaggttttttgcagttaatacatcaatgggcgagccctcggtcacatttttcccgctctcaagtaaaacaagctgctgacaatagcgcatcgccaaatgcagttcatgcaatacgacgatgacggttttgcctttacgcgctagtgattgcagcaaggccattacatcgatttgatgccgcggatccaatgatacgatgggttcgtcggctaataaaatatcactttgagtggctaaggcgcgtgccagcatcactcgtgcgcgctcaccgccggacagctcgtttacggggcgccctactaggtggcctatatcggcctcagcgatggcttctttaaccgcttgtaggctttcatcactcacatggtgcccatcgttatgcgggtgtcgacccaataatacgacgcgctcgacaggcaacggccaatggcattcatgggtttggggtaaataggcgattttttttgctttgtttaatggcgccatgtcttggatagactgttcgccaaataatacctggcctgaggaaacagtttgtagtccagctagggcacgaagcagggtggatttacccgccccattagggccaactaagccggtcaattggccagctttaaagtcaacattaataccgctcagaatggttttttctgacagttgaacggtgatgttagcagcgcgtaagctcatgttgtccattgcctttttgattttaaaattaaatgcaaaaagaatggcgcaccgagtaaagccgttaatacaccaattttaagttcttgctgagtcggtaaaagccgtacagcaatgtcggctgccagcaataaagctgcaccgcctaatgcgctagtaagcaataagcggcccggctgaaagcccacccaaggccgtattaagtgcgggataactaaaccaataaaaccaatacctccgctaactgaaacggctgagccaaccgctaaagcgacgcctaagataacccgtttatttaatgactgtagttgtataccgagtgattgagctgtctcttcaccgagtgacagcgcatctaaatcacgccgtgtgcttaacattagccaccagcctaagagcgtaggcggtaaaatcaaccaaacatgggtaaagcttctatcagccaaggagcccattaaccaaaaaaagatttctaacgaggcgtaagggttgggtgatagattcagcgccaatgcggttaaagcggcggctaagctgctaatcgccacaccggctaaaattaaggtgagcatgctgctgtttttcccactgagtaggtatagaaaaacaacggccaatagagccccaataatcccgccaatgggtaaggccatggggaaagccgaggctaaaccaaaatagaaaacaaccaccgcgcccaaagcagcactgcttgatacaccaataatgcctggttcggctaatgggttgcgaaccatcccttgtagtgcggcaccggacagccccagagacgcgcctattaatagcgctaatagggtgcgcggtaagcgtatctcttcaaaaataatagaatccaaagtaggatttgaattaactataccttgtaaactattgattaaatttatattaatatcgccaacggtaagtgaataagcacttaatataatcagtgcacttaaaagaaaaacccgtacaacggtttcttgccggttagactttaaggcatccatatcagtgcgaaacagcggttaaattatgttgtaaatactcggcagcggttaagcttgaaggacctgcgcagctccagtagcgatcgggaatcatgattttttgtacctgtttaagtgaggcatagcgacgaatcgcttcgtgtcgtaatacttggtgtgccaacgagtcggtattctcctttagctggccaagtataaggatatctggtttagaccctattagcgattcaagtgataaaggggcgacgtaatccaacgctaattctgccgcaatattactgagccctgcgaggtctaaaatttcattcacaatggtctgtcgcccagcgctataaccattcgcataataaacaacagcgcgcaaaggcctttgctggcgatgctttatcaactgctggcgggtagcctccattgatgtaattaattgctcggcacgctcttgttcacccagctgctcacctaaaaaactgatttgcgcaaaaatctcatcgatagtaacaggcaagccgattttgaccaccttgtaacccagttgttcgagtagttgattagtcggttgggcggtaaattcaccggcaacaaccaagtcggggtctagcgccattaattcttcaattcgattattgtgctggttaaaatcattggcgcgttggtacaagaaagaagccccagggtctgctgctaacgaggtaataccaaccagtcgatctggcggtaacaagctcatcagtaattggtcggcacacaaatttaatgaaacaatacgttgtggtttaggtgatgcgctgacactgaacgagcaagcgtaaaaaaatataagtattaatgaaaatcgttgtggtgtcatttaagtgattataagcgtatttaaacgttaataaggcctacataacttaaatttgtatgggtttaaacttttgcgacaaggatgatgcggggcttcatggagggtttccaaataagggcaactgtgaacataaacgcttttagttaatagtagggctggtttatagtaaagaaaaatactttttcaacaattaacgtaacggtctgtaattatgaaactcttaaatgttggtgctcaaggccatgaaacggcggccatactggacaaagacggtattattcgatcgcttgacggtgtatgcgagcctatttcggcgtcctttttggcgactgatggtctgcagcgtctatctaaaataaacttggctgacttgccaattattgatccctccatacgcttaggtgcgccgctactgaacccaggtaaaataatagcggtcggtttgaattacgatgaacacatcaaagaaaccggctcaacacagcaacaagaaccggtgctctttactaaggcggtcagtgccttaagtggcccgtttgatgcgattgaacgacctaaaaacgcgactcaggttgattgggaaattgagctggtggttattatcggtaaaaccgccaaatacatcactgaagatcaggttgaagcgcatatcgcagggttttgtaccggtatagatgtttctgaacgctactttcaaaaacaccgtag

SEQ ID NO: 670 - DNA, 23075 bp, synthetic construct
  misc_feature 1..23075: note = Synthetic
  source 1..23075: mol_type = other DNA
atggacatatcacccccttctccttttgaccttatccaatacaaacgtggttccagtgtagaagacctgaatcacttgatcgaaaaggaaaaggcagccggagacatctggattgccaaaagtgatcgctttattgaaaaggacatcatcaatatcggatcaggcccgccagccttctgcataacctttttctttgatggaaaaggacacttctccatgaaaaacggactgccgattgccattgaagccaatactatctttctctattgctcgccaaatacttgcgaaggaacagatcatctttgcaaaaacaccaagttacattgccttcacctgcgctttccatccaaccaatcaaccgacttcacccggtttatcgcccatttactctcgcctgccctcaaagccaatgccagcactcaagacgcctttttggcatccatccccatgaatggtgtcctaaaaaacatcgccatggacatattcaattgcgacctgcctcaaggcatagctcgccaactgttcctgcaagcaaaatccttggaaagcctgtctttattaatggcatttctggaagaaaacctcagttacgaccagccattaagccaatccgacaaaaaacgcgtctaccaagctgccaaacttatagataaaacctttcatcactcttggacaattgctgaactgtcaaaaaaagtcggcttgaacgaaaaaaaactcaaacaaggcttcagaacgctcattcacaccacaatacatgactacttggaaaaaactcggctcctcgccgccaaagaaatgttgcgtaacggcgtgaaagtgacggacaccgcgctggcaacaggctactcaaacccaagtcacttcacgaaatattttaagaaacggtttcacctttcgccgcgagaatgggcaaaacacaaccaaaaagcgctaccctgaacctgtttgaacaaaatctgccaggttgggtactagcgtaactcacctattagtcgtcagaccatttgaaagcataggcaccgataacgataaacaccaacgtcatcaaactcaataccagtatgggttgcgttaaatctgccagccctgcgccatcgatagttatagcacgaaccgcatctaacatatgggtgagtggaaagagctgtgccaggtatttcaatggtggataagcaccttccaatgaaaaccacacaccggacaatagcatcattggccaactgaccatattgagcaacccgcctgccagctcttccgaactcaccctcgccgtcaccatcagactcatggcaatcatcgacaaactgccaagaatggtcaccaacagcaacagccaataactaccgttcatggcaaagcctaaaatccacttggaaatcatgaaaatcaccaccgccaaaaagaccacgatgaacaatctcgaaaccagctgcgccaaaataaattcaacgggtctcaaaggcgttgcattgagtcgttttaaataaccacttttccggtaacggactatgacaaaccctacaccaaacaaggcaccgaacataatgttcatgccaatcacgcctggaatcacccagtcgatataacggattggatgattttcagtgtcatgacgtttgagattagggtccacttgcttcagcaacttttccataaaatagccattcggcgaatcgatattcacccaatagccctgctcggcactagccgttgatggattaaggttaatcaacaaatccgtttggtgacgtgccaccttatctatcgctctctgcaagttgtccgtggtgtagaaatgcacatgctctaaaccaaaaatcggattcaactttgccgtcatctctgccgaaggttgatacaccgccaccttaaacaggggcttgttgtcgccataaaaagccagtgccaaagcaaacaccaaaaagaatggcatcgccacgctccagcccaaggatgccctgtctcggaagaactccagattacgggcatgaatcaacgttctaattcgactaaacatgaaccttctcctctgtgtctttgttagtcaactcaaggaacaagtcatccaaggtacgtgagcggattttcaaatgggtcaaatcaataccactatcgatcaaacctcgcagggcttggttcatatccttagtgtagatttcggtcttttcacctttatggaagtgtgtctcctttggctgatatgcgccaagtgccgcagtcggtaattcaagaatattgtcaccgaagtgctgcgccaacaaagtgtctggtgtgccgcgagcaatcaacttaccctttgccataattgcaatctcgtcgcacagcaaataagcttcctccatgtaatgcgtggtgaggataatggttttattgcctgccttgattttctgaatcaacgcccaaaattgtcgccgcgcattagggtcaagccctgttgtcggttcatccaaaaaaatcacttccgggtcatgaaccaatgccaaagccaataacagtctttgacgttggccacccgaaagcttggaggcatcctgctctaaaaagctcgacaaatcacagtcggcaatcaaatcctgcaagtctgcatgtcggtcataaaaactgcggaacaacgtcaggttatccgacacactgagaaaatcctgcaaagccgtgctttgaaactgaataccggcgaccttcttgaaatctgaattcatgggaacgccgttaaacagaatctcacctgaagtcggctttttcaagccctcaatcatttcaatagtcgtcgatttgcctgcaccgttaggtcccagcaatccgaaacaacatcctttctctatggcgaaatcaatcccatctaccgcgatgagtttggggtattcttttcgcaaggccttcacttcaattatggcagtcaaaataagcccatcctgtaaaaaagtatttaaatcaataacagggatattagcacaaaaaaacccgctcagccattaccagctggcgggttttctgctttataaaaccgtatcaggttttattcggcaatcgcctgttttttctcatgtgctttgatgttaaccaacatggcaattgaaatcaccaaggccaccacaaagaaaccggaaaacacataaagcgtctctgcataagagcccgttaaatcttttacacgggaaataatcaacggtccaaccagtccagcggcagcccatgcagtcaagatataaccatgaatcgcgcccaattctttggtaccgaaaatgtcaccgatatacgcaggaatagaagcaaaccctccgccgtagcaggacatgatgaaatacaaaatcacttggaaaatcaaaatctcagtgattgaaggcaatacataaaatgccactgcttgcgttgcgaagaaaataatgtaaaccactggtctggtcagataatccgacaaagatgcccagaaaattctacccgcaccattgaaaatccccatcaaaccaaccgctgccgccgcaaccaatgcagaaaccccaagtacttcctgcaacagaggcgatgctaccccgataatggcgataccgcaggtgacgttgatgaataacatcagccacaaaccatagaatcttggcgttttcaccgcttcatgtacgcctagcatcgccaagtcggttttcagtgttttatgaccggcttccactttcttcttgaagccttcaggcaaatacccttcttccggtttttccaaatacattgccgaggcaaacatcaccacaaaatagacggcacccaaaataataaatgtcgatgcaatgcccacttcagaaatcaacactttaatcgttggcccccaaatcgcggaggcaaatccaaagcccataatcgccaaaccggtcgccaaaccgcgcttatccgggaaccatttcaccagtgtggaaacaggcgagatgtagccaatccctaaaccgcatccccccaagacgccgtagaaaaagtacagcaacaacttggattccatcaaaattgccaaaccggagccagccgttcccaagccgaacaacaccgcggcgatgattgccgaaacttttggtccatttttttcaacgaacttgcccatcaaagcggcagacaaccccaagaagaaaatcgcgatactaaacgcaatggtgacatcagtcagcgtccaatgcatggtgtccttgatcgggttaacgtacacactccaggcatacaccgacccaatacagatatgaacgcccacggcggctaaggccatcagccatctatttttattcattacacaaactcctttgactcattttaggtgaggactcaaagctcacccgctcctcttttttaaatattgtttttcttagaataggaaaactttggcgaagtctaatcaaaaacagctcaaacataaagcgggaatatttaatcctgtcatagaacgcgtattttgggcataaaaaaacccgctaagccagtcaggcttgcgggttaaatgcattaaacaactaaaaacttagacaaaaacgacgaaaaactgacccgagctaggcgggagagcactggtcatagactcactattgccaagttctcccaacaacgcactggcggattaaccggcagataaaaacgaggaaaaactcgccagggctaggcgggagagcgcaggccatagactcactattgccaagttctcccaacaacgcaccggcgggttttaaccgttttttagtgaaagtctataacaccatccgttaatccgatatggattgtgtcgcctggtgcaaactcgcctttcaacaagcgttgtgccaatgggttttccaccatttgctgtacagaacgtttcaaaggccttgcgccatatactggatcgaaaccggcttcgccaatcaaatccaagacattttccgccacttcaagctgcaaatcgttgtctgccaaacggcgacgcaaatggttcagctgaatattggcaatcgaacgaatctgagcctggttcaacggatggaacaccacgatatcatcgatacggttgatgaactcaggacggaaatgaccaccgaccacttccatgacatcctgcttcatctcttcgtaagtggctgtcgccgctttttcctgaatgatatgtgaacccaagttcgaggtcatgacaatcaccgtgttcttgaagtccaccgtgcgcccctgaccatcggtcaaacgcccatcatccaacacctgcaacaagatattgaagacatcaggatgcgctttttccacctcatccaacaaaatcacggagtaaggtttgcggcgaaccgcttcagtcaaatagcccccttgctcatagccgacataccctggaggtgcaccaatcaaacgcgcaacagaatgtttctccatgaactcagacatatccaagcgcacaatggcatcctgcgtatcgaataggaaatccgccaaggctttggtcaactcggttttaccaacccctgttggcccaaggaacaggaaagaaccattcgggcgattcggatcagacaacccggcacgcgaacgacgaatggcatccgacaccgctttaagcgcttcttgctgtccaatgactttggcaccaatcgcttcttccatgcgcaacaacttgtcgcgctcaccttccaacatacgggaaaccggaatacccgtccaacgggcaaccacctcggcgatttcttcttctgttactttgttacgcaacagatgcatttcgccatcggcattttcattttccgccgcttcggcagcctgaattttggcttccaagtcaggaatcacgccatattgcaactcggacattttcgccaagtttccttcacgacgtgccgcttccatatcgatacgtgctctgtccaattcttctttgaactgtttcgcaccttgcaaggcggccttgtcttttttccagatttcttctaaatccgcgtactctttttccatttcggaaatacgctcgttcagctcaaccaaacgttttttggtcgcttcatctttctcttttttcaaggcttcacgttcgattttcaattgaatcagacgacgatcaagcctatccatctcttccggcttggagtcgatttccatacgaatacgcgatgccgcctcgtcaatcaaatcgattgccttatccggcaactgacgatccgtgatataacgctgagacaaatgcgccgctgcgataatcgcagggtcactaatcgccaccccatggtgcacttcataacgctctttcagaccacgcaaaatggcaatggtatcttcttccgtcggctcatccaccagcactttttggaaacgacgctccaatgcggcatctttctcgatattttcacggtactcgtccaaagtggtcgctccgatacagtgaagttcaccacgcgccaacgcaggtttcaacatgttaccggcatccattgaaccttcggtttttccggcaccgaccatggtgtgaatttcgtcgataaacagaatgaccgagccttcttgtttttccaagtctttcaacagggctttcaaacgttcttcaaattcaccgcggtatttggcgcccgccagtaagcctgctaagtccagagacagcagacgtttgtttttaagcccttctggcacttctccgttaacaatacgttgtgccaagccttcgacaatcgcggtcttacctactccaggctcaccgattagcaccgggttgtttttggtacggcgttgtagcacttgaatggcacgacggatttcatcatcacgtccaataacaggatctaacttgccggcttccgcacgtgccgttaaatccaaggtatatttatccaacgcctgtctgttttcttctgcattttgatcttgcacgctctcgcctcctcttacctgctgaatagccgcttcgatattttgttctgtggcacccgcttgttttaaaacctctttcaccgcatcgttagactgcagtgctgccagatagaacagttcactggcaatataagtgtcgccctttttctgcgccagctgatccattaggttgagcacacgtcccgcgttttgcgacaattggacatcgccgccagtaccggaaaccttcggtaaacctgctactttttgctcaaccgttgtttttagttgtgcaacatttatccctgctaactgaagcaaatgacctggctcttgtaacaaagctgccaaaatatgcatcggttcgataaattgttgcccacctctcaccgcaagcgattgcgcttgtgacaagatcgactgaaaatgtgaggtaaacttatcaatcatgaaaaactcctacaaaatatatggtttgttacttcaactaatatgggtgttttttttgttttaaagtctccccctagaaaaaatatttcttgttgtaatatcaaatgtttatttccttgaagcaaatcaacaaattatgtcgagttttgtacacacggcaatattgttaagtttataatggggagcaaattgatacgaaatggcaccttatttctaattttgtttggcgcttaaaaacgctgttaaccgaggaaggcatggaagaaattacggcagataaattgcctcaattggacgtgctatttgaatatgtcgctgatggcgtctatttgattgaccctgaaacatcaaatatcgtttggtgcaataaagcagcccatcaggagcttggctttgagcgcgatgaagtgctccaccactcggttctaagccttcaaaaagacatggccggcatgcctcaatggcaggaaatcgctcaagtcattcgtaatcaatccccatacacttttatcggcagacatgtccataaatccggcggcgaaatctcggtagaggttgtcaccacacactttgagttcaacaatgaagactatttcctttccgttgctagaaatgtaaacaaacgtgtcacgatcgaacaggaaatcatcacccacaaccaaagcatctggtttgcattgaatgaagccagtgatggtatttgggaatgggagatctgcactggtaaagtctttttcagtcaacaattgaaaaccctactcggttacgggccagatgaaatggatccgcatatcacgacttggtctgaaaacgtccacccggatgacagaacgcatgtcatcaaagtcctcaacgaacatattcatggcttgcgcgcgaaatacgatgccgaataccgcttacaaaaccgcaatgggcattacatatgggtacacgaccgcggcaaggtatacagacgtgatgaacaaggcaacccaactcatgccgtgggtatggtacaaaacattaccgaccagaaattcatgcaattccaattagaagcgctggcggcaaatgatgtcctcaccaacctaccaaatcgccgtgagggggaaaaacaggcaagattgcaagtcgccttaagcaaacgcaaccaacaaccactttgcttggcaatcatcgacttggatcacttcaaaagcatcaatgacctgttcggacaccaaaaaggagacgatgtactcgttttcgtgtctgaacgttttcaaaagacattacgctcaaccgatttgatttaccgttggggaggtgaggaattcgttattattttcccaaacaccaccgtcgagcaggcaaaacaaatctccacaaagctgcacgcaagttttcaggcggcagcatgggaagacattggcgtcacccccatgacgtttagtatgggaatttcctgtcttccatgtttaaacgcggattttgatgtcttaataaagagcgcggatactgctgtttaccttgcaaaagagcaaggacggaatcaaaccgttttcgctgaaaaaagctaattttcactttcataggagctgacctttggatcaagctttcttcgtactttcaaagctggcgtgggcatttttaagcccaggaaaccttatcattttcggctttattctcggtactttgctactggtgatgggatttcggtctctggcaaaacgactattggtcattgatgccattattgcttttatcgtactgggttaccccgttggggattatctcattcgcccgttggaaaaacgctttcccgtcccgaccatcgctgaacttcccaaaaatattgacggcattattgtgctgggcggcggagaagatttaccgcgaaccttaagttggcatcatcctgaagtgggcaatggtgcagaccgttattttggtacaaaactgctagccgaccactatccaaatgcccctgtcatatttaccggcggtagcggtcaaatcaaactacagcatatgggaaccgaagcttctctcgctaagcagttactgaccatcatggggatttctccaaaaagactgattattgaacccaactccagaaacacctacgaaaacttcaaatacaccaaacaactcttaccgaaacctgatggcacctatttattggtaacttccgcctttcatatgcctcgcgctgtcggtattgcacgaaaatttggtctccatgtcatcccctacccggttgatttccgctctaatagcgctagcatccgtagctgggacttcgatttttttgatcaccttaaaactttagaacctgcctggcgtgaatggattggtttaaccgtctattacctcacgggaaaaacttctgcttggctaccaaatacgcagcaaggtgattagctaaaatctgccaggttggtgctatgacgcctcccccaacctggcaaattttcatcactcatctggcgttttagggtaaatgaaaaattgcttaaagaccgggcttccgtaaaatagcttagagcagaatggaatcaaagaactcgccgctcaaaaagagtagaggtggggcataaacgaaaacgcgcccaatgtgagcgcgtgaggttgccataaaaggcaagtgcctgcgaaagtaaactttcttggtatgaaaagcaaaactaattcaggctctagtcggttacaagactgttctggattataagcgaataacgaaaataaaaacaagcatgaggatggtatgaagacaactctggcattagacttgggaaccaactctattggttgggctttactggaatccgattcacaaggtgacccaaccaagctcattgacgctggtagtcgtatatttatcaaagcagttgaagacaaaacccccacccctaaaaatgttgctcgaagaaatgctcgccttgcaagacgcctgattcaacgcagagccagacggcgaaagaaattacttaacctactcattgaacaccatcttttacccacacaagccaacctagattctcaatcccgtgagcaagaactcaacttaattggcgatccatatcaactccgagccaaagctttagacactacactaacacatcatgaattgggtcgcgttttatatcatctttcagctcgtagagggtttttgagcaaccgtaaaatttttatgggcgatttgctggatgacccggatgcccaagatttactacccgaattagatcaatccgacgatgctgaagaaaccgccttcaaaaaagacatttcggaactccgaaatcaaatcaaaaaatccggcgccagaacgcttggcgaatatttatcacaaagaccggaacaccagtgcaaacgtaaccgccagcaccaaggcggactgctacgtaccgatagaaaaatgtaccaagaagaatttgagctggttcaatccatacaaaaacaacactttgatttgagtgatgatttttggtctaaagtagagcatattttatttttccaacgtcctttaaaactcaaaaaagggcgtatcggtaaatgttcactggagcccaatcgataccgatgtgctaaagcacgcttagagttccaacagtttcgctactggcaagacatcaatcacttaacctactttgaaccctacacccaaagcgatgtttcactctcaatggaacaaaaacaaaagcttgccgatacactggaaaccaaaaccagactgacttggccgcaagcgcgtaaattattggggctggaaaaaagttatctttttaatctagaaaaatccggcaccaaagacctggttggcaaccgcacagggtacgccattcagcaaattattggtgacacttggcaacagttatcggaacaacagcaaagacaactgattgaagacttgctcaccattaaaaagaaaaccacactcaaaaaccgtctagtgaattattggagattaccccttcaacaggccatttacctagcctcagaagagtttgaaccagggcatagcgatctaagcctaaaagccatcaacaaactgctgccctttttaaaacaagggcatatctattctgatgccagaattgcagcaggttatggctatgaaacaaaagagataactgtatttgacaaactgccagcaccgccaaacctacgcaaccctattgtcaacaaagggcttcatgaagcccgcaagttgataaatgccatcatcgccacttatggcaaaccagacattattcgcatagaaatggcaagagatcttaccctatctaacaaagacaagacaagggtgaataaagtcaaccgagacaatctgcaaaaaaacaaagaagccgaagagcaatatgacattactcgacaatcctcccctcaccttggtttaagaaaatacccatctaaagacgacaaacttcgttatcgcctttggaaagaacaaggatgccgttgcccttacagcctaaaaagcatcagtcttcaacaagtgttttccgcagaaaccgaaatcgaccatattctgccttactcacaatcacttgacgacagctatatgaacaaagtgctatgctttaccgacaccaatcgcgaaaaaggcaatcgccccccctatggagcttgggcgagtcaacccatcaaatgggaacaacttgtcgccaatatgcttgcgatagataaagaaaacaaacatgccatcactgccaagaaaaatcgtttcctcacaaaaaccactgatgaaatcgaaggcatgatcagctcacaacttaacgacacccgctaccttagccgtgaagttttccactatgttaaacaactgggttgcagagttgaggtcagcaaaggcatcctcaccgccaagctgcgacatatgtggggactcaaccacttacttggctcaaaagacgaccacaaagaacgtaaagaccatcgtcaccataccattgatgccattgtcacggcattggtcgatcacaaactttaccgaacccttgtctcactcgccaaagaagtcgaaaaacaccaaaagctagagtggagagacctgcacctggactcgcctttagataatattcaacaacaaacccagcatattctagacgagatgattgtctctcatgacgtacgcaacaaactctacgacgcacttcacgaggacacaggttcagggtttattgaaggcattggcaccgtttatcggaaagcattaaatgaggaaaatttcaaaaccgaaaaacaaatcgacagcattatcgaccccgttattaaagacacggtgctagcccactttaacgcacacaaccaaaacgccaaacaagcttttgcaccggacaaccctgttttccatcccaatggcaaccgcatctaccgcattagagtacagcgctcaaaagccacacgcgaacaagtcgaacaaaaccaatacgccgccaaggaccgttttggcaaaacgtttaaatatatcccttatggcaatatgcaccatgtcgccatctatcaacaagagaatggcaagatcaaagccactgtcacgccgatgtttaaacaggctgaaaaagtgcgacttcacaagataacaggtagcgacacagacaacctcatcatgacgctagccattaatgatatggttgaacttactattgatgaaactcttcaaatataccgagtgcaaaaacttgaacgagacaaatcctccgcagcattaactctaaggttacacactgacgccactaccgaaaaaaataactcggttattagaaaagccgtaccaacactcatcaaagactatcaaatgcaaaaagtaagcattaatcgtctagggaaacgcttatgattaagcgaacgctttttatcggcgaccccacctatttgcacttacagcaaaaacaactggtgctggaaagagacaaagaaattattgccagtattcccatcgaagacataggctttgtcgtcatagatcacccgcaaattttactcacccaaggcattatcaatgccttggcacaaaataaagtcgcgctcattaccaccgaccaaaaacacctacccacagggcttcatctccctctttcaggtcacagcctgcacagcaaaatcattgatgcccaagccaacttttccgaagccagaaagggcaaactctggaagctggtcgtcaaaagaaaaatacaagaacaaatcaccagtctagaacttgaaaacaaacccactcaggctctgacaagattggttgaaaaagtcaaaaacggtgatcccaccaatatcgaagcacaagccgcacaatactactggaaacacatctttcaagccccattcaaacgtgaccctgatggtgaagaaatcaacgctctgctcaactacggctatgccattgcccgcgctgccaccgcgcgcgccttggtcggcaccgggctacatccttcactcggcatcaaccaccaaaaccaatataacgcctattgcttggcagacgacttaatggaacccttacgcccctgggtcgatacgcaagtcgtgaattggataaagtcattaccaacagacgaaacgccacatccaacccaagcctttaaagccgatattctctcctttctaaatcaaaactgcctttcccaaaacaaaaaatcaccttttatcaatgccttatctacctatgccaacagcattaaggaacacatattgcttggcaatactcacgacccgatttttcctgaacgcatcctataaatcataattttcaggaggcacgatatggtgtttggaggactggatagtatgtggatagtcgttatgtttgatttaccaaccgataccaaagcggcacggcgtgcctacactcagtttagaaagcaactgatcacagatgggtttataatgatgcaatattcagtctatgccagacactgcggcactgatgaaaatgcacaagtgcatatcaatagaaccaaaggcgcattgcctgacgatggcgaggtcagaatactcacccttaccgacaaacagttttcaaaagtacaaactttttatggaaaaattcgcaaacccactgaaaaagcgccagaacaactccagtttttctgagctgaaaacaccacttttcttaactttttcagtaggttgcaaatccaatattgtaaccgactagagccgaactgctaatcacaactattagttgaaggccccaaatttttcctttattgtaaccgactagagccgaactgctaatcacaactctccggcagttggcgtgggcaagtatccaattgtaaccgactagagccgaactgctaatcacaactctccaagccctgctttagataaggaaagcattgtaaccgactagagccgaactgctaatcacaacatgaagcgagttcaatcttacttatgttcaattgtaaccgactagagccgaactgctaatcacaactagaatgctcgataccaataaaaaccgtcaattgtaaccgactagagccgaactgctaatcacaactgtatggctttggctatgtatgaagttttattgtaaccgactagagccgaactgctaatcacaacatattggaaagcgtaaaagcaatgggaaaaattgtaaccgactagagccgaactgctaatcacaactgtttctgcagtgacttcgtattcaacaccattgtaaccgactagagccgaactgctaatcacaaccatatcagtgcgcgcctgatcagataatggattgtaaccgactagagccgaactgctaatcacaactcttaaatgctctgaatctaagtgagcataattgtaaccgactagagccgaactgctaatcacaacttcgatggccttcacatggagaccaaagatattgtaaccgactagagccgaactgctaatcacaaccttccctgatgctggaaatgtaaccgtttaattgtaaccgactagagccgaactgctaatcacaactgaaagaaatctattgttgtttagctaggcattgtaaccgactagagccgaactgctaatcacaaccttcaagttgaccaagaatcaatgcgccacattgtaaccgactagagccgaactgctaatcacaacaatcatgtcgtagattgcaaaacctgtcgcattgtaaccgactagagccgaactgctaatcacaaccttcaagttgaccaagaatcaatgcgccacattgtaaccgactagagccgaactgctaatcacaacccaataaggaggatccgcatagaaaaaagtattgtaaccgactagagccgaattactaatcacaactttattgtggtcaagtaaatttggccactcaatatgatgaatacttttctcaggatgatagatgattttctataaggctagatgaatcatagaactctcggcttataaataaatgtgcaagcgatggagtggttcgcaataagtgttccaagatagaaacttagttcttatccggttcgattctggcaccacttgccttaactttatgagaaagctgaaatgtgtaaattattttttgggttaatggatagccttttagcatggttggctattttgccttaacggagatcttacatgtgaccgcactgggtaatgtttctgttggcgacatgattatgtttcacgattgtgaaatggtggaaagcaccgcaaacggactaaaatctgccaggttggggttgttgcgcttgctataagcaaagcgttttagggttacgctttgcgtaccactccatgtagaagtcaataaacacccgggttttcttggataagtaccggttcggtaaatacatcaggtagatgtcggtatcagcggaagcatattcatctagagctgtttccagccgccccgccttaacttcctgcaagatagcaatggaagtcaagcgaatcactcctaatcctccaactgcggcttcgcgaagtgcttctggaccattgactacgaaatttcctttcactctgactcgctcttccctttccttgctattaaaaacccactcgctgttgctagacaaagaaccatatagaatgcagttgtgactttctaagtctgctggtttgagcggttttccatgcttacgccagtactcgggagaagcacagatcagtttgcgggtggaggtcaaacgtttggcgaccaagttgggctgagggtcatcggtttgacgtactgccaaatcaaatccatcttcagccaaatcgataatgcgatcactcagcaccatttcaacactaacttccggataacgttctaagaattcgggaattgccggcgctatttgatttgagccgaaactgaacggtgccgtaatccgcaataagccccgaggcgcttcatttaaacgcgctacagccatttccgccattttggcttcttcaatcaatctgacacaatgctgataaagtgccgaacccgcttcggtcaggctgagcttgcgggtagttctatgcaacaagcgggtgccaagttcatgctcaagtgatgccacccgcttactaactaccggcgtggacagccctaagtctcgtgcagcggcagtaaaactccccgcctcaacaacacgcgcaaaggcgaccatggcaatcaacgaaggtaaggtcttatctttattactaaacatatagaaacaatattattcaatttacctagattataaaaaaattggaaacatttacaatagcaacctgaacgatacatatttacgacggagtgtctattatgaaccaatctaactacctgatcggcctgggattactgattactgcccctgtgatttggggcggtatgttcccggtcgcagaactgatactgccctcggttgacggcattacgaccactgcgattcgctatggcttaggcgcattgatgctactggtgattcttgcttttctagaggggaacaacgcgctaaaacttgaggaaaatacactcaagctatggctatacggcaccattggctttgctggattcaatatccttgcctttgttggtctgggcttttcgcaaccggaacatgccgctattatcatggcaatgatgccaatgattaccgtcctgattacctggttaaaaagcggaaagcgacctgctggatttaccttaatgacggtagcgattgcttttagcggagtattcctagtggtcaccaacggcaaccccgccaaagctttacaaaatggcgaagcatccggcgacctgatgttactaaccggtgcactttgctgggtcatctacactttaggagccagccagttcccaagctggtcggcactgcgttacaccaccttaagctgtgctttggggacgctatccattttagcgataacactggcattaataccggtaggcattacgcaaattccttccataaatgtggtttctaatctaggctgggaatttgcctatctgatcattctaggcgcggtgattgccgtcttaagctggaatgcggggattaaagctgtcggcccggtaaacggtgtgctgtttatcaatctagtgccgattaccgcttttaccgttggcgtattacaaggtcacagctttacgcactatgaagtcattggcgccctgctggtcatcagtgcattgattgccaacaacctttttatccgccgccaactatcggtttcgaaagcctagaaaataaaaaatctgccaggttggggttaggtacagataccccaacctggcagattttatgagaaatcagtgctggtaggctttgtgcgaaagatacagcgccaaggcaaccagcataattgccaaggagtaataaagcaactcaagtggtgccgttggtttcaggaacaatgcctgttcaaagaacatcaccaccaaaatcatcagaatcactttcgccagcttgtctttcagatcatccaaagaatgaatcattaaaatcttactggacgttttattgccttccgctgcgtcaatttttgagataaacaactcatatagacccaaagagaaaatcagcataatggttcccaacaggaagccatctaccgaaccgaccacatgggcaacggtcttcgctttcaaatctgctctggcagcatcatctaactgtgcataatgactcagatgcgacaaggtatagtaaacatcaattgaggtcacataaaaaataccaaatgccatcagcaaactggcaacaaccgcgaacaagacaatgaaccggctgttccacaaaaacgattcaaaccagtcttccgctcttgaacggttggcaggtacgcaaatcaactcttcacttggctgcgctgaatcttgctttggatgttccattctaatccccttagtgctgagcttatttagatagctcttcaattgttaagttatggttggtgtaaatgcataaatcggcggcaatattgagtgatttctcaacaatatcacgcgcacttaattctgtgttttccatcagggcttgtgccgcagagtgggcatagttaccgccagaaccgatggcaataaaatcatgtgccggttcgataacatctcccgtaccggaaatcagcaacatgttttcttcatccgccaccagcatcatcgcttcaagcttgcgtaacgcacgatcggtacgccagtctttcgccatctcaacggccgcacgcatcaattgtccattatggctttgcaatttgccttcgaagcgttcaaacagggtaaaagcatcagccgtggcacccgcaaaccccgccagtatcttgccattgtgaagacgacgaaccttacgagcgttgcctttcatcacaacatgtcctaaggtgacttgaccatcaccgccgataaccattttgcctgcacgtttggcacataaaatcgtggttccgtgaaaagtttgttcactcatgtttttctcacaatattcattcgattgtttattcggtctgtccgcgcttttttgctcgcggatgcgccgtatcgtaaacttttgccaggtgctgcaaatccaacttggtgtagatttgcgttgtcgacaaattggcgtgccctagcaagtcctgtacggctcttaaatctccgctagattctaacacatgcgttgcacaggcatggcgcaatctatgaggggacattttggtcggcaaccccgcctgtaaagtgcgttgatccaagtgttgctggatacttctgacactcaacctattgccaaatttattaacgaaaaccgcttgttcatcgctcttggcatgctcacctcgaatcgacaaccagcgttgcaatgccgcaatcgctttgccgccaagaggcgagattctttctttgctgccttttcccaaaacttttacccagccctcattcatctgatccaatccgggggacaagtccaagtccgccagctcggaaacacgcaatcctgcggaatacagacactcgaacatcgcctgatctcgaatgtcttgccaagtctttaaaggttgttcaagcagttgttgggttaaatcaatatcgagacttttgggtaaaggcttgggctgtttaggcgctttgacacttttcgccgggttggcgaatgcccaattatgttcaatgagaaattgataaaaagttcgcaaagccgataggtttcgtgacagtgttcgaggatgaataccggcttccattctgctggcgacaaacgcctgaatggcttccaccgacactgactgccagccgtgaaagtcatcgagaaattgccgataatcatgcaaagcattttcaatttcttccgcaagaaaatccccttgaaagaaacgcaaaaaagcgaccatatcccgctcgtaattcgctatcgtttccggtgaacggttaaggcgcgttaactccgcgacaaactcgctgaattgttttttgctcatctagacggtcattctcgaaaaaacattaagactattttaatgcaattattgccgcaaaaacgcgataattacgccactgtattttcaacactactcaggagattttatgacatctgcttcaacttccgtttcagacgccatcagacaacgccactcggtacgcgcgtttttaccaacctctgttgaagaaaaacttattcatgacattctggatgatgcgcgtttcgcaccttccggcgtcaatacccaaccatggcaagtcgcggtggtttcaggcgaaaccaaaacccaactacaaaacaaaatggtggcggcattcgaggctggcgaaaccggacaaatggactatcaatactatccgaaaaattgggtcgcacctttcaagcaaagacgtgtgacaacgggagtggctctttataacgccttaaagatagaacgcgaagacaaagctgcaagacttgcacaatgggctgcaaactatcgctcttttgacgcgccggtgagtttgttcttctttatggaccccagcttggaaactggatcttatttcgactatggtatgttcgcgcagaacattatgctactggcagttgaaaagggattggcgacttgtccacaaggcgctctgggagagtatcctaccatcatcaagcagcatcttggttatgacaatgacatgatcttactgggtgggatggcactcggctatgaagataaagaacatccggtcaacagttaccgaacagagcgcgaagcggtgaatgacttcacccgcttctttgattagcgttaaaacaaacgctgtaagcgctgggtaatcatctcccccatgacttccaaaaagtaagtcccaaggtccggtttgaaacgatcaaccgggcttcccagcgccaacacgccccaaatgcgatggttaccaagtggaatcacgcaaaccgattccattttttcagaggtagcgaacaaacctttttgccactcgttttctactaaaccacaagcaggacgcccgactcttaaagttgatttaagggtttccgcccattgctgactgatgcctaattgattcatacctttcaagctttggtttggcagttcccaagacattaaggagacaaactctacctgaaaagtctcttgcatcactcgataaacgacatctacggcatcctgttcgctttgtgccgacaacaaggcattggacagtgtatagacattgtgcagtagtttaccgttctcacctgcaatatcttttagggtcgctatctcgacttgcaaacgatcgcgctgctcacgcaattggtaaacttggcgttccagcaaagagatctcttgtccggtcttcgggtgaggtaagctgagttcatccagcaaattcggaaacacatgaaaaaactggcggttttgattcaaataattcgccacatcttccgcatggatatcattgattaaactcgacacttacacctctccccagtacacactctattttattattcaaatttttagtttaataaaagcagcccaaaacggcttataacgctatttcggcatcaaacaccatcaccgccggcccagtcatccaaacaggatgcgacgcatcgccatcccaggcgatggtcaaatcaccacccgctaaagaaaccttcacctcgtcggccacttctcccagcttacgcaaagtcaccatggcggcacaagcccctgtcccgcaagcaagcgtttcagctgcgccacgttcatagacgcgcaacttaatatggtttgaatcaatgcgctccgcaaaaccgacattcaccctttccgggaaatgggcatgggattctattttcgcccctaactctgctaccggggctgctcccaaatcggtgacacgcaaaaccgcatgcgggttacccatagagactgcaccgatctggtaaaactcaccatctacttccaactggtagacatcagactcacccggtaccgcaaaaggcaagctgttgggtgcgaagttcggcgcccccatgttgactcttacttctccgttttcagtgatataaagcacaatcactcccgaagccgtctcgactgtaatctcggttttatcggtcaaccctttgtcatacacaaacttcgcaaaacaacgtgccccgttaccgcactgctgtacctcggaaccatccgcattgaaaatgcggtaacgaaaatccaccccgtcggtatcggttgcttcaaccaataataactgatcgaaccccacgccaaagtgtcgatccgcccatcctcgaatttgttctgcagacaatgaaacgtcctgagcaatggcatcaatcaccataaagtcgtttccaagtccatgcattttgctgaagtggagcttagcgcccataattgtcctcttaaaaactttcatactattgccaagattttacactgcttcactcggccgatttcgtttatgataaaccaaacaccctctaaaccctagcctgaacaggtgtaactactatttttatcgcctaaaaaacgaagacttttgctgtttcattcgtatcaatgaaaatcacacggagaactaaatgcggtatttttggctaatttttgtcatagtggttcccgtcctttcgagctgctccacgatagaaacacgttctttccccaagcaaacttttcctaagcaatggagccagcaagtcgctcaaatgcaaagccaaaagcaagcgactccctggtggcaggaactgcatgacaaggatctcaaccaactgatcaacgaagcgattaaagctaaccctgacgttctgtcggcggaatcggtcattcgtgaatccagagcttaccgagtacaggccagagcagggttattgccgaaagtgaccatcggcggtagcgcgaaaagcacttatctgaaaagtaccgatgccacaacagatacctattctgcggtactggatgccagttgggaacctgacattttcggcacacaa

SEQ ID NO: 671 - DNA, 23069 bp, synthetic construct
  misc_feature 1..23069: note = Synthetic
  source 1..23069: mol_type = other DNA
attgtgccattgtaataacggtttttgattaaggcgagggtgtgagcaatgacagacacttcccagctatgttccataacattttcttcgtgggcgttgcgcttcaatccccagcgtttaatccagcgtaatcttgataaataggcgtaaaaactacttgttagcgtgatgggtttcatgattttctgttatggtgttagtttttttagacactataaaacattatgttgattcagtggtatcccggtcacatgcacaaggcgagcaaagaagttaagcttctgatgccgcaggtcgatttaattattgaagttatcgatgctcgcattccttttagcagccaaaatccaatgattgccgcgctacgcggcgataaacccaccatcaaaattctcagtaaaagtgatttagctgatcctgagatgacacaactctggcaaacttatttagagcaagaacacggtgtaaaaactttggctgtcaccagccaaaaccccgaaaaaattcgccaactgattgatttatgtcacaagttatttcctgacaaagcagaagatggtaagttaattaacgcgttgattatgggtattcctaatgtcggcaaatcgactttaataaatatccttgctagtcgaaccattgcaaaaacaggcaatgaacccgccgtgactaaaatgcagcaacgcattgatttgggcaatggcattattttattcgatatgccagggttgctgtggggcaatgtggaaaatcgtaacagcggttatcgtttggcaacgactggcgcgattcgagacacggcaatagatcatgatgatattgcatcttttgccgctgaggtgttgttgcgccagtatcccgatttaattaaagcgcgttttcaattagaaacactgcccgaaaaagaagatgaattattgaaaataatcggcacacaacgcggttgtttgcgttcaggtggacgagtggaaatggataaagcggcgaaaattttcttggcagaatatcgtgcaggaacaataggcagaattacgctggaaacacccacgatgatggaacaggaattggttgagctagaagtgactcgtgctgaaaaagccgctaaaaaattggctaggaagaaaaaatagcggtaattttctctacgcaggttgaactttatcaccgcgccacggtgcaactttaactaacagcaacattcctggtagagttaaagcaaaacacaaaaaataaaaattcgtccagcctagtgcgggaatatgaaataacggcgtatcaaataaactaatatcgccgccttcgacaaaataccctgctaacgcattagccaatgaacggggagtggcggcaaaactggtgaataatgcaaactgtgtggcggcataagcgggattagtcgtagtggcaacataagccacaaatgccgctgtgcctagtcccatgccaaaactttcaatagcaatcacgaaagctaaactggctaagctatgcgctacggttgccagccacgcgaaacctaaaataaccagtgcttgtaataccccaaacacccacaaagcacgattaatgccgatatacaccatccaaatactacccaaaataccgccagcgatacttgaccacagccccgcatttttagccactatgccaatttcagttttactaaaacctaagtctaaataaaatggcgtgagtaaagcactcgccattgtatcgcccagtttataaaaaaagataaaggcaagaatggtcaaggcggtagctaacccttggcgttgaaaaaaatcacgaaacggctcaacaatggcagaacgcaaggtttttggcgcgttggcagaataaattggctcttttaccaataaacttagcaaaataccaggaatcatgaacagcgcggtgatgggataaaccatcgaccaaggcaaaaaatctgccagtattaacgataatgaacctggaattaaactggctaatttgtaggcattgacatgaatcacgctacccaaaccttgttcagtttcgtgcaataactcacgcctaaaagcatcgatagcaatatcttgagttgccgataaaaatgctaccattaccgccaataccacgatgatgcttaaatcatctttgggcgaaaaataaccgaatacgggcaatattgctaataaacctaattgggttaacagcatccaagtacgccgccgccctaaactcagcgtgtaacgatcacataaaggcgaccacaaaaacttccaagtgtagggtagttgaatcagcgtcaataagccgatagtttttaaatccacccctgcttctcgaaaccaagcggcaaacaggttaatcagtatatataacggtaatcctgaagaaaatcctgttaatacacataacagtagacgacgattggcaaagggttcaagagcggggcttattttcattgatgatttagtatgggttggggtgagctataatccccccaacagctaggcttaacggatagttttttgttgggggggtgattttctcacccacgctatttactttttaacttcaggcttatccaataaggctttggctgcggcactatcggcttgaactttttcgctcagtgcttttaatttctcttgtcgctcattggcagatttagcgatactggcattatcctcattgccttctttaatcacacaagcattataagttccgactttttcttgccattcgttgatggttttaacgcttttattgtagttatcaacggtagtctggttaaccttgggggcattaggttcagccccacagctactaggtgtccaaacacctttaccaatagttcctgctgaacaaacagaagccatagtcgataatatgattacagcaaaaaatgtacgttgtctcattttgtattcctttaagaatttaggttggattttaacgtgcggtgcatagcattttacttaggctatcgatactatgctagtgtcattttttgaattgctagaaacaactcgcagtacacagggtaaaatagttattttatcggtttcaaatgttggagtatggttcattgaacaaaaaaatttttataggctgcttgttgttattcatagtggttgattgtcaggcaggtatagtggcgcaacgctggtcaaaaattactcagccaacgctaggtgcggcgcaaagtattggtggttatagcgcgggttgtttaaaaggcgcggcaaccttgccaactgacggcacaggttatcaagtcatgcgcctgtcgcgtaagcgattttatgggcatcctgatttaatgcagtttatcgaaaatctggctcaaagcgtttacacgcaacagttaggcacgttactcattggtgatttaggacaaccacgcggaggtccaacggttagtggacaccgtagtcatcaaacaggtttggatgtcgatatttggtttttgttatcaccagaagccaatagtcgcccgttaacggtttctgaacgcgaaaaatggagtgcgtcttcggtattactgggtaaatccgatgacatagattttaatcaatggtctttagcgaatgcccaagtattagagcttgctgcgcgactgccagaagttgaccgtatttttgtcaatgccagtgtcaaacgccagttatgcaacagtaccgctaagcgtgattggctcagaaaaattcgtccgtggtggaaacatgacgaccattttcatgtacgcttaaaatgcccagctgacagcaaagaatgccagaatcaagacccactcccacaaggtgatggctgtgacaaactggcgtggtggtttaccgaagaagctaaaaaactaccaccttcaccaatcactgaatctgttgaacctattttgcccgtatcgtgtgatgcggtattaaaagaataaatccgtgttcaatttgctaaaggttaacgtgatgctgaaaattatattttttctgatattttctgtatttgggcaatcattatttgctaaaacgatttcaaaatctgcggtaattcttgaaaaaagaaccctcactgccaatcgtcaaatggttttatggatggaaaatccaactaaaaatccgcgagcagtgccagatgaaacatacacttgtccagaatttactcgaggtcattattattctggcattactaacgtttccctcattgatacaaaaacaacgagtattctcaacaccttagaaattcaattagatactgacaacaagattgatttgccgtatttgattaaacgcggggtttattatgcggttccaaaaatcaataaaaaccaagaaggtaaaccgttattgctgaatttaaaagattacaataatgacggcaaagctcatgaatttgctttgtttgatgcgtggggatgtatgggtttaggaacgactttaatcggttacagcgaaaagcaagataaaatcattcagtatcaaatagagttaaaaacggggaacgatacctccaaagattattgggttgattacctttttcaacactcgccagataaacagggaatttggcaatatgaaattgattatcgcggacgcgctggaacattggataaatatgaagtccgttatgataaagaacacgagttattttacggcacactaatcagtattcctgatactgaataaaaaattatcgattttacttcatgcgggtttgctgttaaacactgtgttgttgggttgccaaaaagtagcaacccaagcatacacttagtttattttggatagccttgttgtgggtatccttgttgttgctgtggatagccttgttgtgggtatccttgttgctgctgtggatagccttgttgtgggtatccttgttgttgctgttgtggatagccttgttgcgggtatccttgttgttgctgttgtggatagccttgttgcgggtatccttgttgttgctgtggatagccttgttgtgggtatccttgtggctgttgctgttgctgctggtagccataaggtctggttggtggcaacttgctacccgtcactactttttttgtatagcctttttgctgcatacagctatcgatttgattcggtggaatcaaggctttggtggctacatttttgaggatgctcaaggcatcattgcctgctggagcttcctcgcctgtgtttgcttgatcttcgcaatcagctgtcgcgctaggatcagccaaatagttttcacgatcaatccataccgttctttgtttaggggctgcttgggcggctgttaatcctgccgatgccataacgattaatagtacccccgctgtttttaaatagggtattacacgattattagtacttagattcatgataagttctctctattgtttcttggattcaagtttaaaattaaaacagcattttccagttggaaactgaacgataactgaattttactataaatctgctggttggatagttcaatcacgctatattaaaacctgagtttctatttgttttctagtccttgataggcatttttacgcaatttcgcgccctctaatcgatctttaatttggtgaatttttctcaataagggtgcagctccgccgatagcaaccgcatctactagacaataccaagcggcaacaccgctaggtggattaccttgtggtagattaagaaccggatcaatggctgcccatttccaagtaccaacttctgtaccgatgagttctagccaagtggtgataaaaaaagccgctaaatacaccatcggtgaacgacctttaaacaaataagctaaaaatacgcaaaacaacaacgcccccactgaatcgccttgttcggcatagccactaatcccccagattgaccataaaccacagacaataacgaccagtgtggcaatagctctagcatgacgtaaaaataatccagaccgtgctaatgcgacagcagttaaatagaccatgccatgaccaggtggcacataagcgggaacgttatgaaatcgataggtataaccgcccataaatggtgaagcaaaatgttcgcctacggtagcgaacatgatggcaatcacgacctgcatacgaacttctttattttcgccgtgtaataagcaaattaaaaaaatccaaccacaagcacccagcgcgtactgttttgcttggctaccattggcatcactgattaaacaaaccgctacgcaaaaaaaggtgaacgcggcaataaaataatcgcgttttttatgcggataaacggtattagcgtggggaaagtggcggagcatcaatgacctctgtttaaataaatagccatacaatcatggcatagcgagtaaacttgcctagcaaaataatcaagcaagcggacataaaaggcagtcttaaccagccacctgcaaaacaaaacacatcaccgataataggtaaccacgaaaaaaataatacccagacaccacgtttttcgatgatggcaagtgcgcgttgttttttatctgacagtaatgtcgccagcggaaatttttttgccgccagcattcctaagccccatgtggttagcgcacccagtgtattgcctatggtagcgactatgagcagcgtttgatttgcatataaaccgttggctaccatgtaggctaatacggcttcagaaccacctggagcaatggttgaggatataaaggcactggcaaacaagccccataatcccattaatgtatcgtgcatttattactctcaaaaaaaaacctgcaccttttgaaggcgcaggtttttttacggtggacttaattatttactcggtaacacgttagtttttttactcaacactaaagcgattaatcgagacagtagttttgcgattgtactgataagttgacctaataattcaaagctgtaagcaaccacttctgatacgctcatgcctttaaattttcgcgccagaaatggtgcaacaattaagcctattgccaaaccgataatgctcgtacccgataataaactgtcatcttgtggtacgactggcgtaacaggtgttggcgcaatacctgcttttttatctgccgctaactgttttgctaccaccgccgctttagccgcagccacttcatctaccttagcttgcgcttcggctttaatagctaattcaggtagtgtagctttatagtcatcggcaacaacaggggcggtgacacctggaatactcggcaaatcaccatcgcctttaccgacttttaattgcgctttcatgcccttttccatgtgctgggcaatatcgcaatgtactaaataggttttatcacctggcggtagaattaaggtgcctgatattttagacggccctgaagcttctaaatgaaacatacctttagggtataaatatttaggcaaaccgtgcatcatccattgatgacgaacgtgatcttcattgataaaatgcaccgtcaatttagtacacggtttaaaattaaactcctgtgtgtcaaacgcgtacattctgccagggaatttttcagcgtatttatgacctgcacggacagtaatttctttggtttcggagatgctatcgcaaccaccaggtaaggtgctggtattttgccccattaccataccacccgccatatccattaaatgcccatcgccatgatccatgagcattccatcgtgatcctcataagcgacttcctccgccagcagtggcgcagaaaaagccaccaacaatacgcctatcgataataattttaccattacttattttcccccactttaactaacaaacacacgcgcttttcaacattgactcgctgttgttaactttaatctttaattttaaagattatgtcatcaactttacgtttaaaacccgcacttgataaatacgccgcataaagagccgctaagcctaaaaatccgtacagcagtaaactacttttcttgactgcctcacctgtgcctgctttgaagcccatgtgtacatctaagcgttgaccttgaacgcggttatcagtggctttttcatcaggaagcagggtaatgtgaattaagtattgacccgcttctggcacaccattaggtagctctaagttaattgtaccttttttatgcttggcactgggtagaaaaaatacccgtgttccttcaggctctttagtcacttcaaactcaacagccatatctctgtagcgcatatcctgatagtcaaacactaattgtgttttagtatctgtgccaggcagttttccacaaaattcttcagcgggataagcagacggctgataagcggtgtaatgaatccaatgtgaaggctctaattcaaatttacattgatcggtatccgtacctgctgcgccgccatgcgcccaaactgttgccgtaaaaagtgtgccaagtagacctaacagacctttttttaataattgtgtcgtcttcataatgcccttcctaatgtttgataaattatttttattatgaaaaaatcggtagctcagtgtagcgtgagcctgccgataataactttcatttgctactttgtgaagctatagcagttgccaactctagcacatcaaagtagtcaaataaagcaattgatagaatgactgttttatgtgtaaattgcaataatcttataggctattactatcctgccgtccttttcgtagctcacgttaaatttctacccgttaataaaaataacacaccagttatcgccgtgttctacactgcaccacatcttcttggtttcaagtcttgcaaggtatgctgtacatactattaagctcaatcaattcgcccccacctgtttttttaaccagcaaattttaattacccactcaatgaccccaaaaatccataatcaaatcgtcagttttatttggagcgttgccgatgatgtactgcgtgatgttttcgtcagaggaaaaataccgcgacattattctacctttcaccgtgctaaggcgtttggatgctctattagtaccaacaaaagaaaaagtgttagcaccaattaagccaccaacagcaagggcgaaaccttaccgcatttgactaacttaggcatgggttatgttttgaagaactaatacggaaatttaacgaagacaacaacgaagaagcgggcgaacattttaccccgcgtgaaaccattaaattaatgacgcatatcttattcacccccctgttaaagaccacatagaaaagggcgcgtatctcatctacgatcgcgcctgtggcagtggtggaatgctcaccgaagccaaacattttgccttacaactcacgcaccataaagccgacttcatgctctatgggcaggaagtcaatcctgaaacctacgctatctgcaccagcgatatgctgattaacggcgaaaaaaccgaaaatatcgcctacggttcaacacttgccaaagatggatttccagaaaaataatttgattttatgctgtctaatccgccttatggcaagacgtggaaaatcgatgaagaagccatcgtagcggatagaggcaaaaaaggcagtcaaaacatcaaagacccgcgttttcaaattggtttgccttctatttcagacggacaattattattcctgatgaatatggttagcaaaatgaaacacaacaccgaaattggcagccgcattgctaccgttcacaatggttcagcgttatttacaggtgatgcaggtggcggtgaaagtgaaatccgcaaacacattattgaaaatgattggctggaatgtattatcgccttgccgaaaaacatcttctacaacacaggcattcccacttatatctggattgtatccaatcgcaaaacagaaaaccgcaaaggcaaagtgcagttaattaacgccatggaaatgtatgaaaaattaataatacttaggcaataaaaagcccccgtcagttttgcaacatcgtgagggcttgggtcgcttgaaagcgttgcctacggaaaatcattccattggtatgataagcgagtaggctatagttggttacactatgacgatagactaaccacaaggacgcaaatgagcaagaaaattttaggattagatttaggcagtaattcgattggttgggcattgctggaagaatatgagggtaagcctgacaaaatcatcaaattaggcagtcgtatttttaccaaagctgtcgaagaaaaaacacccacacccaaaaatgtaaaacgccgcaatgcccgattaacaaggcgaattacccagcgacgagctagacgcaaactgcgaatgctcaattatctcgtcaagctcaatctattaccgccagagcttaccaacaatcccacccctgaaattatcctcaacgatttaggcaatccttatgccttacgcgccaacgcgttagaccacgcgctaacgccgtttgagttagggcgcgtttttctgcatcttgttcaacggcggggatttttaagcaatcgcaaaactttgttaggtgatatggcggatgaccccgatgtattggatattttagcggaactcgaagctgaagaagataccagcaccgaacaagcgaaagaagaaaccgctttcaaagccgacattagccagttaaaagccaccattgcccaatcaggttgtcgcacgctgggcgaatacctcgcttcattcgatgttcacgattgccaacgtaatcgcattagagacggcggacacttacgcactgatagagaaatgtaccgcgatgaattgaataaaatctggcaacaacaaaaacgccaccatgctgttttgaccaatgaagtcagagagcagttagaggagattattttcaaacaacgtccgttaaaattgaacagtgtcagagtggggcaatgctcacttgagccaaaaaacaaacgcgccaaaatagccagactggaatgccaacgctttcgttatctccaagacattaacaacctgcaatacatcaaccattcaggcgtgtccaccacactcactaacgaagaaaaacacacgctgataacgctatttgaaaccacggctcacgttagttttgcaggtataaaaaaggcgttaaatttaaaaggcgtagagttcaacctagaaaacggtactaaaaagttaaaaggcaatctcaccgcctgcgatattcgcaaacacctacccgactgggacggttacgacgaaaccaaacaattggcgatagtggaagacttgctcactatcactaaaaaatcggtattaaaaaaccgcttgatgaaacattgggaattgtcgttacacacggcggtgcaactgtgtttattggaatttgaagcggggcatagcaatctatctttaaaagctatcaacaaactactgccgtttttacaacaagggcaaatttattccgatgcccgcgtcagtgcgggttatggttatgaagttagcgaaataaagccaactgacaaactcggcacaccgccagaaaccgctaaccccatcgtcaacaaagccctgcatgaattacggcgtgtcattaatgccattattgctgaacacggcaaacccgatgcgattcgtatagaaatggcgcgtgatttagaaatgaatacccaacgctatcaagactttctcaaacagcaaaagcgcaacaccaaagccaatgaagacgcggaaacagcctatcaaaaaaacgcgcccttggcagcgtctaaaaaagccagcaaagccgacaaactcaaataccgtttatggcaagaacaaaaagaaacctgtatttatagcggcaaaacaatcgacctcgcgcaactgttcagcgcacaactagaaatcgaccacattttgccttatagccaatcattggatgattcctacatgaacaaagtcgtgtgttttgccagtgaaaaccactacaaaggacaacgcacaccgattgatgcgtttagtgggcatactgacaaatggcaacaaatccgtcaccgcatgaaatccctgcacaaagccaaacaagcccgattttccacaacggcaaccgacttacaaaaacgggattttatcagcacgcaactcaatgacactcgccacatcagccgcttagcacaaacttatttagccgaattgggcgcggatatatcggtgagcaaaggcataaccaccgcgtggctcaggcatcaatggggcttaaataatctgattggtgaaaccgacaacaaagaccgtaccgaccaccgtcaccatgcgattgatgcggtggtcattgcttgtgttgataggcggatgtatcaaaccttggtttatatcgccaacgacttggagcgcagacagtcagaattgaccatgcgagacgtgcatcttgacccgccttggcatcacttgcgggaagatttagaacttgcactcgatagcgtgattattgcccacacgccacaacgcaaattatcaggcgaattacacgaagtcacaggcgcgggttttattcacggcgtgggtaatgtgcatcggaaaaccctgaatgccagcttcacccaagtggacaaaatcattgatgaagcggttaaagagcaagtacaacaacaccttgcccgttacgacaacaatgaaaaagcagcctttgctgaaaatatcaccgtattccacaaagacggcaaaaccccgataaagcgggtgcgtattttgcaatccaaaaccacgctagacaaactggcaaaaaccaaatttggtgcgaaagacaaacaaggcaaggtgttcaaatggttagcgtttggcaatctgcatcatgttgaaattatcaggcataacgaaactggcgcgtattcagggcagtttgtcactatgatggaagcctcacaccgtgctaaaggtatcaaaatgccacaacaagccattatcaaaaccgaccacggcgcggattatggttttatcatggctctgcatatcaatgacttggtgagtgtggaaaaagacgggcagcgcgtgtattaccgtgtgcaaacattagattctggaatcaatagggttatgtttcgtttgcatactgccgctaatttggatgataaaacccaagggctacatttaagcatcaacgaaaaaatattcaccacttggcaattacaaaaacacagcatcaacgcaataggtaaactcacggaataaaaacagctcgattatcgttccaacgctccgcgttggaatgttcaagaggacgctccagcgtcctcgcttaacaatgaagacgctagagcgtcaacggctgcattccaacgcagagcgttggaacgatgataaaacaagcgattatgagagggctagtgtaaccaactatagcttacccgcaaatcacaaccagaagttcatgtgcaacgcatcaaagcgatattaccgcctgatggtgaagtacgaattatcaaaataaccgataaacaatttggtcgaatgcaggttttttatgggaattttcgcactgagactgaacaagctcccgatcaattgtcacttttttaagcaaaatagtgacaatttttcagtaaaaacaagcgattatgagaggattagtgtaaccaactatagcctacccgcaaaccacaacgtgggtgtcatgaatcaaacaatttctgaaagtgtaaccaactatagcctacccgcaaaccacaactgtcgccataccttgaccgccaacggtcatagtgtaaccaactatagcctacccgcaaaccacaacagatacattgctgaggaaaagcaccataaaagtgtaaccaactatagcctacccgcaaaccacaactagcaaacaacaacgcacctaaaaacaaacagtgtaaccaactatagcctacccgcaaaccacaaccgtattaaccaatgacagtcaagccgcccatataagacaataacacttctggaatatgaatacgcccttcggcatcctgataattttccatcacggcaatcaaggttctacctgccgctaaacctgagccattcagagtatgcactaattcaggcttgcccgtttcaggattgcgccagcgagcttgtaaacgccgcgcttgaaaatctttaaaattactgcatgaagaaatttctcgatacagtccttgtgcgggtagccacacttccaaatcgtaggttttagtcgatgaaaatcctgtatcacctgcacacagcaacatacgccgatacggtaaattcaatttttgcaaaatcgtttcagcatgagcggtgagttgttcgtgtgcttgcgctgagtcttcaggtttaacaatctggacaatttccactttttcaaattgatgttgacggatcattccgcgcacatcacgcccatacgcacccgcttcactgcgaaaacatggactatggcaaacaaattttaacggtaattttttcgcctcaataatcacatcgcgaacaatattggtgacagggacttcagcggtgggaattaaatacaaatcaggatcagagctggctttgaataaatcggcttcaaattttggtaattgtcccgtaccgcgcaaactatcggcattgactaaaaacggcacataggtttccgtgtaaccatgttcagcggtatgggtgtcgagcatgaattgaatcaatgcgcgttgcaaacgggctaagccaccgtttaacaccacaaagcgactacccgcgatttttgcacccagttcaaaatccatgccttgcagttttgcacctaaatcaacatgatctttggcttcaaaatcaaattggcgtggatcaccccaacgactgatttctaaattagagtcttcgtctttaccctcaggaacggcggcatcaagaatattaggtatgctcgacattaaattatccatgtccgtttgaatacgagctaactcggcttctgcggcttttaactcttcacctaattgtccaacttgatccatcaaaggttgtacatcttcgcctttggctttggcttgccctatggctttagcattgctgttgcgttgattttgtaagtcttgggttttgatttgaatgtctttacgccgagcttccaagctgatgtatgcgtccgcatcaaacgcaaagttgcgccgtgccaattgcgcggtaacaaaatccaaatcagttctaaataaacgggggtctagcatagtgataatttacctttataaaaattaaaaaacagtgataacggacatattttatagtgtatcttcaccttgaatacggtaatctttactggctatgaaaatagcatcaaccaattgataaacagcatttggagaaggtttatgacaaattttgtagagtggtcaaatgaattaagtgtaggtattgaagaaattgatgagcaacataaagtcttggtcaatttaattaatcgtctgtttgatgaaaccgttgttcatcaagcgggtaccagtgcggtaatggaagaaattttacacgaactcatcgaatatacggtgattcattttgccgtagaagaaagtttatttcgtatttttcattatccagaaactgaaacacacacgcgccatcatgatgaattaaaagcacaagttttggatattcagaaaaaggtcaaacaaggcgaagctgccgtcaataccgaattactgatttttttgaaaaaatggctaaccaatcatattcttcaggaagataaactatacgccccttttcttcttagccaaggtgttaaaagctcatggtcagagcgatcttggttgggtaaaatttggagtaaaggcaagttataacaaaggtatgcaatcgctttagtgattgttcgtctgctttcctcgtatgattgtgtgcatgaattaagcgtatctgtcacaataacttatacattacagtgactcacataggacaattccatgattgaaataaccgacgtacctagtcctttttgcggtattggcaccgatgacttgagcattcaagtagacggggtaacgctgaaagtgtctgcaaatggctgtgcaataaatacccccctatttgaacaagccattactgatactagcccgcgtgttgcagggcaagctgtcagcctaacagaggcaatcgcacacgcggcggcattattaaaaaatacccaactcccagttattggcggttgtgctactgatgttaatggtatgcgcggcttactcgccttggcagatcgcactggtgctgtggttgataatattaattttacaggagcgcgtaataattttttagctctgcaagattctggctggatgaacaccactctggcagaagttaaaaatcgttgtgacgtgttgctggtagttggcacagatttagaagcctttgccccccgtttttttgagcgttatatctggaataaagaagcgatgttcatcgaagacacgcaacaacgcgacgttatttatttaggtaaagcaccttctggcgatttatccacctcacccaacggtaaaaaagcacacgttttagaatgtgctgtgactgacttacccgaagtcatggctgtgttaagagccttagttaaagatcgtccaatctgcgctacctctgtttgtggtatcgccgttgctgatttacaaagcattaccgatacactcaaagccgcaaagtatggcgtgataacgtgggcagcgggtgcgttagcctaccgtcaagctgaattgactgtgcagatgctgtcagaaatggttaaagatttaaacaataccacgcgctgttcaggcttgccgcttgctggtaaagaaggagatcaaactgctaaccaagtctgtggttggacgactggctatcctgccagaactcgctttagtcgcggctatcctgagtatgacccatttttaaacgacaccaatctgttactggcagacggtgaagccgatgcgttagtctgggtgcaagcgtttaatgtacagtcagttccgccacaaaccgagttacctactattgtagtcggacgctcaggtatgacctttgccaaagaacccgatgtatttattcctgtcggtacaccagggttagaccacgcaggacacgcttatcgtatggacaacgtggtagcgatacgcttgaaaaaactcagagagtcaggattgcccagcacggcggatgtattgaacgccatagagcaagcaatgtaataatgtagataccatctctccaaatcaatcgcaagcgacttttaagccgtttgtggttgatcaatagttcggacagttttaaccagagaccgccccgttgtacaaagtgcgtgataatggggaaaggatttaatcaaactcagtgcgtgttttaaaagtctcaatacagtaaaaacgggttcaatttaactggactacctgaacgtgataagtaaaaatcggatgaaatcacttggttttaatttaatattgatctaaagataggtcgctatacttttaaaacacgcactaagccctcctatttttatactatcggcttattttaactcaaaacatcgtaactaaccgcctgaaaggcggtggtttcaaccttggaacagactaatgaaatatcatggcggacatttcatatgcgcagtgtggaaattagacattcgcctctggcaattattgattatggcaagcctgttgctggcgggcgtatggtttagagatttcagtttataccctgcgcaaattgctttcacttttgctgctggtttaatcactcaagctatatttttgcggttgtttaaacttgaacagcacggttttttaagcgcgactatcacctgttttggcttgtgtttattattgcgtagttctgcgctatgggtgcatcctgcggttgccagtttggtgatggcgagtaaatttttaattcgtccgcaaggagcgcatttatttaatcctgctaatttaggcgtagtattaggcttaagttttttccctgaaacgtgggtgactagcgggcaatggggtcaggatttaactaccgcgctgtggctgattgccgctggtttttttattgccagaaatgcgaaacggctggatataacggcttattttttattgttttatgccagtctgtttttagtgattcgtgtcgcttggtatggttatacactgcccgtattttttcatcaatttcaaaatggcgcgttattgctgtttgcattttttatgatttctgacccgatgaccattccacgtcaccataaagccagaattcttcatgcagcagtggttgcagtattggcgtatatttggcaatatcaattgtattggaatcaaggcataatttgggggctattttgggctacctttttagtcccgttatggaatcatttatttcccgcaccgcgttatcaatggcaagctctttctggagaacacacatgacaacaagattaatttttttattactggcactgtcgattagccagaccagtcaggctttttgtggcttttatgtcgctaaagccgatgctagtttgtacaaccaagcctcgcaagtggtgatgaccagaaaggatgataaaactgtcctcagtttgatgaacgattaccaaggggaattaaaagatttcgctttagtcgtgccagtgccacaagtattgacagaagggcagattcatattggtgatgctaagttgtttaagcatatcgatgattttagcgcaccacgtttggtggaatatcacgatgaagacccttgccagccgcctgtaatgtacgaaaaaatgatgtccgcaccgatgcccaccgccgcgatgccacaaaaagccaaaagtgataaaagtttgggggtaacggtagaagcagaatataccgtcggtgagtacgatattgtgattttatcggcgaaagaatccgatgggctagaaaaatggttacaagccagtggatataaaatccctaagggtgcaagcgcagcattaaaaccgtatatcaaacaaaatttgaagttttttgttgctaaagtcaatctgaaagaacaaaacaaaacggggttaaaatttttacgtccgttacaatttgcttttgaatcgcctaaattcatgttgccaattcgtttggggatgattaatgctaaaggtccgcaagatttattggtttatattctgactgaaaaagggcgcgttgaatccagcaattatcaaacgctaaaattacccagcaatatggatattcctgtgtatatcaaagataattttgctgacttttacaaagccctgtttgaaacccaagttaaaaaacaaaacctacgcgctgtgtttaccgaatatttttggaatatgggctggtgcgatccttgtgcgtctgagcctttaagttacgaagagttaaaacaattaggcgtattttggttgaatcaaaacagtaatgccccgcaagttatgtcaggtggcggtgtgcctgtgcaagtcacccgcttacacgttcgttatacgcctgatagttttcccgaagatttaagttttcaagaaacccgtgatacggaaaattttcaaggacgctatgtattacgccatgcgtggcaaggaaaaccagaacaatgcgaagcggcaaaaacctattttgaacaattggcgaagcgacatgagcaagaagccaaaaccttggctgaactaacaggctgggaattatccgatattaaaaagaaaatgaatttgaatgatgccccagaccaagaatcgactgatcaatggtggaaaaaaatctggtaatcccttaataacatggtggcgtttgtttaaaacgccactgtggacacaaccctaaaaaaaacaaatagcctgacggtaactatcactatttttatttttaaaacgtgaaccttgtttgtacgcttgcttgataagcaaaaaagcaaaaaacctgctaccatgtaaatttttaattaaaagctatctgttttctcacgcaaaacatacttcttgacaggatattggaaatggcagcaagcgatacaatgtatgatacaaaatctaaaggaatactctggggctttggtggttttgcccttgttgttgtaattgtcctgatagtattaggcgcgtggtggggacgagaaccagatcagttcaatatcatagacgcagcacaagaacgagcaaaggcgaccgcaaaagacactgaaagtgaaaaaatgcccgtcggctatgtgtatagtaataccttagcgcatattgcagaatttctgctccataaaagtggcggttatatcaccaatgatgtcgcaccgcctggcgtattactagacaatatttccaattgggaatacggtgcgctggtaatgttgcgtgatgccacagctgcgttaagaaaccattttgccagagaccaatcacaatctgctgaagacccagatttagcgattgctgaacctttattcaattactcacacgattcatgggcgttaccttccaccgaagccgaatatgaaaaggggattgaatcattgcataaatacatggcgcgactgcaaaaatacggcggtaatgttaaacaagcgcaattttatcctagagctgataatctctggcaatataccgaagtaattattaaacgtttgggtggtttatccacgcgattggcagccaatagttcgggtgctaattatggtcctggtttaactgaattggaaagagaagcggcagataaagagggtacgccaataaccaaagtatcatggttagaaatcgacgacgtattttatgaagcacgcggtgcgagctgggcgttattacacatacttagagccgtcaaacacgattttaaagatattttgctcgacaaacgcgccatgcgtactgttgatattatgattaaagccttagaaaatgccttaacccctgtgtttagtccgatgattttaaacggtgatggctttgggctttttgctaactactccctgtcgatggcaaattatatagcgcgagccaatgcggcagccttagatttgcgtgacattatgaaccgaggttaacacacaatggatgaaaaaatttcttataacatagcggattttggtatttggaagcggtttttcttcatgctagtatttgccgccattgccagcctagtcagattattgatttgggcagtgacggcttttcaagttgtttttgtactacttacaggtagcgcgaaccagcacattctcgcctttggacgtagcctttccgtctacacttaccacattatgctgtatctgacattctgtacagaaaccctgccgtttccgtttaccgaatggaatctaaccgcagatttaaatttgccagaaaaataatcttagtttgggcgcaagatgaacccttgtcttgcgccgccttgttattcttcctcgtcttcgtctatttcgtcttcaaactccaattcatcatcaaattccagctcttcttcgccttcaatttgaagtaaacttttaagatactggtataacaaacgtgacgatttgggtggtttagccaattcagcttctttttgtgcattgcgcattaattgtcgaagttgttgtctatcggcatgatcgtattcataaagaaattccgtcaatgcctcattgccttctgcaatcagcttgtcacgccaatgttcggcgatatgatgctctctaaccgcgtgtacactggtgtttttgatacgcgctaatctttctaaaataggatcaatatcaattttatgcagatgccctgcaatgtattttaacaagcgttttctcgcacctgtgtgagacatttttgtggcttcaatcactgctttatcaataatttcaggcagttcaagactttttatctgtacagccgacaacgccgacaactcctcacttagcgcgaacagtgttgccatctccttttttatctgggttttattgggacggacagcgtaatacaccacctctccgttttcatcatattcatattcgtaatcgtgttcttcgttcattattaaccattgccattaaaaaagtgccgcatgatgcaagcaaccaaactgcctaaataacagttactttaccatgaaaaataacgatgttatgcttgaaatacaaaaccatacacaggaactaagtagattggagctatcatgaatttagcaaatatgacacatacacaaaaattagctctgcttcttagtatcatcgtgatagccattattgccgcgctgtttctgccagcaattcctcaggatattacttatcaccaattcgcagaccagcggcgtttattaggaatacctaatctacttaatgtcatttcaaatattccatttattatcgttggttatttaggcgtgaatttactggcaaaaaaccaaaatacctgtatttttcaggaaatttattgggcatacactatattctttattggcattttttttgttggtattggctcaagttactatcatctttttccgtccaataaaacgttagtttttgatagactgcccatgacagttgcatttatggcattttttaccatcattctgtctgagtttatttccataacagtgggtaaattaatgcttatcccgttattaattttaggcgtattttcagtttggtattggtattttaccgagcaacaaggtgcgggagatttacgtttatatggcttagttcagtttgtacctgtgctactcacgccgctgattatatggctatttttatctgccttttcacatacacacttattttggtattttataggctcatatattttggctaagctctttgaagccagcgatagcatcgtttatcagcacctatttcaaataagcggtcattcaattaaacatcttgtcgctagcatcgggtgctatattttctatctgcatttgaagcaacgacattttaatgaaggtagctaaactcaaataagctgttagctttgctttagagaccgtgaaagtattctgttttggagtcaactttcacggactcgttagcggagtattatcgtaagataagtattaatgggcatcatcatgatgccattttggcaacatgataatgcagttgggtttgaagccttgattttttagcacgtcgatactggcgattttttcctgcttgattaagtcgatgacggtgattgaaccatcgtccatagcgggtaggtttaaaaagctattctgcacgatggcgtagtgttcatcaggcgaggtaacaacatgatgtgcgccgcctgcggtgggaatagttttca

SEQ ID NO: 672 - DNA, 23066 bp, synthetic construct
  source 1..23066: mol_type = other DNA
  variation 7209..9463: note = n is a, c, g, or t
  variation 15929..16958: note = n is a, c, g, or t
  misc_feature 1..23066: note = Synthetic
tctgcgctatcttggtctctgagaattaaaaaaacagtatttggtgtattgtaattttttagttttttttctatttgtctatctaagtcactttttccttcaaaagtgataatttgagataggcggtaattatcaggtaatattttcggtaaaacaatttgcaacatttcttttgcagattgttcttcggtaaaacaaactaaattcatttcttacccaaagtcacaaaaaacccttgtttccataagtagcccatttggtcaccatcattcatataagctacaatttgcttatcttcacttgctctattgattgttgtgtagcccttctctttaaccaaaagaaatacttcttcaacattaatggcatttaaaaaatcaggtgaatgcgtagaaacaaaaacttgttctccacgattagcatacgccctaaattcctctgccagttctgccaataaatgtggataaagttgattttcaggctcttcaacacataaaagtggataaggttttggatcgtaaagcaagactaaataagccagcatttttatcgtaccatcggaaatgtagcgtactagaaatggtttatcaaaagactcatcttgaatttttaataacacttgccctgtttctatggtttttgcttctacattggaaattcctggaattctttgttttaaaactttgataatttcatctagttgttctttatgattattgtgtaaatattctataacattagataaattctcacctaaagtagataaatgctcagcataatctgcttgttggatattacgcgcttcattgacatgaatatctgaaacatgccaattatcaatgagttcactaagggcaataacggcagggaatttctcaaactgtgccaaccctttaatggctaaaatatcaggtgatttgagggtttgttcttctcgctctaaatctttttcttcagtagaatctagcatttgttcgttaataaccgccttacctttgccacaactaaagtttaaaaattcccaaggtagtcctttagcgcctctacgatattttaaaatttccctatcaacaaccgctttgccgtttttttgagctatacttaaaaagtaagtaataataggattgtttttataagtattttttgctttaaattttatttcaaactcaatattatcctcagaaccacgactaataacttcatcaaaaccaccgcgtttattaaaagcagtattaacatcggtagagagtgcatcttttaaaaaaccaaaaacattaaacaaagttgtttttccagagccattactaccaacaatcacacaaaattttggaatgtccttcatttcagcattcttaaatgctttaaagtttttgatttttaatgattctattttcataatactttttacatattgtctaaaattgcgcgtttaacctcttccatcacagggtcaatgtgaatcatgttatcattattacactgagcgatagcagtatcagggtcttttaagccatgacctgttaaggtgcaaacaatttttgatccttcagggatcttgccacttttaatgtcacgcattgcacctgctagtgatgtggctgatgcaggctcacagaaaataccttctttttcggttagtagtttttgagcgctcaaaatatcagcatcgcttagtgcatcaaaccaaccgtttgattccctttcaacttcatgtgccaaatcccaactttgcgggtggccaatacgaatagcggtcgcaattgtttcgggattgtctatcatctcaccttttttaaaaggggcagaaccttctgcttgatagcccaccatggcaggtgttttagtggccttgccatcttgttggtattccttatagcccatccaatgtgcagagatattgcccgcattacccacaggcaaacagtgataatcaggcgcatcgcccaattcttcaacaatctcaaagctggctgttttttgaccttgcagacgaaaagggttgattgaatttacaatggatacgggcgcatgctcagccacttctttaaccaagcgcatgccatcatcaaagttacctttgatttgaataatcaccgcaccgtgaatcattgcctgcgctaatttacctaaggcaatcttaccttctggaataagtacaaaggctttaatgccagcgcgggctgcataagcagcagcagaggcggatgtattacctgtagaagcgcaaataatggcttttgagcctgcttctaccgccttagttactgccatcgtcatgccacggtctttaaatgaaccggttggatttaagccttcgtatttcacataaatatccacatctttacctaataaggcaggaatattttctaagcgaataagtggtgtattgccttcacccaagctgatgaagtttgtgttttcatcaacaggtagtctatctttatagtggttaattaagccagtatatctcattgtattgtccttttagtctaatgtttctacatgaatgattttaacctcttcttggatagaatcatgtttttgaattgctgctactgctgcattaatattgctggtctttacttggttggtaataatagcgatatgtgcattgtcttgtgcgtcaatttgcttttgtacaactgcctctacgctaatattgtgattggcaaaaattgctgtaatatctgccaacacccctggtttatcagtggctaataagcgtagataaaagatgctttcaatatcatcttgattttgataaggtattgcttcaaatgactgccagcctaaaacattatgactgagcgtgcctttaatcacatcaaccaaatcagcaatcacagcacttgctgtagcttcagcaccagcaccagcaccataataaagcgttgaacctacagcattgcctttgactaatactgcattcatcacgccatcaacatttgccaataggcgagtctttgggatgagtgttggatgcacacgcatttgaattttaccgttgagtttcttagcaatgcctaagtgcttaatggagtaacctaactctgtggcaaaagccacatcttcaccactgatttgactaatgccctgtgtagatactttgtcaaattgcaactcacaaccaaaagcaatggcggctaatatggccaatttgtgcgctgcatcaatgccttcaacatcaaaagttgggtcagcttcagcatagcccaactcctgtgcttctttcagcacatcggcaaaatctctacccttatcacgcatttcagtcaggatgaagttgcctgtaccgttgataatgccagctaccatttcaatttggttggcactcagcccttgctctaaagatttaaggattggaataccacccgctaccgctgcttcaaacaacaaatgcgtgttgttgtcttttgccaaagcaagcaattcattaccatgggtggcaatcaaggctttattggcagtaatcacatgcttgccatttttaatggctgtttctaccagctcttttgctaaagtagtgccacccattaactctaagacaatatcaattgagtcattattaacgatttcaaaaggcgcttgagtgaactcaatgccctttgttgggcaaatgcgaggttgattgatatctctaactgcggcgtgcgttacttgtatttgtacgcctgtgcgacgcatgatttcagcttgattttttgctaaaatattaaccacaccaccaccaacagtgcccagtcccaaaatccctatattcataagttaatcctatctatgaatgaataaaggttggaattataccaatagagaccactgcattagattatttgttgagtgtaattgccacgcatttaagtgaacgggaatattgtgttggaactttatgttgattgtcaaataacacaggggctaaagatttgagcatatcttcataaatcgactttttaaagtcaattatcatctcaatagggtgccaataatccacccattgccaatcgtcaaactcaatgtcacagtgcgtgtctagtttgatattgctctcttcaccagtaagttttagcaaaaaccatacctgcttttgtccaatacaaagtggtttttgtctgcgtcttatgtgttgttttggcaaatcataacgcaaccattttggtgttttagcaatcaagtctacatgttcaggtaagagtccaacttcttcatttaactcacgaaacaaagcctcaagttcactttctccctcgtcaatgccaccttgtggcaattgccaagcatcctgttgatgacgcttggctaagagtacctgctttttgtcattggtaataacgataccaacattggcacgatacccctcttgatcaatcataataaggggtggttttttgttgttgagtgattaatcgtcgccaaatacacccaaaatatgcatcaaactgacaaacatattgtgtaatgctaaatacagactaaccgttgctgagatgtaattagtctctccgccattaataatagcggacatttgtgaaagcataaatgcacccatgattaataccacggcaaatgaaatggctaagctaacaaaagaagattcaataaaaaatatattaattaaatacaaaacaataatgccaatcatagcaaaaaatatcatgccattgagaaaactaaaatcttttttggtgttttgcgcataaaagctaattgcaaagaaggagacacccgtaccagttagtgcttgcattactaaatttgcaccatttggcgttgctaagtaatgcgtcaacatcggaccaagggaatagcccaacagacctgcaactgcaaatgcagttaaaatccccatattgctattttgagttcttggtaagacaaaccaaattactacaattactgcgattaaactaacgattgctgagccaaaacttgcgccaatagagattgaaaaccaagaagacaagccaccaaatactagtgtgtatgataataatttcatagtgtctgacaaaactttatttttaaccttggtaactcttattgttgccatatttgcaaatatattcataatttatcctttgttgttaagcgtgtaaaatgatttaattttatactaaaaaaaccaagatgaagttgattttaggcttaggaaaaacaggtgtctctattgcacggtttttaaccaaacaacaagttgcttttagggtggcagataatcgaaacacccccccatttttatcgcaatttaaaggccaatttaacacagaaaatttatttttaggcgactggaagcctgagttgttaaataatattgatgaagttattattagccctggggtcgctcaaagtgagactatcgtgatttgggctagggccaataacatccctattattagtgatatagcgttattttcacgccatgctcaggccccaattattggtattaccggctctaatggcaaatcaaccgttactcaattactcggtgagatgattgccaatgatggcaaaaaagtcgccattggcggtaatattggcaagccagcattagactgtttaagtgatgaaattgattattatgtattagaactgtctagttatcaactagattacacacagaatttagaactattaactggcgtagtgctcaacatcacccccgaccatcttgacagatacccaggtttccaacattatgtcagttccaaacttagcctataccaatattgccaacatccagttattaacgcagatgaaccactcaccccaacgatagataatgccaaatattttggtatggatatacctaagcaagatagtgattttggtactgttacctgccatggtagttgctatatcttaaaaggtgatgactcactgatggatgtagatgatatgctacttatcgggcaacacaatatagttaacgcattggcagcacttgctttaggcgaccaaatcgggcttaacaccgactcaatgattacaaccgtcaaaacctttaaaggcttagaacaccgcctagaatgggtagtaaaaaagcaaaatatcgattactataacgactcaaaagccaccaatgctatggctactattacagcattaaacgcactaatagacaaatatgaaaatattgtactcattgcaggtggcatcaaaaagcaagaagactacagtgctttatttgaattgattgataataatatatccaatgttgttctaatcgggcaaagcgccaaagaattaggcaacaacatccatactgcaaaagtcacctatactaactctatggaagcagcggtaaataccgccagcaccttaattgacagcggtgcaattttgctatccccagcttgcaccagttttgatatgtttgataattttgaacagcgtgggcgagtgtttaaacagtgcattgctgaattttaggcattaaaaaatccccataaagaagattttggtcgctataaaaagcggagcctacgaaaaataaatttcattggtatgaaaagcaaatttaataagcgatagtcagttacaatcaggtttcattataactataaaaaagtaaaattgtaatatattgtaaatatatgacaagaagttgataaactgaagtagaacaactatactggttagtgtttacataagtagtcaacccttaaaaaccacacaacaaattgatttataacaataaaaccaacaataaccctagacaaatcaaccaacttttgttaaaatacctcttatttcttggtcgttttgcttaaaaaaatgttaactaaatccagcccaatatccacccaatcaaatctttttcattcagagctcttttctcaattagatgtcaaagaccctttaatacaactagccaacactattaattggacagtctttgatgatgcctttgaacaacattactctcaaaacaatggcagaccctcaaaacccatcaggctgatggtaggtttgcttttgcttaaacaactagaaaacctctctgatgagcgtgttgttttgcaatttaagcgcaacccttattaccaatacttctgtggctactcaaactatataccaggcatgccttgcaatgccaccgagttggtgcactttagaaagcgtataggcgttaaaggttttaatcttatttttaaaatgagtgttgccttgcatggcaaacaagcccaagaagcaacagtattaattgacaccacnnnnnnnnnnnnnnnnnnnnnnnnnnnnnnnnnnnnnnnnnnnnnnnnnnnnnnnnnnnnnnnnnnnnnnnnnnnnnnnnnnnnnnnnnnnnnnnnnnnnnnnnnnnnnnnnnnnnnnnnnnnnnnnnnnnnnnnnnnnnnnnnnnnnnnnnnnnnnnnnnnnnnnnnnnnnnnnnnnnnnnnnnnnnnnnnnnnnnnnnnnnnnnnnnnnnnnnnnnnnnnnnnnnnnnnnnnnnnnnnnnnnnnnnnnnnnnnnnnnnnnnnnnnnnnnnnnnnnnnnnnnnnnnnnnnnnnnnnnnnnnnnnnnnnnnnnnnnnnnnnnnnnnnnnnnnnnnnnnnnnnnnnnnnnnnnnnnnnnnnnnnnnnnnnnnnnnnnnnnnnnnnnnnnnnnnnnnnnnnnnnnnnnnnnnnnnnnnnnnnnnnnnnnnnnnnnnnnnnnnnnnnnnnnnnnnnnnnnnnnnnnnnnnnnnnnnnnnnnnnnnnnnnnnnnnnnnnnnnnnnnnnnnnnnnnnnnnnnnnnnnnnnnnnnnnnnnnnnnnnnnnnnnnnnnnnnnnnnnnnnnnnnnnnnnnnnnnnnnnnnnnnnnnnnnnnnnnnnnnnnnnnnnnnnnnnnnnnnnnnnnnnnnnnnnnnnnnnnnnnnnnnnnnnnnnnnnnnnnnnnnnnnnnnnnnnnnnnnnnnnnnnnnnnnnnnnnnnnnnnnnnnnnnnnnnnnnnnnnnnnnnnnnnnnnnnnnnnnnnnnnnnnnnnnnnnnnnnnnnnnnnnnnnnnnnnnnnnnnnnnnnnnnnnnnnnnnnnnnnnnnnnnnnnnnnnnnnnnnnnnnnnnnnnnnnnnnnnnnnnnnnnnnnnnnnnnnnnnnnnnnnnnnnnnnnnnnnnnnnnnnnnnnnnnnnnnnnnnnnnnnnnnnnnnnnnnnnnnnnnnnnnnnnnnnnnnnnnnnnnnnnnnnnnnnnnnnnnnnnnnnnnnnnnnnnnnnnnnnnnnnnnnnnnnnnnnnnnnnnnnnnnnnnnnnnnnnnnnnnnnnnnnnnnnnnnnnnnnnnnnnnnnnnnnnnnnnnnnnnnnnnnnnnnnnnnnnnnnnnnnnnnnnnnnnnnnnnnnnnnnnnnnnnnnnnnnnnnnnnnnnnnnnnnnnnnnnnnnnnnnnnnnnnnnnnnnnnnnnnnnnnnnnnnnnnnnnnnnnnnnnnnnnnnnnnnnnnnnnnnnnnnnnnnnnnnnnnnnnnnnnnnnnnnnnnnnnnnnnnnnnnnnnnnnnnnnnnnnnnnnnnnnnnnnnnnnnnnnnnnnnnnnnnnnnnnnnnnnnnnnnnnnnnnnnnnnnnnnnnnnnnnnnnnnnnnnnnnnnnnnnnnnnnnnnnnnnnnnnnnnnnnnnnnnnnnnnnnnnnnnnnnnnnnnnnnnnnnnnnnnnnnnnnnnnnnnnnnnnnnnnnnnnnnnnnnnnnnnnnnnnnnnnnnnnnnnnnnnnnnnnnnnnnnnnnnnnnnnnnnnnnnnnnnnnnnnnnnnnnnnnnnnnnnnnnnnnnnnnnnnnnnnnnnnnnnnnnnnnnnnnnnnnnnnnnnnnnnnnnnnnnnnnnnnnnnnnnnnnnnnnnnnnnnnnnnnnnnnnnnnnnnnnnnnnnnnnnnnnnnnnnnnnnnnnnnnnnnnnnnnnnnnnnnnnnnnnnnnnnnnnnnnnnnnnnnnnnnnnnnnnnnnnnnnnnnnnnnnnnnnnnnnnnnnnnnnnnnnnnnnnnnnnnnnnnnnnnnnnnnnnnnnnnnnnnnnnnnnnnnnnnnnnnnnnnnnnnnnnnnnnnnnnnnnnnnnnnnnnnnnnnnnnnnnnnnnnnnnnnnnnnnnnnnnnnnnnnnnnnnnnnnnnnnnnnnnnnnnnnnnnnnnnnnnnnnnnnnnnnnnnnnnnnnnnnnnnnnnnnnnnnnnnnnnnnnnnnnnnnnnnnnnnnnnnnnnnnnnnnnnnnnnnnnnnnnnnnnnnnnnnnnnnnnnnnnnnnnnnnnnnnnnnnnnnnnnnnnnnnnnnnnnnnnnnnnnnnnnnnnnnnnnnnnnnnnnnnnnnnnnnnnnnnnnnnnnnnnnnnnnnnnnnnnnnnnnnnnnnnnnnnnnnnnnnnnnnnnnnnnnnnnnnnnnnnnnnnnnnnnnnnnnnnnnnnnnnnnnnnnnnnnnnnnnnnnnnnnnnnnnnnnnnnnnnnnnnnnnnnnnnnnnnnnnnnnnnnnnnnnnnnnnnnnnnnnnnnnnnnnnnnnnnnnnnnnnnnnnnnnnnnnnnnnnnnnnnngccagtcatgataaaaatattcacgactcaaaaaccttaaatgttgccataagccatgctaatagcaacagaaacaaacccatcaaacaagcggtatgcgaccgaggctatgttggtgcaaaggtagtgctcggtgcaaacatcattttgcctaaaaaagcccttaagcgagacaatcgttatcaacaagacaaaaagcgcaaactgtgtaaaagacgcgcagcgattgagccgattatcggacatcttaaatcagattttagactctctagaaacctactcaaagggcaagttggtgatgagattaatgttttaatggctgcctgtgcttggaatttgagaaaatggctggtgatagccactatttttttgttttggcaaaaactgggcttattttttgtaaaatacctaaggttttttgtggtgctggataaaaagcagttttgttgatttagatggttggcaaaatggggggttttggtttggttggaatgagtttttaaggggcgactaaataataattttaacggggaaataatgaataaaaaaatattaggcttagatttgggtagtaattccattggttgggcattgatgaatgaagcagatgatgaagtaaatcagattattgatttaggttcgcgtatttttaacaaggcagtggaggaaaaagtacccacacctaaaaatcaaaaacgccgagatatgaggctagggcgaagggttttacaacgccgagcaaggcgtaagcaaagaatggctcattatttaatctcacttgatttattgcctcaggaattaagtaacaattttggacaagaaaaattacttaatgagttaggtgacccttatgagcttcgcactaaaggcttagatgaacaattaaaagcacacgaattcggcagagtacttttgcattttgtcgcaagacgaggctttttatccagtaaaaaacaaatagcaggggatttggtggatgaccccgatacacaaacttatttatcaacacttgatagcagacaaaccagaggcgaagaagggcaatttaaagcggacattgcacaagtttatcaagcgattgaggataataacgctagaactttaggtgagtatttatttaatcttgaagttgggaaggttaaacgcaatcgctcacatgatggtgggcatttgcgcactgacagagcaatgtataaagatgaactgtgcaaaatttggaaaaaacaacaagtatattttgatttgccagatgaatttattagtgaagtaaaaaaaattattttctatcaacgccctttaaaacttagaaaagatagggtgggtaaatgctcattagagtcaaaacattatcgtgctaatactgcaaggctagaagtgcaaaagtttagatacctacaagatgtgaataacttagaatattttgagcgtcacagtgaacagtggcttaaattaagtgatgagcaaaaagacaaattaaaaatttattttgagtatcatcctgaaattgcaataactgcattaaagaacgaattaggtttagataaacctaccaaaataaatttagagaaaaaaaatttaaaaggcaatattactgcttgtgaaattcgtgatgtcattggcaatagttgggatgaatactcaaacaaagaacaaatccaattatttgaagatttatttactattaagaaaaaatcttcacttaaggcaaggctaatcactcattgggattttgacaaacaaactgcagttaaactctgtttgattgagtttgaaccaagccattcaaatcactctttaaaagcaattaaggcgttgttgccatttttagagcaaggtttgcgttatgaccaagctagagttgaggcgggttatggctatgaacaaaaagaggttgaagtgcaaaacaacttacctgctccaccagaaacttccaatccaattgtaaacaaaggtttgcacgaattacgccgtgtggttaatgccgttatcaaacaatatggcaagcctgacattgtgcgtattgaaatggcgcgtgatttggaaatgaataccacgcgctataaagaaaaccaaaagagacaaaaagacaatcaacaagccaatgaaagggcaaccaaggcatttatagaagaaacaggcgaaaaatatccttctcatgatgaaaaaatccgttatcgcttatgggaagaccaatcttacaggtgtgcttatagtggtcatacaattgcattggggcaagttttctcagcagactgcgaaattgaccatatattgccatttaaaaaatcgcttgatgatagttatatgaataaagtcttatgctttgaaaaagaaaatcaaaataaagcagataaaacaccaattgatgcatggggtggcgataataataaatggaatcaaatcacacaagctattagtcgttgggataaatctttaaaatcaaaaatcagtcgtttttatatgagagaaaatgacttggaacgaggctttatttcatcccaactcaacgatacgcgctacatctcacgccttgcacagaattatatgcgtgaattaggttgtgatgttaatgtcaccaaaggctttgtggttagccaaattcgtcatcaatggggctttaataatttaattggtgaaactgataaaaaagagcgtaccgatcatcggcatcatgctattgatgcagttgtgattgctagcacttctagaagtttatatcaacaagccgttaatcaaattgaacgcaacaagttaaaaattcctcaaccctataacgatattttgcaagaattaggtgaaaaattaaagcatatgattgtatcgcacacaccacaatgcaaattatcaggtggtttgcatgaagagactggcgctggatatattgccaaacatggtggtttggtttatcgtaaaacactgaatccaaaatttagcattcaaaatgccgagaagattgttgatgaacaagttaaaaatattgttctagagcatattaacaagcacacaaatagcgaagaagcatttaatgaggaaaatttaaaaaccttaaaattgggcaaaaaccctattaaacgggtaagagttttgcagtcaaaaataaacacgactaaaaataaaacggcagaagatattttgcaacaaagtaaatttggtgttaaagacaaatcaggtaagatttttaaatatatgtcgtatggcaatactcaccatgtggaaattattcaacacaaaaaaactggcaaagttaaaggtgagtttgtaacaatgatggaagcacataaaagggcgatgactggcacaaaatacgcacaaaaaagagaagtagtgcgagaacctatgattaaaactaattatggcgatgattggcaatttttaatggcgttacatattaacgatacagtaagtatagaaaaagacaatggtgaaagaatattttatagagtacaaaggttaggtggaggttacgatattacccttaggttaaatattgcatcaactattagtgataagaagcagtgcttacctctaatgacaaagggtattattgaaaacaatctaatcaagcacaaggttaacgctattggcggtttaatcgatgattaaacgcattgttgaggtatcaaatcctagttatttacacctcaagaacaagcaactatttattgaacaaaatcataaagtagtggcgcaggtgccaatagaggatatcggggtattaattttagagcatagtgccattaatattactcagcccttaattattgaatgccaaaagaacaacacggctattattttttgcgatgaaaagcacctgccatattccactattttaccaatttctgagggtaataatctacatcaaaaaatcctcaagcaacaaatcaatatcactgagccagtgcgtaaaaacctatggaaacaagttatccagcaaaaaatcaccaatcaagccaatacgctcaaacagtttgataaatcttttatgcgtttagagaaattagcaaatgaagttaaatcaggtgatagtacaaattgtgagggtttagcagcacaatattattggaaggctttatttggtaaaggttttgtgcgtgaccaaaatgcagagggtgtaaactctgtgctaaattacggttattccattattcgagcaatgattgctagaagtattgtagcaagtgggctacaccctgctattggcttatttcatcataatcagtataacggcttgtgtttggcggacgatttaatggagccgtttcgcccttgggtagatagcatagtctataaattatatcaagagaatgcaaatatcaatatcaccaaagaagtcaaaattccttttttaaatttaattagcgaaaatgttaaattcaaaaataagcaaatgccactaatgatatctgtgcattatttaatggcagatttaaaacgcaattttgccaaagaaagtaaacgactggtctatccaaaaaaataatgtttggaggtttgcaaactatgtggacaatagttttgtttgatttaccgacagatggcattgaaatgaaaagggactatcgctattttcgtaaattcttacttgaaaatggcttcaccatgatgcaatattcagtatatatgcgccattctagtagcgaagaaaatgctcaagtacacattaatcgagttaaagtccacttaccatcagacggcgaagtgcgtattatcaaaataactgataaacaatttggacggattgaggttttttacggaaaaaaacgccgacctatcgaaaaagcaccagaacaattatcatttttttgactagaaaaaatgataaaagtctgatattaaagcattttagacaaggtgattgtaactgactatcgcctaaatgcaaatcacaactatataaaattgaataattctattatcattgtaactgactatcgcctaaatgcaaatcacaacaatcgcgagtaagctaggaattggtgttaattgtaactgactatcgcctaaatgcaaatcacaactgatagccagtggttgtcgtttccgtttgcattgtaactgactatcgcctaaatgcaaatcacaaccttcaagtgcttatactcgatactggcacaattgtaactgactatcgcctaaatgcaaatcacaacttgtcaatcgataaatgataaaaggcatcttattgtaactgactatcgcctaaatgcaaatcacaactgtttttgactatttttgatttttgcaattgtaactgactatcgcctaaatgcaaatcacaacttaatttgaagtctagcggcaggaggtttattataactgactatcgcctaaatgcaaatcacaactcacacaccattggcaaccatgattatgctattgtaactgactatcgcctaaatgcaaatcacaaccactgtggtgaatatggcgatttgactcggattgtaactgactatcgcctaaatgcaaatcacaactgtcgtatatctcttttagccctttgttcaattgtaactgactatcgcctaaatgcaaatcacaactagtctttcttaactttccttttacgaatgattgtaactgactatcgcctaaatgcaaatcacaactatttttgccagataccccattatttcatattgtaactgactatcgcctaaatgcaaatcacaactgaattgggtacactctgccgtcgaacaagattgtaactgactatcgcctaaatgcaaatcacaacataaagctcttgctgatgtttatggttctgattgtaactgactatcgcctaaatgcaaatcacaactataaaacagttatctcaccgaacaccaacattgtaactgactatcgcctaaatgcaaatcacaacgacaatatacgcacacaagcaaacactgttgattgtaactgactatcgcctaaatgcaaatcacaacatggtatcttcgacacattctaactacgggattgtaactgactatcgcctaaatgcaaatcacaaccataagagcatactgctttctcaatggttgattgtaactgactatcgcctaaatgcaaatcacaacaaacatgcctgtaagacgcgatgtaaacgattgtaactgactatcgcctaaatgcaaatcacagcgacaatatatccccaagctcagtatctctattgtaactgactatcgcctaaatgcaaatcacaactaagtggtctttgtgcgtcctaatgattaaattgtaactgactatcgcctaaatgcaaatcacaactcttggtctttgataaaatattgctgctctattgtaactgactatcgcctaaatgcaaatcacaactacgctaatatcagacgagcacttaagcacattgtaactgactatcgcctaaatgcaaatcacaactaataatagggggaggggggtgttaaaaggattgtaactgactatcgcctaaatgcaaatcacaacnnnnnnnnnnnnnnnnnnnnnnnnnnnnnnnnnnnnnnnnnnnnnnnnnnnnnnnnnnnnnnnnnnnnnnnnnnnnnnnnnnnnnnnnnnnnnnnnnnnnnnnnnnnnnnnnnnnnnnnnnnnnnnnnnnnnnnnnnnnnnnnnnnnnnnnnnnnnnnnnnnnnnnnnnnnnnnnnnnnnnnnnnnnnnnnnnnnnnnnnnnnnnnnnnnnnnnnnnnnnnnnnnnnnnnnnnnnnnnnnnnnnnnnnnnnnnnnnnnnnnnnnnnnnnnnnnnnnnnnnnnnnnnnnnnnnnnnnnnnnnnnnnnnnnnnnnnnnnnnnnnnnnnnnnnnnnnnnnnnnnnnnnnnnnnnnnnnnnnnnnnnnnnnnnnnnnnnnnnnnnnnnnnnnnnnnnnnnnnnnnnnnnnnnnnnnnnnnnnnnnnnnnnnnnnnnnnnnnnnnnnnnnnnnnnnnnnnnnnnnnnnnnnnnnnnnnnnnnnnnnnnnnnnnnnnnnnnnnnnnnnnnnnnnnnnnnnnnnnnnnnnnnnnnnnnnnnnnnnnnnnnnnnnnnnnnnnnnnnnnnnnnnnnnnnnnnnnnnnnnnnnnnnnnnnnnnnnnnnnnnnnnnnnnnnnnnnnnnnnnnnnnnnnnnnnnnnnnnnnnnnnnnnnnnnnnnnnnnnnnnnnnnnnnnnnnnnnnnnnnnnnnnnnnnnnnnnnnnnnnnnnnnnnnnnnnnnnnnnnnnnnnnnnnnnnnnnnnnnnnnnnnnnnnnnnnnnnnnnnnnnnnnnnnnnnnnnnnnnnnnnnnnnnnnnnnnnnnnnnnnnnnnnnnnnnnnnnnnnnnnnnnnnnnnnnnnnnnnnnnnnnnnnnnnnnnnnnnnnnnnnnnnnnnnnnnnnnnnnnnnnnnnnnnnnnnnnnnnnnnnnnnnnnnnnnnnnnnnnnnnnnnnnnnnnnnnnnnnnnnnnnnnnnnnnnnnnnnnnnnnnnnnnnnnnnnnnnnnnnnnnnnnnnnnnnnnnnnnnnnnnnnnnnnnnnnnnnnnnnnnnnnnnnnnngccagtcatgataaaaatattcacgactcaaaaaccttaaatgttgccataagccatgctaatagcaacagaaacaaacccatcaaacaagcggtatgcgaccgaggctatgttggtgcaaaggtagtgctcggtgcaaacatcattttgcctaaaaaagcccttaagcgagacaatcgttatcaacaagacaaaaagcgcaaactgtgtaaaagacgcgcagcgattgagccgattatcggacatcttaaatcagattttagactctctagaaacctactcaaagggcaagttggtgatgagattaatgttttaatggctgcctgtgcttggaatttgagaaaatggctggtgatagccactatttttttgttttggcaaaaactgggcttattttttgtaaaatacctaaggttttttgtggtgctggataaaaagcagttttgttgatttggatggttggaaaaatgggtggttttggtttgtttggagtgagtttttaaggggcgactatttaacttggcatactgagttatattttttggaaaaaagaccaatctaaggtacttgctcaaacaaccctatttagtattgttgggctgggctttatcggttattttttggcgtctttattggatttaaaaggtcttgaaactatttctgctgggttggagagattgactttgtttacctatcctatttttattgcgattttaggtgcaatttacattaccccaaaacccctgacaactttttaaaatttcttatatagaacatcttaagagaccttcttcttttcctgattaaattttatactttcttgatacacatccattggttttttatatttcaatgtttcatggaatctttgatgattgtaaaactcaatataatcatccatatcagtgattaaatcactaatggattgatattcatttaaataaattctttcgcattttgcgctcctccagaaacgctcaatacagatattatctgtagccctacctttaccatccatagatattgtaatacctaaatcttttaatcgtttagtgtgtatctcactggtatattgactaccttgatcagtgttaaatatctctgggtgtgggtgtgggtgtgggtgtgggtgtgggtgtaggtgtttctctaaagcgtcattaagtacacccattaccaattgagaatccatggtattggatatcctgtgtgatagaacagcttttgaatgccaatcaataatagctgccatatagaccataccccctgcaatcttgacataggtaatgtcggtgctccatacatggttagaatgactgatattaagccctcgtagcttgtaactgtatttcttgtgtgctttgattggtatagttgtattaacttgtttaactgctaatactgcctttaaacctaattcttgccgatagcgtgctacggtgtgtaaactcaccttgtagccgtcttcaagtaattgttgatggatttttttctcaccatagatgggtattttttcaaacaccttggtgatgtggtttttgatagattgtttggtgttatttacttttggcttgtaataaatcccacttctgttaacacctaacaattgacattgatgattaactgacaaagaatatgaggcgtgcaatagggaaggcttgagatcaactaactgtttgcggttagatgagcccaagctttttagcttttttgctaaccactccttctctacggttaccttgcctactagtgtagttaaacgctcatttcgcatctgtgctttgataagttcgtctttgtattctttgactgccttggatggctccatggcaatctctgcgttagcaaggaaagtcttcttccaattttgtagattctgaggcaaaatattatgcttgctggcaatctgcactatggcgctttcattttgtagtaattcaagtactaatttagtcttgaatgctgaggtatattttgttcgttttttactcatttttttactccgatttttttgtttagtttaactcgttcgaaataagaaagtttaaattgttgtctgaaattgttggggttttatattcgccgatctttaatatttataagattctgacttaaatggaccattttttggcgtgttgatgtaatcagcttgtttgtcggtgagtttggttatcacgccaccaaagccagctaccatatcactggcaacttcttcatcgagttttttaggtaagacttttacataaatctcaccacctgtattggcaaaggattttccatataaatatatttgcgccaatacttgattagcaaacgaaccgtccataatgcgacttgggtgacctgtggcattaccgagatttaccaagcgaccttcagataataaaattaaataatcatttttattgtcacttttgaacacacgatgaacttgcggtttaacctcatcccaagtccagttgtcgcgcatatattgtgtgtcaatttcattgtcaaagtgcccgatattgcaaaccactgcaccttgtttaagcatttgcaacattgcgctatcgcatacattaaggttgcctgttgtggtaacgattaagtctgttgtggctaataatcgtttattaatatccttagtttcaccagtattttcaccttttttataaggagaaacaatttcgaaaccatccatacaggcctgcatcgcgcaaattgggtcaatttcactaactttcacaatcataccttcttgacgaagagattgcgctgagcctttgccaacatcaccataaccaatcactaaggcttttttacctgccattagcatatctgtgccacgcttaatcgcatcgttaagtgaatggcgacagccatatttgttgtcattttttgatttggtaacagaatcattcacattaatagcaggcactttaagtgagccttcttccagcatttctaataaacgatgaacacctgttgtggtttcttcactaataccatgaatatcttttaacattgctgggtatttttcgtgcaacatttgtgttaagtcaccgccatcatccaacaccatattggcgttccaaggcttgccatcagcaaggatggtttgttcgatgcaccacaagaattcttcttcagtttcgcctttccaagcgaaagtagggatattagcagttaccattgccgctgccgcatggtcttgcgttgagaaaatattacaacttgaccagcgaacctgcgcacccaaatcaaccaaggtctccattagtacagcggtctgaatggtcatatgaatacagcccaaaattcttgcatcttttaaaggctgtgttgtgctgtatttagcgcgaagtgccattaatgcaggcatctcaacttctgccagttcaatttctttacgaccaaaattagccaaagctatatcagcaactttgtagtcgttattattaagggtattgttactcattattattgtcctaaaaggttaaaaaataagcgtcgttttgattttgccaagcctgattgaaaaatatttttcaatgcaacgccctttggtatgttgcatattttacttgattttttcccaagtaatgtcatcttctgtgcgaccaaaatgtccgtaagcagccgtttgctgataaatagggcgttttaaatctaacattgtgattaaacctttagggcgtaaatcaaaattttcattgacaaatttttcaatttccaccatgggtacttttgccgtgccaaaggtttcaatactgattgaagttggctctgctacaccaattgcataagagacttgaatttcgcatttgtctgctagaccagtagccacaatattttttgctacataacgcgttgcataggcggcacttctgtctacttttgatgggtccttgcctgaaaatgcaccaccaccatgtcttgccatgccaccgtaagtgtccacaataattttacgacccgttagtcctgcatcaccaactgggccaccaatttcaaaggcacctgttgggttgatgtggtattgtgttttatcacttaaccactgtgcgggtaagataggttttataatctcttccatcactgcttctttaagttctgcttgagaaatacctccatcatgctgtgtggataaaaccaccgcatcaacgccaaccacttgagcgtctttgtaaatacaagaaacttgtgattttgcatcagggcgcaaccatgacaattgtccgcttagcattaaatctgcttgttgcttaaccaaacgatgtgcgtaagtaatcggtgctggcattaaaacatcggtctcattgcaggcgtaaccaaacattaagccttggtcacctgcgccttgttcatggtctttggatgtatcgacacccattgcaatctctggtgactgctcaccaagtaagttggtgattttgcaattgtcaccagtaaaaccgtattcttctttggtgtagccaatattattgatggtttcgcgtacaatcttgtcgtaatcaacgctagcagtagtggtaatctcgcctgccaatataacattgttatctttaaccaaagtttcgcaagccacacgggcatttttatcttgcgctaaaatattgtctaatattgcatcagatatttggtcgcaaactttatcagggtgtccagcagaaacggactcggaagtgaaaatcattttttgttctcctatttgaaaatctttaataacaatcaataattattaaaaattctcattaaaaaacccacaaagtgaggttttcagaagaaatcctactttagcttgttttagtttgcctttacgggtaacaaacgctagcaattgggataaatcagcgtgtgtggagattataacagaggtgattaattattctaaacttatttttagagacagtgcgctaataaacggcgcaagcatcaggcttactactaagattgtagctaagaagtacaactgagcactaatgtctaagccaacagatacttgagaaaccgcagaggaagcgaagataagaattgggatatacaaaggtaatattaacaaggacaacaacattcctgagtttttaataccgacaatgagtgaggcgccaatggcaccaattagactaaggcttggtgtggcgagtagcagggtgagcattaagattttaaccccttcgttgtctaagaacaaaaacaagccaagcaagggtgataataaaatgataggaataccagtcagtagccaatgagcggtgattttggatagaatgagcaagggtagtgaatggtgagagataagcatttgctcaagcacaccattctcaaagtcatgatgaaacaatgaatttagagacaataacacagctaacatactagctacccaaataataccagcagcaatttgtgagagtgttgtggcttctgggctaatggctaatgggaatagtgatacagaaatcacgaaaaataataaaggattaagcacacttgatgggttacgaattgccacatttaagtcgcgtttaagtgtttgcaagtagatattcattgttataacgctaataccttttgattttttagcgctgagtcttgatgtgtggtgaataagcacagcccaccttgcttacagtgttcgccaatgcaccgctcaatgatttcaacaccttgagggtcaagtgcggtaaatggctcatctagtagccaaactttagcgttagatacaaacaaccctgccaaaatcacacggcgtttttgccctgctgagagtctaccacagtattcttcttcatagccttgtaaaccgattttattaagtgcatcaattaatttttgttcatcagttggttgattaagtgcgtttaaatatttaagattttcaaggcaactaagttcagcactaagcgcgctcaaatgacctaaataaaaaactgcattttgatattcttctgatttgacagggtgatcgtccaagtgaattgcaccctgttcttgtgcattaagtccagccaaaatttttaacagtgaagttttgccactgccattggtgccagtaatacgcaaaatatcacctgaattaatcactaatgacaagtcgtcaaataaaaggttgtaacctttttgaca

SEQ ID NO: 673 - DNA, 23051 bp, synthetic construct
  source 1..23051: mol_type = other DNA
  misc_feature 1..23051: note = Synthetic
ctgattagaaccatgattaaacagggctctaatttaagctttagagcgggtgccggtattgtatttgactctgagtcaaaacgagaactagaagaaaccttgcacaaagcacaaggcattcttaaagttttttcttaaggcttgaatttagaagtcatagggtagcggcgctctttaccaaaggcatttttactaatttttggcccaggtgcgctttgtctacgcttgtattcattgttaagtaccaatcgactaatgcgtgttaccgtctgtttgtcaaaacccattttgacaatataatcaatagagtgtcgttgctctacaaataactctagaatatcatcaagctcatcgtatggtggcagtgagtcttgatcaacttgatcaggtgcgagctctgcagaaggctcgcgatcaatcacacgtctgggaatgatataagacaaagtgttgcgatatttagccaatcgataaaccatagttttggatacatccttaagtggcgcaaagccaccagacatatcaccatacagagttgcatatcctacagccatttctgatttattgcctgtggttaaaacaatttttctgagcttattggaaatggccatcagcagggtgccgcgcacacgagcttgtaggttttcttctgtcgtgtcagctttcatgccactaaacaacccactaagctgtgtgttgaaattttcaaccatagagtgaatggcaatctcatggtagtcaatattcatagtactggcttgtgttttagcatcttcaaggctcatgctcgaagtgtaagtgtaaggcatcataatagccttaatatgctcactaccaatggcatcggtagcaatggcaagcgttagcgcagaatcaataccacccgatagaccgatgaccacaccattaaagacgccatttttattaatatagtctttggttgcaagcaccaaagcagcataaatagttttttcaatactattatcgtcagtagtatccaatgttgctgatgatgtactggccacctcaaaaaagggtagttgatgggtgatttgtgcctttgcattcatgatgaatgagccaccatcaaagacaatttcatcttgcccacctactaaattagcatacacaaattcaacttgattctctagtatgcgttttgtaatctcatcaaggcgctgttggtgtttaccaatatgaaaaggcgaagcattaatgctaataatggtttgcacgccgtacttgactgtttcattaacgatatcagcatcccagatatcagcgcaaactagtagacccaatctttgacccttaatggtaaagataaaaggtttgtttccagcagtgaaatagcgcttttcatcaaagacgctgtaattagggagttgttgcttatggtaagtatggatttcaccatcttgaataagataggcagagttgtacaaaaattttccttgcttgcaaggtgcaccaaaaacaattgtaatatcgccaggaatgctatttttaattaagtttatttttttctcaacttgttgcataaagccatgacgtaataataaatcttctggcggatagccaaccagtgctaattctggaaataccagtagatcagactcttgtttagcagcttcaatactcaaatctataattttttgagcattgttatctaaatcgccaacagttgggttaatttgcgcaatatcaattttgatagactctgaggtggttgaaagattatctagctgcttctgccaaaatatggcctttgatttatcgcctttaatttttgcactttcgagtttggtgtaagccactacttcagcagggttgagtttcaaaatatcggcaaataaccaggcatgagtttcagaaagggcagattttcctgatttatatttacttaaattagattggttgatgccatattcttgagagattttgtagtctgaaaagccagtctttctgcggactttagctagataatctttggttttatttgccatatttttatatagttattacttgaattttttacctattatagttaatttttaccactagtgtataagggttaaattagttaaaaaataactagcagttaaaaattacataaaacacacataactcattgatttttaactaattaaaatatatttaatttttatttaaaaaagcctttacacggctcaaaaaaacacggtatatttcgatcaaattcaataacaaaaaaaggaaaatgcaatgaatcaaatgcatgcacatttactggcagaatctgaactaaaaattgatactgttaagatccagcagcaagcctatttaggtgatgctgaagcgcaatacaaattggctgatattttccaaaaaggtaaagatgttgccaagaactcaactaatgctttttattggtaccaaagagctgctaaacaaggtaatttagcagcacaatttaatgtttggtatgcctacttaacaggcgaaggcacacaagcaaacgagcaattggcagacaagtggtatgctagagcaacgttaaaaaattcaagctcaacacaatcaatcattaaccagttaattagcacaatcattcattaaaattaatctatttactctttaagggggggtgaacatcgcactacacacagttatctattcgtccgcagcagttatcatgtcacttagcttaacattgattcactagctaatgactttatccatcgtcattaagccggtattggcattattagctgctttattagcaagcacaacactggtctcggcctacacaagttatgcaccaatcgttgattctaagcatttaagcatcattataagtgtcactatacttctaggtcttgttgcactctatcaaaagcagcattaattttttttgaaaaaccacctgcccatggtgttttttttgctaaacttctcaactgtggtatttaattaaatactgcttttttttattaatctcaataaggggaagttttataaatcaattattaaaattgtctgctgtatcgttattaacggtcggtagttttagcgttcaagcgggtatatttcatagtgatactttaaaagatgtgcaggctaaaggtagcttaacatgtggcgtatctacaggtacacctggtttttctagtcctgactcaagtggtaattggactggtattgatgttgatgtttgtcgtgcagttgctgccgctacattaggtgatgctaaaaaagtaaagtttgtaccattaacggctaaagagcgttttgttgcattatcatctggtgaaatcgatatgctttcacgtaacactacttggacgcacactcgtgatacttcattaggtcttacatttgctggcgtaaactactatgacggtcaaggcttcatggttaagaaagcattaggcattaacagtgtgaaagagctagatggcgcttcattttgtattcaagcaggaacaacaactgagcttataatttagctgattacttccgttcaaataaaatgaaatttaaagcggttgcttatgatacttctgcgcaaaccaaatctggttttgaagctggtcgttgtgatgcactaacttcagacgtatctcagcttgctggccttagatcaacacttaaagatccttcatctgctgtagttttaggtgacgttatctctaaagagcctttaggtccagttgtacgtaaagatgacaacacttggcttaatatcgttagatggtcacttaacgcaatgattgaagcagaagagttgggtgttacttcagctactatcgatgatgcttctactagtcctggtatccagagattacaaggaaaatctggcaagcttaatgaaagcttaggtcttagcaaagattggtcgcgcaatattattgcacaagtaggtaactatggcgaaagttttgaaagaaacatcggcatgtctacgccaattcagcttccacgtggtgtaaaccagttgtggattaaaggtggtatcttgtacgctccagcgtttagatagagtctaaactaaatataaaacggctaactcaacaaggttagccgttttattattgaggttttttgtgtttacaaaactaaaatcactactatataacaacgaagttcgagcaatcttatttcaggtgttagctgttgttgttattgcttattttgcttatcaagcgtttgataacatgatgcttaatatcgagcaaagaggcattagaagtggttttggttttttaaatgatgaagctggttttgctgttaatgataatttttttttggaatattcaccagcatcaaccaatcttcaagcgttttatgttggtattgttaatactttaattgttgcaataaccggtatattttttgcaacagttctaggtcttattgttggtatttcacgcttatccagcaattatttgattagaaagatggccaccgtgtatattgagatttttagaaatataccaatattgcttcaaattctattctggtattcaatcgcactaagtgccttcccatcccctaaaaatagtatcaatttctttgatagtattttcctaaattcaagaggcttgtactttcctaagcctattatggagggtgagttctattttgtacttgcaagtcttgttgctggtattgttggctatatttttattaaaaaacatagtaataagaagcatgatgaaacaggcgtggttactaatatcattccacactttttaggtctggttgtgctgctgccgattgtagtctatttagtttctggtgcgcaattagaatatccagcactaaagggttttaactttagaggcggtacagacttatctattgagttttttgctttagcctttgctttgagtatttatgccgctacttatattgctgaagctattcgctctggcattgagtctgtagataaagggcagaaagaagcagcagcagcaatgggtttaacacagacacaagcactaagacaggtagtattgccacaagcgctaagagtggccataccaccgattattaaccaatacttaaatcttactaagaactcttctttagcggcggcagtcggctatacagaattagtgaccatattctcaggaacggtcttaaatgtagttggccaagcgattgagattattatattgacgatgttggtgtatttaacaatatcccttgtcatatcattaatcttgaatatttttaataagaaaatgcaaattaagggcaagtaactattatggcaatctacccgttaaaagaaacaagaacaccgcctaaatcgcaaaccaaggccattgcatggctaaaagataacttgttctcatctatatctaatgcggcacttacttttgtcgcgttatatgtcatctacttactcctgccaccgattttaaattggacaatttttgatgctaattttgatttgactgcagataaccagtcttgtggccgagagggtgcgtgctggtcctttattaatgccaatcttaaaatgtttatttacgggttttatccaaaagaagaactgtggcgtgttaataccatgttcggccttattgcagttctggttatgtttggatcgcttattaaaaaaacgcaatatagagtgcattatattatcggttcttttttgatatatcctgttgttgcttttgtattactatacggaggactaggcctagagatcgttgaaactgacaaatggggtggacttacactgactgttatagttgctgctattggtattatcgcctcctttccattaggtattttatttgccttggggcgacaatctgaaatgcgtgttgtgagatttatttcagtgatatatatcgaatttgtacgtggtgttccgcttattactattttatttatggcctctgttgtgttgccattgttcttctctgcaggtatggattttgacaagctacttagagctttaattggtataaccttgttccaaacagcctatatagcggaagtgattcgcggtggttttcaggctattcctaaggggcaatatgaagctgccgatgctgcaggtcttagttttatgcaaaaaacaattcttattattttgccacaggcgcttaagatttctatccctaatattgttggttcgtttatcgcattatttaaagatacaaccttgctactgattattggactgtttgatatgttggcgattgtaggtgcagccagcagcaactctagctggctaggcagagaaactgaaggctacgtatttgttgccatggttatctgggtgattttatattcaatgagtcgttattcaaaaagattagaggtgcgttttagtactgaacacaggtaggtaaaaaatgagcgaattaataaataaagaaataggcaaaaaagattgttgcaatattattgaaataaaagggctgaataagtggtatggcgacttccatgcacttaaaaatattgatttaaacgttaaagagggtgagatcattgttatttgcggcccatcaggcagtggtaaatctactttaatccgttgcgttaattttcttgaaaaatttcaagagggttctattactgttgatggtacaaagcttacagatgatgttaaaaaaatcagacaaatacgatcagaagtgtctatggtatttcaacatttcaacttgtttccgcacctgagtattattaataacctaaccttggcgccaatttgggtgcataacgagactaggcaagaagcaagagagaaagccctgaagctactagatagagttggtattaaggaccaagctgaaaaatatccaaatcagctttctggtggtcagcagcagcgtgttgctattgccagagcattatgcacatcgcccaagattatgctatttgatgagcctacttcagcgcttgatcctgaaatgatctcagaggtacttgatgtaatggttgagcttgccaaagaaggtattaccatgatttgtgtaacgcatgagatgggttttgctaaaaaggtcgcagatcgtgtaattttcatggatgcaggccaagttattgagcaaaatacaccagataaattcttcgaaagccctgaatctgatcgattacagacatttttagatcaaatactaacccagtaaatctatttaagcgttaataatccaatcctcacaactaacgtgggaatttttttggtaaacttaatttcaatctttaaaacaattcgacacaatggcctggtttgggaaaagcaaaaaatcaacaatcgtagaaaattctgacaaagataaggtttggaataaggatttaaagcgtaataactctattgctaattcttcagaacaacagggttttgattttaaagaaaacactgatacatcagtagttatagatacatcaagtaccaagaagggaccaagttgtaatttggaaaaaataagctcggaccaagttgaaattctaaaaaaatgcaagttagaaagtagtgccgaagagctaataaaaattttaaaacgcactcataagactcgatttaagaatgatattttaaaccccttactgggttgtgaattttttgaacgaaccattccagaaaagccaaaaagcccaaaacaaaaataccgactaaccagtaaatttgtacgagctaaatcaagctagctgtatttgtttaaaaaaatacaaaaaaatccattttcagtctgatttttaatggatattctcaaattttagatttaagctatttttttataaaaataaggttgatggctggctaaggtttaaatcgttcaaatatgagtaatataattttaatagcataacctattgatttttaatgattttatctatttttaggcttatttttcagtgttttgtcgttttcagctatactatggctacttttttacttatttatttaaataccttagggtgttatatatgtctgcattagaaattaatattgatacgtttgatacactggttttggaagaatcttttaagcgtttggtggttttagatatttcagctgaatggtgcggtccttgtaatattttggagccaataatcacctctattgcttcagaattcaatgaaactgaatttttactggccaaaattgaggctgagggtgaaaatatgaaaatagctgggcgctatagtgttcgtggatttccaacggttatagcctttattaatggcgaagaggtggatcgctttcattcagcacaaacgcctggttttgtacaagattttattgatgaaaatctagggaaaatgttatgaaaacaggcatattgctcaccaatctaggcacacctgatgagcctacaaagcctgctttaaggcgatatttgtctgaatttttatccgaccctagagtggttgatccacccaataagcttgtctggtggttagctttaaacttggtaattttgaacgttagacctgcaaaatctgcacttaattatgccaaaatttgggatagttttggtcctggatcacccttgttgaatattactcaagcgcaattatttggtgttaaaaaagcactacagaaagataatgcagagctagaatttgaaatgggtatgcgctatggcaagccctccatttctcaggcgctgaataagttaaaagacaaaggctgcgataaaatagttgttttaccactttatccacaatactcaaaaaccacaacactttcaaccctagatgcgatcaatttggagctaaatacttggtcagagcagcctgaaattgtgtttattgatcaatactaccaaaatcaaagctatattcaagctttaaataattctattagcgagtatcaagctaagcacggtgtggctgataaattgcttatttcattccatggtattccacagcgctatgttgataatggcgatatttactatcaacactgcatgcaaacggccgatctactagctaaatcgcttaatttgcatgatgaccaatggcaagcaagctttcagtcaatttttggcagagaggaatggaccaagccttataccaaagatacgcttgagtcttttgcaggttctggtgttgagagtgttcaagttgtgtgtccaggctttgcagctgactgcttagaaacactggaagagattgatgatgaaaatcgcggttattttatcaatgctggcggcaaagagtttggttacattcctgcgttaaatacacgccaagatcatattgatacattagtcgatattctttcggctcatctatagtttgttcgtataatttatattatgttaaattactactaataattgcagattgttgcaccctactaaaaatacgttggttttcctgagtaaaatgtgctacgctttttaaaccataagaaaagtgtcatgatctattttaattctattaatcaaattgtataaatatcaaaagaaaattggtgcaagttgttgggttttccgtatgaggagttttagatttttagcattaaaaatctgccgcttgataatcaaagcaaaaatattctaattacggttgatttgtttcaaaaaaaaacggaaatttggcggcgtttattaataagtgtcaccgcgatttttttgtcaaaaaaagttgatttgatatcgattaaatcgttagcggataaatactgtgtaatttgcgatgctcccctgctcaacggttaaagggattcttgctcggtgaagtgcaagcaaaaggcttatagggggcgtgtaaaggttatgcgtagccttgaaacggtgcattaaaaataagatataaaatagcctgcaatccttttggcaacaatatctgtatctaaacttatatctgatgctgataaagcgatttacttaattttagacaataaaaaacccccactgggagggttttggtcgcatgaaagcggagcctacgaaaaataaatttcattggtatgaaaagcaaaattcttaagcgatagtcggttacaatctatactacatattctacacaaaggtaaggcgttatgcaacaaaaagttttaggcttagatttagggtcaaattcaattggctgggcattgcttaaagaagaaaacaaacaggcctctgaaattatcgacttgggttcacgtatctttattaaggcagttgagaaaaaagtacccacaccaaaaaatgaaaaacgtcgaaatatgcgccttggtaggcgcgttattcagcgtcgtgctaggcgtaaacaacgcatgcttaattatttggtatctttagatttactaccacaagcgttgcaaaattctacccagcctgagactgttcttaatgagcttggtgatccttatgagttgcgagccaaaggcttggatattgagttatcaccttatgaatttggcagaatattattacattttgttgcaagacgtggttttttatccactaaaaaacaagtggcaggtgatttgatcgatgaccctgatacgttagattatttaagtactcttgatgataagtccaccactaaagacaaagaagaaggacaattcaaggcagatattgctgatgtttatcaagcgattaaagatactgatgctagaactttaggtgaatatctatttaaccttgaaactggaaaagttaagcgcaatcgctcacatgatggcgggcacttgcgtactgatcgaaaaatgtatcaagacgagctttgtttaatttggaagcaacaatcacaatactttgagcatctacctaatgattttatgcaaaaagataagggtgttttggctattattttttatcagcgtccgctcaaacttaaaaaagatcgtgttggtcaatgctcgctagaacttaaacatcgtcgtgctaatgtcgcacgtctagaagtacaaaaattcagatatttacaagatattaacaatctacaattttttgaccgttggcaagaaaagtggataagcattaatgatgagcaaaaatctaagctaaaagctttatttgaacataatgcaaaaatcaccgtaacaatgctcaaaaaagagctgggcttagacaggcctaccaaaatcaatttagaagctaaaaacctaaagggtaatatcacagcaggtgacattcgccatattattggcgatgcttgggatgtttattctgataaacaacaacatgatttatttgaagatttgtttaccattaagaaaaaatcagcgcttaaagctcgattaattacacattgggattttgataagaaagtggctgttaaattatgtttgattgagtttgaaccttcacattctaaccattctcttaaagctattaacaaactcttgccatttttagagcaaggcatgatttactcggatgcccgtcaagcggcgggctacacttatgaaatagcgaagattgaagttgttgatacattgggtatgccacccgaaacatccaacccaattgtcaataaaggtatgcatgaactcaggcgtttgattaatgccattatcaaacaatacggaaaacctgatgttattcgtattgaaatggcgcgcgatttggaaatgaatactaagcgttataaagaaaacgaatctcgacaaaagaaaaatcaagaagccaataaagcggctcaacttgcttttgaagggcttaatttgggcaaaaaatacgcttcaagagatgataaaatccgctatcgcctttggcaagaccaagatcaaagatgcgcctacagtggtataactatcgcccttaaccaagtattttcagctgagtgtgaagtggatcatattctaccctttaaaaaatcactcgatgattcctacatgaataaagttttgtgtttcgccgcagagaaccgcaacaaatctgaccaaaccccagttgatgcttggggcggtgataacgacaaatggaatcaaattacccaggctcttagtcattgggacaaatccctcgacagcaaaataaagcgcttctataccaaagaagctgatttacaaaaacgtgattttatttctagccagcttaatgacacacgttatatgtcaaaattggcgcaagattatgtacgccaactcggctgtgatgtgaatattaccaaaggctttgtagttagccaaattcgccaccaatggggttttaatagtattattggcgaagtgaacaaaaaagatcgcactgatcatcgccatcatgcgattgatgcggtggtaatcgctgctacgtcacgcagtctatatcaaaatgcggttaggaaaattaagcgtgataagcttaacattgtgccaccatatgcccacattcgtgaagagctgaatgagcgtcttaaacacaccattatctcccatgcgccacagcgcaaactcgccggtagcttgcacgaagaaacaggcgcaggctatattgaaaaacacggtggtttggtttatcgtaaaaccctaagcccagagttcactcttaaaaatgccttaagcattgtggacgaagctgttaaaaccaaagttttagagcattttgaaaactacccaaatcctaaagaggcttttaatgctgaacacttagccctgcttaaacttggcaaaaaccccattaagcgtgtgcgtgtattgcaatctaaaactaacgaaaataaactcgcccaaaccaaatttggcgtgcgtgataaaaccggtaaaatttttaaatacatgtcgtatggtaacactcaccatgtggaaatcattaaaaacagcaaaacaggtaaagttaaaggcgaatttgtaaccactatgctcgcctcgcaccgcactaagggtatcaacatgcccaaacaagccatcatcaaaactaatcatggcgaagattgggaatttgtcatggcgctgcatatcaacgatacggtgagtattgagcaggaagatggtgaacgcgtgttttatcgagtgcaaacacttgaagcaccaagcagattaactctaagacttaacacaacttcaacaattgataacaaagatgaggctattagaaaatcaattagcggactttttcaagaaaatattttaaagcacaatatgaacaccatcggtcattttatcgagcatgattaaacgcattgttgaggttagtaaccccagttatttacaccttaaacataaacaactgctgattgatcaagatcacgaattagtggcacaaatcccaattgaggatattggtgcgctcgttttagaacacagcgctattagtattacccagccactgatcatcgaatgccaaaagcatcatgtggcaattattttttgtgatgaaaaacacctgccctattccaccattttgccgattgccgagggtaataccttgcaccaaaaaatcctcaagcaacaaattaacatctctgagccaatacgtaaaagattgtggaagcaagttatcatccaaaagattaataatcaagccgatacactgaaaaaatttaacaaacctcatgcacgcttggataagttagccaccgaagttaaatcaggcgacagtactaattgcgaaggcttggcggcgcagtattattggaaagctttatttggggcaaattttattcgcgatcaaaatgctgatggtattaatgctattttaaattatggctattcaattatccgcgctatggtggcgcgtaatatttgtgcggcgggcttacacccagctatcgggttgtttcatcacaaccaatataacgctttgtgcttggcagatgatttgatggagccattacgcccctgggtagataatattgcttacaagctgtatcaagctaactccaacattaccatcaccatcgagagcaaaaccccatttttaaaccttattagtcacaacgtgcgttatgagaaaaaacaaatgccaatgatggtgtcgatgcattatctgatggcaaatctaaaacgtaacttcactaaagaatgctcaacattgacatatcccatattacaggtgtaatataaagtttttaaacattggttttacttatgtttggaggcttacaaaccatgtgggtaattgtactgtttgatttaccaacggatgataaatggatgcgtaaagattacacgtactttcgcaagtttttgcttgaggatggttttaggatgatgcaatactcggtttatatgcgccattcgagtagtgaagaaaacgcccaagtgcatgcgcgcagagtcaaactccacctaccaccagacggcgaggtaagaattatcaaaattactgacaaacagtttggacgtatcgaggttttttacggcaaaaaacgcctagctgtcgaaacagcgcctgagcaactctcgtttttttgactagaaaaaaccagaaccaccccagtatcaaagcgtttgtaacaggcagattgtaaccgactatcgcctaaacgcaaatcacaacactaataaggaaactctaaaatggaacacaattgtaaccgactatcgcctaaacgcaaatcacaacaagagagatttcagtagatattgaagtgaaattgtaaccgactatcgcctaaacgcaaatcacaacagaaaagccgatactggtgaacattatgatattgtaaccgactatcgcctaaacgcaaatcacaacaatggtaccgagatgaaaatttacaagaccattgtaaccgactatcgcctaaacgcaaatcacaacagtggtatagagatgaaaatttacaagacattgtaaccgactatcgcctaaacgcaaatcacaactatgaacatgaagagcctgagaaaatggaattgtaaccgactatcgcctaaacgcaaatcacaacgcgattcgtatcgaacagataaaaaaatagattgtaaccgactatcgcctaaacgcaaatcacaacgctagaatggcaactcctatcttcccaataattgtaaccgactatcgcctaaacgcaaatcacaaccgtctatagccatggcttgttataagccttattgtaaccgactatcgcctaaacgcaaatcacaactaagttagggtgatgaagcaattctcatcaattgtaaccgactatcgcctaaacgcaaatcacaactcaagcgtgtatatccgtcaaataaccaagattgtaaccgactatcgcctaaacgcaaatcacaacagtcagcacagttaacatcaagtgatgtaacattgtaaccgactatcgcctaaacagtatgcacgaatttatttaaatagcatatagtggtatttaaagaaatgtcaacctgactcacaaatttaaatgcttagcaaataagccagcaaatgacatttatcacaacagtcttagtatttacccgtgtaaataatctaacaacacctaaagctaaagacattaaaaggatcttactctttataatgggaaatatgaatcgtcatatttttaatattcaatttgagaaaaataagcggaattttgaatgttcgaaaaatgattcgattttagaaggcgggcttcgtcatggtttggcaatgcgctacgaatgcagtaatggtacttgtggtgcatgcaaggctaagcttattaaaggtagcgttaaaaaatcaaaacatcatgactacgcactctctaaagatgaattagatgacaatacttttttaatgtgttgttattctccaaaatcagatattgaaattgatgttgatttgattggcgatgttaagtcaattccacttcagaagattcaagttaagattaaagacattcactttattggtgatgatatggcaattgttagtgtgcgaacacccagatctaaaacgctacaatttatggcaggccaagacgttgaattaagctttaaaggtatggtttctcgctaccctattgcttcatgcccttgtcatgctatagggcttgaatttcatattcgctcacttaaagaggatgagttttctcaagccatcttctctaaatcaattaaaactaagtctaagcttgatttaaatggccctaagggggtgtttgtcttaaaagagttatctaccaagtccatggtttttattgcctgggatagtggttttgccccaattagaagccttgttgaacatgaattttcacttgaaatgcccaatcctgtgtatttttattgggcctaccctgctactgactcaattccctactttgacaactacgctcaatcatggagtgcggttatggatgaatatcattatcagacaattgcatgtgagtttgatcgctcaagtcataatgattgccataaagtggccaaacaaatttatgattcacttaatcatcagattattaatcaatcagaagtgtacatttgtacccctgctgaagtgttgatttatttaggtgaaatgttgcttgaaaacggcctagacgagtctcaattaatcgcttctccaatttaagtttttttgacttaaattatcgtttttctgggtaatatttttgctaatttttaacaaaagttgctgtgtcaggctttgcgctttttattactaaaaagtaatattatgacatcataaattgatgatatttaaggttaaaaatagccaaaattattttaatttattttcattctcgcaatcccttttgcaccaagttgtttggcgtttttgagtgttttttgatgtttttaacacttgcaaaaaagtatgaaatacactatatttagttgcagttatcttttacaaacactatatgtagtgtttaccactcggggaataaatgaatcaaaatatcaaagtcaccaagcgaaatggccagcaagagccaatcgatatggagaaaattcaccgtgttgtacactgggcttctcaggacttaaaaggagtaagcgttagtcaagttgagatcaatgctcaattggcatttttcgacggaattaagactgaagatattcatgaaaccattattaaatctgcagctgatttaatctctacagattcgcctgattatcaatatttagcagcgcgtttagcaatctttcatttacgtaaaaaagcctttaaatcattcaccccgccagcgctttttgaacacgttgcaaagtttactgatctaggtatttacgataaagatattttggacaaatatactcaggctgaaatagaagagcttgatgaatgtattgatcattggcgtgatatgaagttttcttacgcagctgttaagcagcttgaaggtaaataccttgttcaaaaccgcgtcactggtgctatttatgaatctccacagcagctttacatgttggtgggtatgtgtttatttcaagagtatgaagcgcaagctagaatggctattgttaagcgtttttatgatgctgtatctttgtttaaaatttcattgccaacaccgattatggcaggtgttcgcacacctacgcgtcagttctcttcttgcgtattaattgaaacagacgatgatcttgattcaatcagcgcaacagcaggtgctattgttaagtacgtttctcagcgtgcaggtatcggtgttaatgctggccgtattcgcgctattggtagtcctattcgtaatggcgaagcaacacatacaggctgtattcctttttataagcattttcatacggcggtcaagtcttgttctcaaggtggtgttcgtggtggtgcggccaccctgttctatccgttatggcacttagaggttgagagtttactggttcttaaaaataacacaggtactgatgaaaatagaatccgccatttagattatggcgttcagtttaatggtttgatgtaccagcgatttttggcggatggtgatattacgttattttcaccacatgaagtgccaggcttgtatgatgcgtattttgaagatcaggctgaatttaagcgtttgtatgagctgtatgaagcagatgattcaattcgaaagcaaactatcaaggctagagatttgtttgctaagtttatgcaagagcgtgccaatacagggcgcatctacttgcaaaatgttgatcattgtaatactcatggcgcttttgattcaaaaattgcaccagttcgccagtcaaacctttgtatggaaattaccctgccaaccaaaccattgcactctgtccaagatgaaaaaggtgaggtggccctgtgtacgctttcagcggttaatttaggcgcacttgaatcactcgatgagttagaagacattaccgatattattgtgcgtgctttggattcgctgcttgactaccaagattatccgattaaagcagcgaaaattgctagtatgaatcgccgtactttgggtattggtgtaacaaacttggcttattatctagccaaaaataatgttaaatattcagatggatcaggcaatgagttgattcataaagcttttgaagctttgcagtattattctcttaaagcgtcgaatatacttgctaacgaaaaaggcgcctgcccattatttaatgagacccagtatgcaaaaggcgtgcttccaatcgacacttataaaaaggatgttgatgatttttgtggtttcgaactaaaactagattgggatcagttgcgtagtgatattaaaaaaactggcctaagaaactctaccttaacagcacttatgccgtgtgaaagctcttctcaaatttctaattcaactaacggcattgagccaccgcgaggttttgtctctatcaagcaatctaaagatggcatcttaaagcaaattgtgcctgattatgaaaacttaaaagataagtatgaattgctttgggatattaaaaacaacgaaggttatttgcaattatgtgcaattatgcagaagtttgttgatcagtcaattagtaccaatacgcattacgacccatctcaatttagtggcaacagagtgccgatgaagttgtttttaatggatcttttaaaagcttataaatatggcgttaagacgctttattaccatactacgcgtgatggtggtgctgatgatatgcttgaaaaagacgacgacaatgcctgttccgatggcgtttgtaaactttaggaattaattatgtcatattctatctttaataaaaaaattgtcgacacattaactcaacccatgttttttggtgagagtgtgaacgttgcccgctttgataagcaaaagtttgaaatgtttgaaaaattgacagaaaagcagttgtcatttttctggcgccccgaggagattgatgtttctaaagataagatggattttgctaagcttttgcctaatgaaaaacacatctttttatcaaacttacaatatcaaattttgttggactctgtccaaggtcgcagtccaaatattgcttttttgccaatcgtctctttgccagaattagaaaactggattgaaacttggagtttttctgaaaccattcactcacgctcttacacgcatattattcgcgctattgttaatgaacctggtgcagtatttgacgacatcatgaaaaccgaacaaattattgaacgtgccgagagcgtttccaagcattatgatgagctgatcaaatgctctcaagcctacttgttgcatggcgaaggtacgcatgatctaaatggtgagcaaacaaccatcgatcttaagtgccttaaacgtaaattatatttaaccattatgtcggttaacattcttgaagcggtgcgtttttatgtatcttttgcttgttcgtttgcttttgccgagcgtaaagttatggagggtaatgccaagattattaagatgattgcacgtgatgaagcgctacatttaaccggcactcagcacatgatcaatcttatttgcgaaggtaaggatgatctggaaatggccagcattgctaaagactgcgaaaaagaagtggttcaaatgtttagggatgcttgcgaacaagagaaaaattgggcggaatatctattccgtgatggctcaatgattggcctaaatgctgaaattctaaaacaatatttagaatatatcactaacattagaatgagtgctattaatcttaagccaatttttgaagagcgtagcaatcctctgccatggatcaatcattggctagattccgacaatgtacaagttgctcctcaagaaactgaaatcacctcttatttggtgagtgcaattgataacacgctagagcaagatgattctgattttggtgactttaaactataactaatctatgtttaaaatcgatgttaacaatgttaacggcaaaactgaatcgctgtatgtatatggcgaacaatcgattcttactgagctggaagagcatagtattctaattagccattcgtgccgacaagggcattgtggctcttgcattttgcagctgctaaaaggtgatgtcttgcatcaagattgtttagtgccgttatctcatggtgaaatattagcctgtcaggctaagcctattactgatattgaaataggatcaagagattgataagtgatgaatatagtctaacacctcttggctgttgcctttaaaaactacacgatctagtttcttttgaatttggtagttgtacatcggatcataataatcaactaatagtgattttacaataggtaaaaaaccatcaaaattattagtattttggtagtcatttaaagctaacgcaacttctgatctcatgattttatagcgctttaatcctaatcgtttctgaattttttctagacttctaagccaataattggcaaagttatcaaagccattttcagtattttgatttataaagttatcatgcatatgaatcacgtaagcattcatactaacctcaatacgctcttgcgtggttgcctccaatagaattaaatcagcctgagaagttttgtttttaacacaatcagggatatgcacagtgccaacattagcaccctcatcttcaaagatcaaatgagaataatcttgttttttaattagctcaatagcaagctcattttcaaatgcaatttgagtaggttgagaagttgtggtattaccaaaagcagagcctcgatgattggccaaaccctctaaatcaatttgttgatggattttatctagtagtaaagtttttccacagcctgtttggccaccaatcaccactggggtgattttattcataatacgatcagtttcatcaattagataacgacgcagtgctttgtagccaccctttagtcgtggatagtcaatgcttgttgcttcataaatccactcttgagtgatttgactacgcatgccacctcgaaagcaatataaagcgccatcagggtgttttttgataaatttaagccaagcattaagccgagtttgttttgcctcgccttgtactaattcatgccctaaaacaatagcctgctcttggcctttgtttttataacaagtgccaactagctcacgctctttgtcactcattaagggtatgttttgagtatttggaaaagcgccttgtataaactcaatcggtgcacgcgtgtcaaacatcggggtgtcgcttgttactaacgagcgaaaatcttcaatttgagtgagtgttttatccattgatggtgacagttgctaccttattgtctaattgagtaatttcaccaatagcctcaagctcaaatccagctgagcgcataatgctttgaaattcattttgagcattatcattcaccataatgagcaagccaccactggtttgtggatcgcaaataatggattgaacttcgctattcattgggcttaaatgttggccgtagctatcaaaattacgctgtgcgccacctggtgaacagccattgaccaaatagtttttaatgtttggcaaggtgggcactttggcataatcgatagtagcagacactttagagccttgacaaacttcaatcaaatgcccgcccaagccaaaaccagtcacatcagtaatggcgttaacaccttcaatcttagatagttttgtgccaatatcatttaaagcgcacatagtattaatagcgcgagtttcgtcctcgagggtaattttcttttgtttttgcgcggtggttaaaatgccaatacctagtggcttggttaaataaattttgtcacccacttttgcttttgaattttctttaaggtgcttgatcgccaccctaccagttacagctaggccaaaaataggctcaggtgcatcaatactatgtccaccagccaatgagatgcctgcctctatacaaacactgcgtccgccttcaatcacttgttggcccacttctggcgggagcttatcaagtggccaaccaaaaatggcaatggccataatcggtgagccgcccatagcataaatatcactaatagcattagtcgctgcaatgcgcccaaaggtaaatggatcgtcaacaatcggcataaaaaaatcagtggtactaatgattgcttcaccattgccaagatcatacacagctgcatcatcacgcgatgcattgcctactaataaattaggatcgttaatatcggtaagtgaagattctaaaattttatctaaaactttaggagagattttacaaccacagccttgtccatggctatattcagttagtttgattgtgttagacacctagctaacctgcttgtaggcttcttctagttttttgtataaatcctcaggtgttaattcaggattgtcatccataatcttaaaggcaacaacgttatcttctacatcaccccatatttttacatatgaaccatctttatagccgttatcttgtctgaatgtattaagctggtttttaaccaggtagcgcctgtacaattctggcacatccatttccatgtgtgcaatcgcttggaaaaataaagcaaataattggtacaaagaattttgtgattgatcgacgttagcgcttgctgcaacagcaatcattttttctaaaatttcaactaatttttcaggatcggtgtcgcgctcaggcttcatatcgttgtacatttcagcaaagccagcatcgccaaaatgaatggcttcagacattatgaaatgccagatatcaactaactcgactctggcattaccaagatcaggtttagcatcaagatctttccaatgtttccaattaaatgaatcaatggcttcggcagcttccatataaatacaacgcagccatga

SEQ ID NO: 674 - DNA, 23027 bp, synthetic construct
  source 1..23027: mol_type = other DNA
  misc_feature 1..23027: note = Synthetic
gtgcctggatggcgtcgggcgtactgcccttgatcggatcggccacgccgacgagtcccgcaggcctgccgtcggccgagacgaacatgacggtctggccgtcgccgcgcagttcctcggcgcgggctgcaagattgcccggatcgatgtccaggctggccatcagtgcgcggttgccgagcgcgatgtcatggccatcgacgcggcctttgacgccctggccggtaacggaggcaaaatcctcgacgcgggtcaggtcgataccgcggtcctcggcccccttgacgatggcttccgccagcggatgctcgctgccgcgttcgatgcttgcggcgaaacgcagaaggtcgttttctccaatgctgccggcaggcgtgacactgacgagtttaggcttgccctcggtcagcgttccggtcttgtccacgaccagcgtgtcaattttgcgcatcagctcgatggcttcggcgtttttgaacagaatgccggcgccggcgcctttgcccgtcgccaccatgatggacatgggcgtcgccagaccgagggcgcacggacaggcaatgatcagcacggcgatggcgttgatgagcgcgtaggccatgcgcggctcgggtccggcaacagaccagacgataaatgtgatgatcgcgataacgaccacgacgggtacgaaatagccggcgatgatgtcggccagcttctgaatcggcgcgcgggtgcgctgcgcctcggccaccatcgccacgatgcgcgacagcagcgtttccgcgccgactttttcggcgcgcatgaccaggccgccggtgttgttgatggtcgagccgatgacgcggtcgccttcgtgcttttcggccgggatcggttcgcccgtgaccatcgattcatccaccgaactggcgccttccagcaccacgccgtccaccggtattttctcgcccggccgcacgcgcagccggtcgccggcctgcaccgcatccagcggtatatccgcctcggtgccgtcgtcggccagacggcgcgccgttgtcgcctgcatgcccagcaattttttgatagcctggctggtttggctgcgggcacgcagttcgatgacctgaccgagcaggatcagggttacgatcacggcggcagcctcgaagtagacgccaacctcgccgtgctcgcggaacgaggcgggaaaaatgtccgggaacagggccgcgatcacgctgtagacataggctacgctgacgcccagcccgatcagcgtgaacatgttgaggctgcggttttttaccgattgcacggcgcgaacgtaaaacggccaggccgaccacaggcagaccggggtcgccaataccagctcaacgagcgtgcgggtccgcatcgagaaaaggtgtgaaacaggccgcccgggcagcatgtcgcccatggcaacgatgaccagcggcacggtcaacgcggcggcaaaccagaaccggcgactcatgtccgtcagttcggggttctgttcggcttgcccggcatcgactgtcctgggctcaagcgccatgccgcagatagggcaattgcccggctcgtcacggacgatttccggatgcatcgggcagacccattcggtatgcgatacgggccggggcgtttcgaccggctcaagcgccatgccgcactttgggcagtttcctggccggagggactgaatttcgggatgcatggggcaggtgtaatgggctgttgtcgtgctgttgtcgatgcttggcatggttgtgtaccttattattagaattatcaacgttttccttctccggtccggggagccggagggcgcatgttgccgcagaggactgccagggtcatttcctgtctatgcggtcattcgtgtcgcctagaggcgcctacttttggccttcaatcgattttcagcaccttggcgccgcggattctgcctgttttcaattcgaccaaggcctcgtttgcctgctccagcgcgaatatctgaacttcgggagccaagttcatttcagcggccagatccagaaattccaggacatcgccccgggtaatgttggcgacgctcttgatttccttttcctgccagagatgttgcggataatccagttgcagcaggctctgcttgtcgccttccttgcggatcgcgttgattacaagccggccgcccgcatcgaggttcgccagggcttccacgacgggcagccaggccggtgttgtgtctatgatgctgtccagtttacaaggcgcccgttcgcttgtctcgccggcccagacggcgcccagttccagggcgaacgcgcgttcttcggcgcttctggcaaacacgtacacgtcggtgttaggatagcggaaccgggccattttcagaaccagatggcccgatgcgccaaatcccgtcaaacccaaacgctttccatcctcaagcccggtcagccgcagagaccggtaaccgatggcgccggcgcataataacggagcggcctgcagatcggaaaaggcgttaggtatccggtaagcgaaatcctcgctcaccgtcatgtactcagcatagccgccattggtatcgcggccggtggcctcgaaatcagggcatagattctcatgaccggcccggcagaacttgcatgtcccgcaagcggaaaaaatccaggcgatgccaacccggtcgcccggtttgagctgctgtacgctgcttccgactgtgtgaacacggcccacgacctggtgcccggggataaccggcaagtacggcggtggggttctgccctcgatttcatcgagttcggtgtggcaaacaccgcatgcggaaaccttgagcaggatttccttgtctcccggaacggggatcgggacctccatcaattcaagcggcgtctggtgttcttttaaatcgcagagctgtttcaataccatcgctttcatgggattacctttaggaattggctgttgttggattcgaaaggctgtttgcctggcggttccgtaatcaggttcagggtatggtatcatcctggctcacttatctcctcagtcgcgccggtaacggtaagaggcggctcatacaatggacatcggtcttatccttatcttaattgttatcaatggcattttctcaatgtcggaaatgtcggttgtttcttcccgaaaagcgcgcctgcagaagctggcggccgagcggcgttcgggtgccaatacggcgcttaaactgcacgaagaaccgtcccgttttctgtcgactatccaaattggcatcacctccgtcggcattctgaccggtgcgctgggcgaagaaacactggcggtgcccatctatgagcagctggtcaaaattccggctttcgaaccgcatgccagaggcgtcgccctgaccttgacggtggttttaatcacatatttttccgtggtggtcggcgaactcgtccctaagcgtctggctttgctgtactcggaaggcattgccgttgtgattgcccgcccgatgagttttttatccagaattgccagcccattggtctggctgctgtcggtttcagggaacttgctgctccgcctcatcggcgctcaccgtccccggccggcttcggtcaccaacgaggaaatcaggttattgatggaaatgggttccgaaaccggtgttttccatgccagcgagagtaaattggtttccaatgtgctgagattggatgaacagcgtgtcggcgccattatgacaccgcgcaaggaggttttcgctattgacctggcggctccggaagatgaagtcaagctgaaaattgctgattgccagtatgagcgtctggtggtttgccgggacggcctggaaaatgtactcgggattctgcatcgcggcgatctgttgaaatcgatgatggaaggccggttcaatatcgagaaaacaatgcgtccgccgctttatatgcccgattccatcacgctcactcatctgctggagctattccggaaagagcatgacgatattgccctgatcgtcgacgaatacggcgagttggagggtctagtcacgctcaccgacgtttttaccgctatcgtcggcgatttcccgacggcggaatccgaactcgatcccgatgtggtccagcgcgaagacggttcgtggcttattgatggcggggtgtcgatagcaagattgaagtcggtgcttgatatagacaccgattttcccggcgaggcagataaggcctacaatacgaccgggggcttcattctgtaccgcctggaaagagttcctcacctgacggacagctttgaatatggcgattggcgtttcgaagtggtggaccttgacggaacgcgcatcgataaggttttgatcacgcgcaggaataaaagaagccgccgcaaggccggatgagggctgccgtcccaacctgtggcggcatgcccggtagccggaatggtcaggaagagtgaaggctggcctgattggttgcctggccgaacaatgattgccgggccaggacatgctgcagatcggcaaaactgaccggtttggtcagataagcgtcgaatccggctgcttttgctgtttcgcgattctcttgcccgctatagccgctcagggcaatcagctgcgttgttgccagagccggatgtcgccgtatcgctcgtgcaacggcatagccatccatgccgggcagaccgatgtcgagcagcacgacttgaggccgttcagtccgtgcgattttcaacgcggcgtggccgtcataagccagcaataccttatgccccatgctggtcagcagtatggacagactctgggcggcatcacgattatcatcgaccaccagcatgcgcaggggcgcttcaacagaagggaggaggactgccgggtaaggaaaatcaacgggcaggggaggcgacaggcaaggcaggcggatgacgaattcgctgcccttgccgcggccttcgctgacggcccagacttcgccgccgtgcatcgataccaggctgttgaccagcgaaagaccaatgcccaatccgccttccgagcggtcgatggtgcggtccacctgatagaacagttgaaacaggctgggcagcaccgaaggatcgatgcctcggccgttgtcacggacccggatgaaaatgtcatcgttttcatggtcaacggtcagagcgatacatccgccttcgtcggtatattttgccgcattgttgagcaggttcgatacgacttgcgacagccgcaccaggtcgccctcgacgattagaggctcagacggcaggtgcacggataattcatgacggcgggcatcgatcagcggctggctggtttcgaccgcccgctgcacgatgacagcgacttcgagaaggtctttcttgagttcgatcttgccgcggctgatacgcgagacatccatcagatcgtccaccaggcgaactagctgctcgacttgtcggctgatgacatcgcgacaccaggacagccgcgtttcatccgaactggattgtttcatgatctgcacggcgttgctgatcggtgccaaggggttgcgcagctcgtgggcgagcatggcgagaaactcatccttgcgccggtcggcttcgcgcagtgcttcctcggcgcgtttacgctcgctgatatcgagcacgtggacgacgaatccctgaacccgcccttcggcatcgaagtccggggaatacgttgcatgaacccagcgagggccgatattgggcaaggtgacaaggcgttcgaaagcgactcgctccccggccagaacacgctggatataaggagagatagcctgccaggcctcctcgccgacgatttcccgcatgtgacggccgcacacctgctcgggagtgtagccgaaccacagctcgtaatttctgttggcgcgccggaaccggcattcccggtcgatgtaagacatcagggccggcgcattgtccatggtcacccgcaacaggtcgtgcgctttctcggcttcgcgccgcgccgcgtccagttcggccgtgcgttcgaccacgcgctgctccagtgaggcattggcttcgcgcagcgcctgcttggcccgcgttatctcggtaatgtcgataccgacctccatgatcatcggcgtaccgtcaatatccttgaagggaaaatcatgaatctcgtagtcgtgccggtccggaccggaccaccgccattccacgggagcattggtcttcagcgtcctgaaggtatcacagacctcgcatggcgtgtcgcgcttgaacagatactcgtagcagcgtttcccccgggccttgccgtagcgctgctcgaaaaagcggttggcgaagaccacttcgtaattttgcgatagcagaatcacatagacaggaagcgtctgcagcacgtcatacatacgctgccgttccctctgcacggcggcataagcctggaccagctcggcggtgcgcagcgacacctgtcggcgcaatgtccaggtccacaaggccaggagcgaaaaaaggacggcggcggctcctgccgcccaggccacatatttaatcgggaaggtgggaggcgcggaaataccgagccattttctatagaggcggtcatactccccgttggccttgacgatggtcaggccctggttgaggcggtcgcgtagcgcggtgtcgcccttgcggacggcgaaacagaactcgcgccggtattccttgagcagcgggccgggctcgatgacttccgacaggccgattgtccgcgccagccagcttccctgcagcatcggtgccagtaacgcatcatgctgccccgaggccagcagccggaagccatcggccagatcatcgacgatcaccaactgatggttgaaaccgcggccggcgagggcatgatgagacgtgtccgaacgcaacacgatgatactcagggcgcgggcctgctcgataaatttgatgggcggatgccctttgcgcacgaaaaaggagtcatagccgagcgtatgcggtcgggtgagttccacttggtcgtcgtgttccggcatgcgagccaccagcggcagggcatcgatctcgcctctcttcagtttttgccagagcacgtcccaacggtccggatggaaggtgacgggtatgcccatgacctcggcaaccctggcaaacagttcgacggcgaagccagtcgatcgaccctggtcatcgatatcggcgtaaggcggaaaaccaatttccgaaccgacgcgcaggggctgcctgtattccgcgccaaccagcccgaaagagctcaaaacggccaaggccagcatgagcgcgaatcgcctgagccagggtttcatgcgcggcgacatgttctgttaggttttaagcaaagtggctttacagggaacaggctggctactgcgtttatcatagggctcgaataatttgttgtataaaaatataaagtcatgattccaaaacaagtcatgcttaaacagcgccgtactcacgcttgggcttgtgtttattgacagtagcgatatccgggccagtttaatgacttctttaattgttggctaccctatcagattgtttaattaatgccgacatcccaagagcggctaatctgaacatttcaccacgaaggatacgaaggctgttccagacccaattccaccgcctctataatccccatggatggggtgaatgcagagaaatgacgggatcatttcctgtccatgcggtcgttcgtggtgaagtattcaggctaaggcttttttgcgacagcataaatcacattggcttgcacgttttgcgtgcgcgaatcggccatgaaggacagattagcctggcgaacatagtcaactgcttcgggttccagttgatcgattgtgccgcgatatcccgagccgagcagcgttgtccaccagtcttccggcgatgtcacgggatgcaccgcggattcggccacaatcaatgctttcggtacaccggcttcgatcagcacctcgttgagcgataaaggctcggcgatgcgatcccatgggttgaagcctttgtaaaggtcgggcctgacatcgcgaacggcattccagaaaaccgagttgcccggctcgaagaaatccggcccccatgtggtgatggcaagttttccgccggggcgcaagacccgccataattcccggatggccgagggaatatcgggtacgaaaaagatgccgaaaacgcaaaccaccgcgtcgaagctggcatcggcaaagcccgtatcaagcatgtcgccaacctggaactcaacattgttcagattgcgttttctcgctttcgcgcgtgcaagatcgagcagcctttcggccagatcgatgccggtaacctgtccttcggaacctacgcgcatggcggccggcagtgccgatgccccggtgccgcagcatacgtcgagtaccgatgaaccgggctcgaggtccaggcgttcgacagtgctgtgcccgaaccggtcccagaaagtgttggcgggatggtcgaacaggtcggacgcggcattataggccgccgccgccttggcctgtgcttcgtttaatgtagtcatggatttgtctctttaaatatactcaaataggttatcgatgaagcgttatccggccgatagctctgctggctgatgtgggggattgacaggatgagtgacggccattgtttcgctatttcttgttcagcagcagaattcccaataatacagtgaaggccgatatcgggaaagttgccgtactgaatctcggtaatcaagcaggccggtgcctgaagttttcatcgcgccattttttcgttactcatttgccgcggaatggttatgatatggctccgtacaggcgcattaacatgtggatgtagtcacgtgttatatcctgaagttttatcgaacccgccggaagccctgcgcttgccagagagcgggtaagagcgaatatggcctggaatggctctttaatcggatgttgaatatttgaatgaaccgtatttatctggtccggaacgaggcggacaaaaatatgaaccggttttaccagttgatcatcatgccgggactgttcggtgattggtcgttagtccgcgaatgggggcgcgtcggttcgccgggcaccgtgcgcaaggactggttcgataccgaagaagaggcgatcaatgccgcccagcgcttgtgccaaagcaagcagaaaggcggttatcgctgccaggttcggtgaatcctgtcgccgctaatccggatatctcataaaaccacagacaacgcagacgtccccagggacagatatttgctcctcggcaactgctgatttacagggatgtaatgaaatgcagaaaatgcataacgccatggatggcgtgtagtaggtcgaaaactgctcctgcattttcgacattcaccacatccctgtggcttagcaccaacagcgccttatgccgggtttccgcgcagctccaacccagcctacccgctacctacctcccgcatgagcctaatccattcgtcgagccggcctgcaagcaccttgcgggaggtttctacttttcccgataaagatacacgattgtccggggcgaaatagcatttttccgccgcgcatacccgtcaaaaacgcaaattcaatagtgtgatctcaagcccagacaagtaaatcaggcgctatataattgaggccggtaaagcgcccgattatggcaccaatgcttgcgggtcacgatgccgggcggttgagtccgcatcgctcttatcgatgggcagggcggcaatgggccgctttgaaaaaacgagtcattataatccgaatgaaaaaactccccgcacgggataaagccgccatcgagccttcgagcggaaaggccgcaatcaattttatgaaacacgcggcagcgatcgaataacagtgcgtcgcggtcagcctgaccccgatcatcaagccggctggtcctgtcggcaatgtgagcacggatgatcaacggcaggctgacggctgaatgaagcgagattgaaacaatacaaataaaaaccgacagacataaaaaagcccccttaagttttactttgcgagggctcttgtcgcctggaagcgatgcctacggaacacaattccattggtatggaaagttaacgataggccttagtcggttatatcagggtctggattatacacaaggatcaataatgagcaagaaagttctggggctggatctaggcacctattccataggctgggcattgctcgaggaaaatcggggcaggcctgaccgaataattgatttgggttgccgggtttttaacgaggcggatggagaaaaaacaccggctcccggcaatccgaaacaccgcgatgccagattgaacagacgcattctccagcgcaaggcgaaacgcaaacagcgtatgctcaactatttgttaacgctgaactggctgccggaagaactgcaggcatcacctcagccggaaatcattctgaaccggatcggcgacccctatcggttgcgcgcgaaagccctggacgaaaaattatccgcgcatgaactgggacgggtattgctgcattttgtccagtgccgaggcttttcaggcagccgcgaaacctggccgggcgccatgatcgatgatcccgatgtgctggccgttctggccgagtcggaggagggtgcggaccagcgcgaacgcgacagcggacagatggcgtttaaacaggaggccgaggcgttgagaacggctataaaagaggccggctgccggacgctgggcgaatatctggcgagccgggatcaccctgattgcaagcgcatccgggccaaaaatggcgagcatctgcgcacggaccggcaaatgtataaagatgagttggggttgatctggcggcaacagcagcgccatcacgagcggttaaccgaaccggtgaaagcgcgggtggagcgcattattttttatcaaagacccgttaagccgtgtgctgatcgtatcggccgttgccccctggaacccaaacgcaggcgggccggcctggcccgactggaaagccagcgttttcgctatatgcaggcgatcagtaacctgacgtatttaaaccattgcactgaaacagaagagcgcttgtcggccggccagataggcaggctgagcgcgctgtgcgagacggaagccgatatcagcttcgcacggatcaaagagctgttgggcttcgataattcccgggaatttaacctggagcgcgacatcaagaagctgaacggtaatgtgaccgcctggcaaatcaggaaagttttcagcggctgggataatctgggaaccgggaaacagcaggcactggtcgaggacttgctgaccatcaacaaaaaatccgtgctcaggaagcgtttgctcgggcattggggtcttgattccgcgactgtcgtcaagctgtgtcagttgtcgcttgagccgggctacagcccgctttccagtaaagccatcaataaactgctgccgtttctttatcaaggccaaagcgtggccgaagcgcgggtcagcgcggggtatggtcctgaagttcaggctgttgcccaaaaggataaattagccgtgccgccggaaaccgccaatcccgtcctgcaaaaagggctgcatgaactcaggcggctgatcaacgccctgatcgccgagtacggcaagcccgatgcgatcagggtgcaaatggcgcgcgaattgaagatgaacagcagacgctatgccgcatttagcagacagcaaaaagccagggacaggatgaatgagaaagcggtgttgatgtttcagcgcgtcaaacggcagaatccgcatctggcattgaccgacgcccccggcaaaaccgatcagctaaaataccggctatggcaggatcagcggcggctctgtgcatattccggccaacgcatcgccccgtcggcgttgttcggacctgaagttgagatcgaccatatcttgccttacagcgaatcactggacgattcgtatatgaataaagcgctctgtttcgttaaggaaaagagtgtcaaaggccgcaaaacgccgattgaggcattcggcggcaatgaggcgcagtggcatcaaatcgaacaaaacctgaagcgatgggacaggtctctggcatcgaagcaaaaacgcttcttcatgaacgcggcaacgatgcggaaagcggattttatcggcagccagctcaacgacgcacgccgcatcagccgcgtcgtgcatgattatttacaacaattggatgcggccatcacggtcagcacaggaagagcgaccgcatggctacggcggcaatgggatttaaacggtctgctcggtgagacgccggccacagaccgcggcgattatcggcggcatgcgatcgatgcgttggtcacggcctgtatcgaccggcggttttttacaaagctgtcggaggcggccagtgagcttgaaggtaaacagtccgaattgaatatcgacgacttgcgggtcgatccggcctggcagacagtacgggaggatctgcggcgggcgctggacaaaatgattgtggcgcatgtgccgcggcttaaattgagcggcgagggatttgaggaaaccggcgcggtatttgccgggggcggtacggtttctcataaagacggcaagatcccgattcagcggagccggatccggcaaccggaagccggcacggccagcggcaatattcatcatgtggaaatattaaggcataaaaccacgggccaatataccggcgaattcgtgacccgactggaggcgggccatcgcgtcaaaggcgccggcaaacataagccgcctgtgattaaaacagaccattccgaaccgtttgagttcgtcatggcgctgcatgtcaatgatacggtcagcgtcgagcaggcggggcagcggattttttaccgtgtccggaaactggacgccggcggcaaccggtgtctgttgcgtctgcattcgacggcgctcccggaccgaaaaaccgaggaaatcgatttcagcatcaacgcggcatcctttaatcgatggcgactgcaaaagcataaaatcaacgccatcggcaaacttatcgacgttaaaccgtcaggccgggataccggttaacctcgccgccaggcatgaaagcgcgccacccacttcaatagcctttccggccgatgctggcgtttccagacgccggcggcatatttgttggcctccgccatggtcgggtaaatatgaatagtggccaggattttattcaagccaatgtcatgcttcatagccagcacaaattccgcgatcaagtcaccagcgtgctggccgacgatggtgacgccgagaatcttgtccctgccgggccgggtcaggactttgacaaagccgtgcgccgcgctgtcggtaatggcccggtccagttcctcgaactgataccggctgacttcgtaggcaacgccttgttccctggcttcctgctcattcaggccgacgtgggcgacttccgggtcggtaaaggtggcccaggggatcacggagttgtcgatacgaaattttttcaagtcgccgaacagggcattgaccgacgcatgccaggcctggtgcgcggccgtatgggtaaactggtaagggcccgccacatcgccgcaggcgaaaatattcggataattggtggcctgaaattcatcgacccgcaccgtatgcctgggcgacagttccacaccgatgtcttcgaggccgaaaccggcggtattgggcgcgcggccgatcgccagcagcagccggtcaaagacaatgcgcagcgcttggccccggtgctcggcgatcaggacgtgctcgccgttttcaatcaggaatcgcgttgcggtatgttccagacgcacatcgatgccctcctgactgaacctggcctttatcatttctgaaacctcgttatcttcctgcgtcagcaggcgcgcggctttttcgaccagaatgacctgtgtgccgaagcgggcgaaagcctgcgccagctcgcagccgataggaccgccgcccagcaccagcaggcgccggggttgctcgcgcaagttccagactgtgtcggaagtcaggtaatcgatgccgtccaggccgggaatcggcggtataaaaggacgcgcaccggcggcaatgacgatggcgcgcgtggtcagggtgcgcgtgccggctgccgtccgcacttcaaccgaccagggcgacgtaatcctggcggcgccttcaataacgttaacgccgagctcgcgatagcgctggaccgaatcatgcggcgccacggtttgaatgatgcgctgcacgcgctccataatcccggcaaagtcaaaatcggctttaatggccttgatgccgtattcggcggaatgctgaaaccgcgacaacaatttcgccgaacggatgaaggctttcgagggcacgcagccggtattcaggcaatcgccgcccattttgtgtttttcgatcaacgtcacatcggccttgaccgcggcggcaatgtaggcggacaccagtccggccgatccggcgccaatgaccacaaggttagtgtcgaatttctcaggcttgggccattgttggtaaattttgttggcttgaatggccgatacgattttccgggtgacgagcggaaaaaggcctaacagcgcaaacgagccgatcagggccggcgagaaaatgccggacacggaatcgatcctggccagttgcataccggcattaatgtaaaccagtgttccgggcaacatgcccagttggctgatccaatagaaggtgcgggttgtaatggcggtcaatcccatgaccagattaatgacgaaaaacgggaaaagcggcaccagcctcaaggtaaacaggtaataggccccgtcgcgcgccatgccttcatccacggccttcaggcgatcggcgaaccgggctttgacaaggtcccgaaacagaaaacgcgcggccagaaaagccagcgtggcgccgatgctagatgcaaacgatacgatcagcgttccccacagcaggccgaacaatgtgccgcccgccagggtcaacagtgcgccgccgggcagggacagggcggtggtggcaatatagagcagcgcataaaagaccgttgccttgacagggtgggcatcgcggtaggccaggagggtctggtgtttggcctttaagttttccaatgtcagtaactgcggcagatcggaatagaaaaaggcgcctatcagcgcggcgatgattatcagcaaaacgatgtgtgatttagccattagttaactccgtttggatgcaatgctgattggattacttaaatatctatttcttacaattatttttatattttttaacctattgtctggggatatcgaggtcaagccaaattatcaatcgatactattaatgaaaacggtatgaaaattcttattcaccacgaacatcacgaaggaacacgaagaaaaagtaaaatccatcaatgcattcttcgtgctcgattgctgttccagatgccattccaccgcctgcatttttgcaggcccgtgttccggtaccggtttacacgaaggcccttgggaaccagggaattgcgtattactcattaccacactcctgcgggataatggctaccgaaagcctgcctgaaaaatacagtagggtacgcattgcgtacgaggctgtgaaagaattagtgaaaaacgtcataaaaagccttattcaccacgaagatcacgaaggacacgaagaaaaaattaagttaatcaaatacttaaaacttcgtgctcttcgtgtccttcgtggttaaaccctttaaattgaatactttcacagtctcgtaccttttccagcggtttcggtgaatgccatcccaaaaggtacgcgataccctaaagggcataaatgcgtaccctaccgaatttatgaatacctctggcgccctgccggtcggtgaatggcttgtttactcgttaccacgctcctgcttggtaatgcataccgaggctgtaaataatttccctgtttaaacataggatgcgctgagtgcagcgaagcgcatcctaagaagaaaattgtcggccgcctgcatcccttgtaggcaacccgggagaagtttgtccgggaaggtgttttttggcttttcaattaccgcaagtaaggcgcccgagagcgaatttttttgcgggttgttcctggttggaggcgggtggcggggtattctgaaatatgaacaataagggctatattgggctgccgacaaaccttcattaataattaaatgtgaagcaaaaataaatttggcactgcgtaacttcacttattaacacgggaatattaatagtatattcttcagctgtggcttggactttgtcagtaaaaaaaaccgaatcaaaaaaaaaataacaaaaatgactctcaataatatcgattgtaaaaactttatgctggttttattcctttctcaggctcgcagcaaagagcctgcatttaatatgttttgaaggaaataacaggggatgcaaaagaataggcggataattcaccggtttctggtgttggtggttctggccggcgtggctggaatcgttatcgtttttgcaaatgttataaaagaagaggtcaatacctccaaatatcaagctcaatatctttcggagatcagcaaacaactgagtttcaagctcgagcccggccccagttcatcgatccgttatcccgattccggtccatacgacttgaggctgggttatgcgacgttgccggacatgatccagcgcgcggaaaaacacggtttcagcatttccgcccaggccacgtcttcgcccatgctgacgcagctggtcgattacggtttattccccatttatcgcgagaaaacccaggccgggctccgtatcgttgaccagtccaatcaagtcctgttcagagcggtttatccggcccacggctatccgaatttcgaatcgattccgccgctggtgctgaacacgctgctctttatcgaaaaccgggaattactggacgacacgaagacgacagtcaatcccgccgtcgaatgggatcgcctgggattcgccgggctgcagctgatggcgaaaaaactgggcgccgacatcaatgtgccgggcggcagtacattggccacgcaattggaaaaataccgccattcgcccgatggctatacgaaatcgttgctggataagttccgccagatggggagcgcatcggtacgcgcctatctgctggggcccgatacgcgcgaaatgcgccgggaaatcgcgctgtcctacctgaattccatgccgctggccgccacgccgggattgggagagatccatggcctgggcgatggcctgaccgcctggttcggcgccgacttcaacgaggtcaaccgactgctcagccgggacgcacttaattcggaacatatcagccaggagcaagggcaagccttccggcaggtcctcagtattctgttgtcgcaacgccggccgtcctatcttttgggctccggttttgagacattgcaggcgctgaccgacaaatacctgcggctgatggcgagccagggcattatttcggcatcgttgcgtgatgaggctttagccgcgcccgctagccgcgctaaacggtcgaatatatctttcgccaaattcatggcggagaaaaagacccagtcggtgctgagaacgcgtctggccagggcgaccggcgtcaggtccatttacgatctcgaccgccaggatttaaccgtcacgaccacgattgactaccagacgcaacaggcggtctcgaaagccctacggcgcctgagcgatccggctacggcccgtgccgccggcgcggtaggttttcggctattgggtgaaaatcaggatttatcccccgtcatttacagcttgatgctgttcgaacgcagcaaaacgggcaatctgctgcgcgtccaaaccgataattacgatcagcctctggatattaatgaaggcattcgcctggatctgggttcgaccgccaagctgcggacaatggtgcattatctggaactgatcagcgacctgtaccaggagtataaaggccgaccggcccaggaactggccaagctcgaactgcatccgcgcgattatttatcggcctgggtcatcggacagtttcgggcgcggccgggcataaacctggaggagttgctgaatctggccctggaccggcgctattccgccagcccttacgaaaatttctataccggcggcggcattcatcatttcgagaatttcacccgtgatgaaaacaaaaaaatcatgtcggtgcgccatgccttgcgcgattccgtgaatctggtcttcatccgtctgatgcgcgatgtggtttatcatcatctctacaggccggacggcgttgcccgctggcttgaaaatgaagacgatccgcgtcaccaactttatctgcagcgattcgcggaccgtgaagggcaggtttatctgcgccgcttttatgccaaatataaaggcaaaagcgaggaacaggcgctggctttactgacccagcgggtcaaggccaaagcatcgcggctgaccatgctgtatcaggccatttatccggatcgtgacgagtatgatctcaacgcgtatctgaaagcgaatctgccatcggcggttctggcgaaggaagacataggacgcttgcaccagaaatactcaacggcgaaattcgacttgcaggatcagggctatatcaccaagattcacccgctcgaactgtggctggtcggctatctggccaggcatcctgatgccacgcgcgaagaggttatcgccgccagtgtcgagcaacggcaggccgtttatcggtggctgtttaaaagcaagagaaagcaggcccggcaacggcggatcatgaccttgctggaagccgaggcgtttaaggagatccatagcgcctgggcacgcgtcggttatccgttccgttacttgacaccttcttacgcgacatcgatcggcgcctccggcgaccggcccgcggctttggcggaactgatggggattttgctgaatgacggcgtcagacagccgctggtccggtttgagagcttgcattatgccgaggcgacaccgtatgaaacgttgctgaacagatcggtttctcaaggccagcgtgtgatgccggcggaagtcgcccgcgtggctcgcggcgcgctgatcggcgtcgtcgaaggcgggaccgccacgcggcttagaggcacgtataccgatttggacggcaaggcgctggcggtaggcggtaaaaccggcaccggcgatcatcgccgtcaggtctggggagagaaaggccgcctgatagaatcgatattcatcagccgcgccgccacgtttgctttttttctcggcgaccggttctttggcgttatcaccgcttatgtggaagggcctgaagccgaacaataccatttcaccagttcattgccggtacagatagtcaagtttctggaacccacgctttcgcctttgctgaaccgggcgcccaatgaaccgggcaatttgccggtacctaaaatagccatgatcgataagcacaatatggtggttccggccagccatagtcgtcattaaaaaaatatgcgggcgggtttttgcttagtaatgggcatggaataaatcagggaattgtaggtgcgaattcattcgcacctaaaccggaaattccatccgcgcacttgaggaagttattttatgcgcgttccttaaggcccctgcttgtaaggctcgcccgcttaacatcattataaaaccacgaaggacacgaagctcacgaaggaaagtccagtggacatatcatggttcatcgttcgcgatccgcacctcctgaaacgaccgcttctgaccctgcaggttaaggctgtttccgtgggagcgatgcccacatcgcgactggccgggcgatttcaaatcgcgatatatacccaaaggacataaaggcatcgctcccgctaccggcattggtaaggaacgtgaattttagccaaatccttaaatcacggtactcacgttaaaaactgatattcccctgcagccagattttctgggtatccgttgaaaactggtcggcatcgtaataggcatacttggccaatagcgcataatgcttgccgaatttcttgagcgccaggaaatcccattccttgccgtaatgaatccggccggtgtcgtcgctaaaatcatggaatacgccgctcagggtcaggctgccgttgtccagggacgcgctcagggtgccgaacacatcgcgaataccgtcattgggcgtcaccagaaactgatccgcccagccctggaaggcatgattggttcccagcggcgtaagaaagcgtttattggcgcccaggccattcatttgttccatggcgccctgaacagtaatcatattgaacgcgctcaggccgcccatcagattgaagcgatgggcttcgtaatcggtcgggctgtgctggtaatctttttgaaaactccattcggcggtatagagcgcgctcagcttgtcgttaatggccgtcttgccgttgaaacgcagaccgtaagtctggtttgatttggcgtaattttcccgttccgtgtaatccagccagtagccgtagccgatcagattgccgtaatcgccgactttgtagttgatattcaggataggggcattgatgttctcggtcgtgcccaagaacgtgttgacgttgccgatatagccggcgttgacggtcaggccggatagcagcgaactgttatacgtgatcagcactgagtcgaacgtcgtttccagctgccgccagccgacgttgccgataaaacggtcgtcatcgagcttgatgcgctgccggccgcccttgatcagcgtgtcgggaatgccggcataactgatccagagctgattcagctcgttttcatcgggatcggcaacggtcgagaaacccggcttgttgcccaatccattgttgtaatcgctttgcaggacatagttgccttcgtattcgacatagccttgcaggccatgaaagaccggcgacagcagtcccaggcgcaggcgcaccgtattggcattggcggttttcgggttgccggggcctttgtcctggttgacgttttcataacggtagttcaggtcaaacttgactgaaccttttttgccatcctgataaaagttcagcgcattttcgatcgactcgttcaggctggcggccgaagccgggccggcgatcgacgataatgccaacagtgcggccgaggcgtaaccgaagggtatgttttgtctcataagttcctcttattttattagtgtgtgtgatcgcagtcggtcagaaaggtcaggatgctttcccggtatcggtagtaattggcatgttcgaggagggctttacgggagcgcggccggggcaggttaatgtcttgaatcttgccgattctggcatgcggtccattggtcatcatcaccacgcggtcggccagcaggatggcttcatcaacatcatgcgtgaccacgatcgctgttacctgtgtccgttcccagacttccatcagcacttcctgcagttcccaccgcgtcaaggaatccagcatgccgaacggttcatccagcaatagcaatttgggtgacagggcaaaggcgcgcgcgatgccgacacgctggcgcatgccgttggacaggtcggcggcttttttataaagcgaatcggccaggccgacgcgggtcagatagtactcgacgatatcgttgcgttctgagcgtgaggcgtgcggatagactttatcgacgcccaatgagacattttcaaaagcgctcagccacgggaacaggctgggcgactgaaagaccacgccgcggtccggtccggcgctgtctatctctttattatataggatgatgccgccttcggagatgctgttcagaccggccgtcatcgataaaacggtcgacttgccgcagcccgaatggccgataatcgagatgaattcgccttttttgactttcagatcgaaaccgtccacgactttaacgcgactgttgccgtcgggtgtcgggtaaattttcgacagccgcgaaaactccagatagcgcggcctgcccaaatcattgaggccgggtttcaaggccgggttgtccctgttccagtcatggctggtattgggccgcacatcaggcagcgtgatgttgtcgcagcttgcggcctgcttcttatcgatgccgatgcccatcagatattgcgtgatttcggcgcgcagttttttgaatttctcgttatggtttaaggccgtccggtctctcggacgttcgatgtcgataatgaagtccgggccgaacgtggcgccagggcccggggtaagcgggataacgcgatcagccatgtaaatggcctcatcgacatcattggtgatcaggattacggttttcttgtcctgctcccagatttgcaggatttcatcctgcaggtttccgcgcgtcaatgcatcaagggcgctgagcggttcatccagtaacagaatgtcgggattggcggccagggccctggcgacattgacgcgctggcgcatgccgcccgacagttcagccggttttttatccatggcggcgcccagattgaccatgcgcacgtatttttcggcatgggcgcggcgttgttccaacgaccagtctttaaaaatctgatcgaccgccagggccacgttctcgaacaccgtcagccacggcatcagcgaatagttttgaaacacgacgccacggtccggtcccggcgccgtgacggggcggccatgcttcaatacatcgccgctgtcggcttggattaagccggctatcatcgatacgagcgtggtcttgccgctgccggaaaaaccgacgatggcgataaattcaccggctttgatatcgaggttgatgtctttcaggacagagattttatccttgcccgtaccgtaggatttactgacctgtttcagttccatcagcggcgcgcgtgcgtcattggacggcgcgggcggccggatggcgtcggcttcggcaataatattgagtttgatagcggacatgtcaggctcccggttaaagtgtcttgccgaaagaaaatgcttgctggaatgcctgcatgatgcgatcaagc

SEQ ID NO: 675 - DNA, 22442 bp, synthetic construct
  source 1..22442: mol_type = other DNA
  misc_feature 1..22442: note = Synthetic
gaaaattgcagattgccggcatacgcgcgtagtggtttgcagggatggtctggagaatgtgctggggattttgcaccgcggtgatttattgaagtcgatgatggaaggcgtgtttgatattgagaaaacattgcgcccagcgctgtacgttcctgattccataacgctcactcatcttctggagcttttccgggaagagcatgctgattttgccttgatcgttgacgaatacggtgaaatggaaggccttgttgcgctcagcgacgtcttgacggccattgtcggcgatttcccgacagtcgagtccgaacttgatcctgatgtggttcaacgcgatgatggctcgtggctcattgatgggagtgtctcaattgcaaggctgaagtcaattcttgatatagataccgattttcccgatgagatggccaatgtctacaataccatcggagggttcatcctgttctatctcgaaagagtccctcatgtggcggacaattttgaatacggcgactggcgttttgaggtggtggacattgacggaactcgaattgataaggttctgatcacctccataaatcaatagatcggtttcagtctctctttaattaaaactgaagagccgtaataaccttcaaggattgaaattattacggcttggcttagtcctgtgccgcgccggaaagtgatggctgggccagggcacacagtagctcgtcaaagttgaccggtttggtcagataatcgttgaatccggctgtccatgccagctcacggtccacctcgcgtccgtatccgctcagcgcgatcagatgcgtcattttcaacgcgggatgttgcctgagcgcccgcgcaaccgcgtagccatccataccgggcaggccgatatcgagcagcacgacctgcggccgttcagccagtgcggtttccagggccgtatagccatcattggcctgcaatacttcgtgcccttcgctgttcagcaacagggacagactctgggcggcatcgcggttatcgtcgaccaccagaatgcggagcgaaccttcatccggcttcgaatctgccggataggaaacaggagcggccggtgattcccgcaggcagggcaggcggatgacaaattcgctgccttggccgcggccttcgctgtaggccccgacctcgccgccgtgcatcgtcaccaggcttttgaccagcgcaaggccaatgcccaaaccgccttccgcgcggtcgatagtgtggtccacttgatagaacagttgaaacagactggacagtgcggaagactcaatgccccggccgttgtcgcggacccggatgaagatctcgtcgtctgccggttcaacgctcagactgatgtagccgccctcgtcggtatatttggcggcattagtgagcaggttagccacgacttgcgacagccggaccagatcgcctttgacataggccggctcaggcggcaggtgtacggtgaatgcatgacggcgagcctcgatcagcggctgactggtttccaccgcccgctgcacgatagccgacaccgcgagaggctccttcttgagttcgatcttgccgcggctgatgcgcgagacatccagcaggtcgtcgaccagctggaccagatgctcgacctggcgaccgatgacatcgcggcaccaggccagccgcgtttcgtccagattgggccgtttcatgatttgcacggcgttgctgatcggcgccagcggattgcgcagttcgtgagccagcatggccagaaattcatccttgcggcggtcgatctccttcagtgcttcctcggcctctttgcgtttgctgatatcgagcacatgcgtcacgaatccgcgcacttgcccctcggcgtcgaagtccggagagtacgttgcgtgaatccagcgtgggccgccctcgatgtagggcgcctggagttcgaactcgacctgctctccggccagagcccgttcgacgtaagggcgaagagtttgccaacttgtctcaccgagaatttcccgcatgtgatgcccacacacctgttcaggggtagagccaaaccacgattcgtaatttttattgacgcgacggtatcggcattctctatcaacataagacatcagcgtcggtgcgttgtccatggttacccgcagcagatcgcgagtctgctcggcctctcgccgcgcagcctccagttcggccgtacgctcggccacgcgctgctccagtgacgcattggcttcgcgtagcgcctgcttggtctgtttcatttcggtaatgtcgatgcctacttccaggatcatcggcgagccatctgtatcggtaaaaggaaaatcatgaatctcgtagacatgttcatccggaccggtccatcgccattcctgcggcgcattggtcttcagcggcttgaaggtttcgcagcgctcgcaaggctcgcagcggttaaacagatattcatagcagagtttcccctgggcgttaccgtagcgctgttcgaagaatcggttggcgaaggctaccttgtgatcctgggtcagtagcaccacgtagacagggagtccctgaagcacatcatgcagtcgctgacgttcggcttgcacggctgaataggcttgagccagctcggcagtatgcaaagccacctggcggcgaagctgccaggtccacaggcctagcaaagtcaataggccagcgataatcacagtgccccaaacaacgtgcttgaccggaaatgtgaaggaggtatcgatatcgaaccactttctgtagagccggtcgtactccccgttggccttgacgatggccaggccctgattgagacggtcacgcagttcagtgtcgcctttgcgtacggcgaagcagaactcccgtcggtattccttgagcagtggaccgggcgtgactattttttccaggccggttttatgcaacagaatgttgccttgcagcagcggcgccagcactgcgtcgtggtggcctgaagccagcaggcgaaagccgtcggtcagattatctacgagcaccagttgctgattgaagccgcggctggcaagggcgtcgtgagaggcgtccgagcgcaggacgataatgctcaaagtccgggcctgctcaataaactcgagaggggcatgtcccttgcggacgaagaaggcatcgtagccaatcgtgtgcggttcagtgaactccaccagtccttcgcgttccggcacgcgcgccaccagtggcagggcatctatctcgcccgtcttgagcttttgccagaccgtgctccaacggtctgactggaaggtgacgggaatatccatcacttcggcaaccctggcgaacagctcgacagtgaaaccagtcggctgcccctgatcatcgatatcggcataaggcggaaaacgggtttccgagccgacacgcagggactgcctctgttcggcgccaacgagatcgggaaggctcaggatgaccaaagccagtatgagtgcaaactgtctgatctggaatttcatatgaggcaatatgtcccgttgagcttaaatgctgaaaagctattaaggttggctggaaaatggagtagtgattgcattatctctattgtaagtccgggtaatgttttcaaaatcgatgttccgtgattggctcaaaagcaacagccgtctgaaaaatatctaaactaacatggcgaccgctaccttggatgaaagtcctgctaatttctggacgagttgctgccagcggtagttgtcatagtagtaattgtaatagtaataatgtaattattaacctacttatttagtcagaatatttaaataataattccattgcaagcttgttttgactcgacaaggcagtttctgatgattattcaggggaaaagaaaactggaaggggaatctaacagcgttgatccgccaacatggctgatcttgagtttcagcgcattatgtcggctcaaggctttcagccacggaatggatgacttttgcctgaatcccctagttcccagacacaattcaaagtacggggattttgcaaactacgattaattatctcgacataaactgatgctcggcagaagcgctgaacttttaatgaagcgcatgagtcaacatttcaaaacttacgcaggcatagaggccttccgtatgatagccgataaatattacaccattttgtcagctagtgcttttacaagggctgaccctgtctttggaagatgcgtacaaaattaaaacaatagtggtggtggaaatatgcaactcagtttgggagatagattcgccgaattgcacgcgtaacaaatgattgagcaactaaaccaatggtttttggtttggacaacgctcggctctctgtaacaagtatgtgaaattggtggcggcatgtcggccattcttgcggccggcaaaagaaagtgaccaatgagaaccaaaaaggaacgtcggctggaagcacgctgaacgttgttgcataactaaggctgcccgaatacccctggatggaattttgattgacgctggctcttgccatcggaaatgggattggtttccgagtcggaagctaaacccaaaacatcaaggagatattgcatgaacataagttatcgagagtttttcaagaagcagaaacacttcatcttaaccgtggcgaaactgccggtttccagcgatacactaggcatggtcagcgcaatcattatacctgcgctaataggaatcattggaatcaaaacctacaaaattctcttcgcgctctggcctgttacccgatcaacactgggttgggaacctccgaccctctttgaaggaatacgcatcttcctggtgtcgccgctggcgtttcttgctgttgcgtacttggcagcttatttcgtcttatggcagcgactttcgatccggcgctggttgcgcgcaatcctgctgtttttgttgccattgattgccttgcctttggccaaggtcctttggaccgggataaaggggaagaatctaacgggaattgaatcttcctgggcgtatcagattgtccatgtgtatggagatgcactgtcagatattcaatttctgtccgggatataccaaacggacatcttttttctagtcgggtatggcctgctttctactcttgctcttagtgtcgtgcccaaccgatggcgacagctggtgttctcgctgttcatctgtttaagcgcaaccattttggctgttgccggtctggaacttgcccattatcttaaaacaggcatgaacggcaacgcgtcgatgttaatgtactttcttgcgaatgccgacgatctgtgggatatggtaagggacgaagtcaattggaaaaccatcgttgctatattggcacctccttttttaatattgctgtgccccttgatcagtcgattagtaacgaggaatccgtggatcaattggcagcaagacaagtcagtgttcaacgcaggaaaggtgatctggctggtcctgctcgccggtatccttgcgcccgagcacatcggtcaggaatatattcgactgagaggaaatattgtccttaactttggccaggagctgctgtttcaacctgacatacccactgaggcattcaaggagggaaaagcgctaagacaggctgcgttgaaccttgagtttgttccgactgcccgcgcacagcgcttaaatattgtggtcgtactgctggaatccgtgcgagccgatgcaaccggcgtttataatccgtcgcttcaaaatactccattcttacgtgagttaagtaaaaaatccttagttgccaatgagatgtatgcggttattccaagaacatccgcggcatgggtaagcgtgctgaatggcatgtatcccagcattaactctgcgctaatgtattgggcctaccgggaggccggtaatccgaagtttgcaagccttccaaggttgttgcgaaagaccgggtataaatcagcattttttgttccaactcatcttaattacgaaaatgaaggtcaactgctcttcaatatgggattcgaccagattgtatctgaaaaagactatggtaaaacttcatatgaacatgtgaattattttggccttgaagacagggttatgattgaccccatcatgtcttgggtagatacccaaagaaaagaccataatccgttttttctgaccgttatgacaaacgtaggtcacgaaaaatacacctttccgtcgacttggaaaaaacgggaatttatagggagtggcaacgaagattacaataattaccttaattgtatcgcttatatagacgattttcttaaacggctgtttaatgaatttcaacgccgcgagttattccagaacacgatattttttgtgctgggcgatcatggagagcctttcggcgagcgcggcactaaggagcgtgcgctctctatgtatgaagaagaactgcatattccaatgctcatctttgcgccgtctctattccacgacggagggaaaatcattggcccccggcagcaggtcgacattctcccgaccattgcagacatgcttggattttccactaacggtgacctgcctcccgggctttcgcttctcagggacaatccgaaggaccgcgagctctactatagctgcattctggagggaatagccataggcatgcgtaagggctcgcggaagtatatatacaaatttgattctgcgccgatggaggtgttcgatttggcaaaagaccctgatgaacgccatgacctggcaggcgaaatcagcgaaacggaagctttaatggccaggaatcagatgctgaagtggtatggagccacaaggttatcgatgacaggttcggaaccggatcatgatttggcggcggccaaacctatcagagcctgttcaaaattttcgcagccacagtgccaggaaagccagagtaacgaattgcaggccggtattgggcaagcgcccggaatttttctgaaatcatcggcgcttttccaaccagacgaatgattgtttcacgatccagcgctgggtcaaggcttttcggcaacggcatagatgacattcgcctgaacgtcttgtagccgcgcgtcggctatgaatgccagactggcccggcgaacatagtctatcgcgtccgaatccatctggtcgatcgtgccgcggtatcccgatccgagcagcgttgtccaccagtcatccggcgatgcaatggcgtgaacggcggattcggccgctatcgatgatttgagcacgcctccttcgaccagcacttcattgagcgttgaaggctccgagatgcggtcccatgggttgaattctttatacaggtcgggcctgacatcgcgaacggcgttccagaacgccgtattggccggctcgaagaaatccggcccccaggtcgtaatggcgagtttgccgcccggacgcaggactcgccacagttcacggatagcggccgggatatcgggcacgaaaaatatcccgaacacgcaaaccaccgcgtcgaaactggcgtcgggaaagccggtagccagcatgtcgccgacccgaaactcaacattgtttaaattattattgccggccttcgtgcgtgcaagttcaagcagtttctctgccagatcaatgccgattacctggcctgacagccccacttgtgcggccgccggcagtgctgatgcgccggtgccgcagcatacgtcgagcactgatgagccaagctttagatcaagccggtcgatggtgctttgcccgaatcggttccagaaagtattggccggatggtcgaacaggtcggaagcggcattgtaggccgccgccgctttggcttgtgcttcatttaatgaaatcatgggtggtctcttggatttaaagcgccgcttggtggacggcctgaattgatacagaagatgggtaatgcatttataatccccaaataataccttaaagacgggcatcaggaaacctgggctaacttgttggcattgtcgagcaaattcaaagcattaatgagtctgctttgtcggttgcgccattctttcatgacacatttgttgcggaatggttatgatatgcccccgcaggcgcgtcaggcggaataaattctaatcccgttttaaaattatcgagactgccggagggctgattttttgctatgaacgctggacaaatcgcccatgtagcctggaaaaagcactttcaattgaaggcgatattgaaatgaaccgcatttatctggtccggaacgaggcggacaaaaacatgaaccggttttatcaactgatcatcatgccggggctgttcggtgactggtcgctgatccgcgaatggggccgtgtcggttcgcccggcaccgtgcgcaaggattggttcgataccgaggaagaggccatcaacgccgcccagcgcttatgccaaagcaagcagaaaggcggctatcattattattcccgatgaatcctgttgtatcgactgaaagggcaacagattaattatcccgtctgccgcgccggccgcgcgcgttgacagaggtactccgcggctcttctttatcgcgtttcgtagatatacacgcactttccgtgatcgaaatagtgctttcccgactcgtccgcggcggcgcttccctgcaccgtatatgaggcattcccgttcgcggccaagtgaataagacgttgaacagacccgccatccgccagcataagctgaataacagagtaagactcgcctgtgtttgttcggattgaaatgccgtcacctttatcgagttcgtttatcagcatacccgaaactacgaagggtgtttctgggtggcaaacaggccatggatgccggaagcgcatattcaatattgtgacctcaaactcagactcgcaattcaagcgctatataataaaagtctgtaacgcctgcttatagtacaagggcttgcggctcatgatgccgggcaattgaaccaggttatttcagccatggcaaaggcggtaaaggatcactttgataaggcgcgagcaattataaattcaagtggaaaagcgcttgctgttagcaaagtcggcaccgatattgaaatgatcggctgcaattcatttttatgaaatacgcggcgaaagccagataacagtatgtcacatttttactttccaagaatccgatcaacaaacttgccggccacatcggctaccgcgaattgatgacaaaaaaacagaccgtcggatggctaattgaagagatagggaaataataaaaagtagcaaatcgatggatataaaaaagcccccttaagttttactttgcgagggctctggtcgcttggaagcgctgcctacggaaaacaattccatgggtatgaaaagttaacgataggccttatcggttacatcagcgtctggattatacacaaggattatgaatgagcaagagagttctgggattggatttgagtgcaaatgccatcggctgggcattgctcgaagaaatgcacggcagttccaataggataattgatctgggttgccggattttcagcaaagcccttgaagagaaagcaccttcttctaaagatgctgagcgccgcaatgccggattaatccgacgcattcttcagcgcagagccagacgaaagcaacggatgctcaattatttgttaaagctggacctgctaccgcaggagttgcagacatcgtctcaaccgggagccatactgaaccagatcggcaacccctatcatttgcgtgcaaaagcgctggatcaaaaattatccaggcacgaactgggccgggtgatcctgcatttagtccaccatggaagccttccgcgcagccgcaaaaccttgctgggcgatatggtcgatgaccctgatgcgttggcggttctggccgagctgggggagggtgaggaccacgccgaacgcggcaaggaagaaatggcctttaaaaaggatgtcgaggcgataaaggacggctatcaaagagacgggctgccggacgctgggcgaatatctgtcgaggctggaccttcgcgactgcaagcgcaatcgagcccttggcatgcatttgcgcacggataggcaaatgtatcaagatgaactggaactgatctggcaacagcagcaataccatcatgtcctgttgacggaacaggtcaaaaagcaggtggaacgcatcatcttttatcaaaggcttcctaaatcgcgcaccgaccgtgttggcaggtgcgctttggaacccaaacgcaagccggccggtatggcacggctggaaagccagcgttttcgctatttgcaggctatcaacagcctgacataccgtgaggattgcgctgaacatgaagcgtttttgtcagccgggcaaaaaggcagactggtctcgctgtttgagtccgaagccgaggtgaccttcccgatgatacgagcggcgttgggctttgacgaagccatggaattcaatctggaacgcagcaataaaatgctgaaaggcaacgtgactgcctgccggatcagaaaagttctgagtgcatgggatgatctgggcgctgaaaatcagcaggtactggttgaagatttattgaccatcaacaagaagccggttctggagaaacggctggccgagcactggggctttgacccggttactgttgccagtctgtgcctgctggagtttgagccgggacattgccacctttccgtcaaagccatcaacaagctgctgcctttcctttatcagggacagagttactccgatgcacgggttagtgcggggtacggccaggaaattcaggagagggaaataaggaacaaactgggcgcgccgcccgaaaccgccaatcctgtcttgcgaaaaggactgcgtgagctcaggcggctgatcaatgccctgattgccgaatacggcaagcccgatgcgatcagaatccggatggcgcgtgatctggacatgaatgccaggcgccaggcagaattcatcaggcagcaaaaatccaatgcccgggcgaatgaggaggcgatgctgaggtatcaggacattcagcgacggaacccgcatctggacttggccggcttctctgacaaaaccgttcaactaaaataccggctatggcgggatcaacagcggcgctgcgcctactccggtctgcgcatcagttcatccgttctgtttggctccgaagttgagattggctacattttgccttacagcgaatcattggacgattcttatatgaacaaagtgctgtgttatcgcaaggaaaacagcaacaagggccaaaaaacgcctattgatgcgtttggcgatcataaagaacaatggaataaaattgtacaaaacctcaaccggtgggacaggtctcttacgccgaaaaaaaagcgttttttcatgacgacggcaatggtgcggaaagaggattttgtcaacaagcaactcaatgatgcgcgctatatcaaccgtgtaacgcatggttatttgaaacaactggggacggatatttcggtcagtaaaggcttaacgaccgcatggatccggcagcaatggggattgaacaatctggctggtggcgcatcggcaaaagatcgggccgattatcggcatcatgcggttgacgcgctagtcgtcgcttgcattgatcggccgttgtatacgcatctggtcgaggcggccagagaccttgagcagaagcagtcccaattgaatctggacgatttacctattgaaccggcctggaagactttgcgcgaggatttacagcatgcgctcgataatatgattgtggcgcatgcgccgttgcttgactcaagtgctctgtcgcatgaagaaatcggggctggcaaggtctatagaagacctctggatgggacatttacacaggtcaataaaattgtcgatcccgtggttaaggatatcgtccggcagcatctggaacgctacaatggcaaacccaaggcggcgttcgcggaaggcgtgacgatttatcataaagacggcaaaaccccgatcagacgggtgcggattctgcgatcggaaaccacattgcccaagcccgatccagccgaatccggtgcaggggacaagcagggcagggtttttaaatggctggcctaccacggcagctttcatcatgtggaaatattcagaaataaaaacaccggccaatatatcggtgaatttacggccatgacggaagcgaatcatcgagcctggggcattggcaaacagaaacagccgatcgctaaaacaggccaggcagaacagcttgagtttgttatggcgctgcatgtcaatgacatggtcagcgtcgaacagggcgggcagagggttttttatcgcgtccagaaactggatgccggcagtagggaatgcgtactgtgtctgcattccacagcgatctccggcagaaaagacgaagaggtgatccatttcagcataaacgaagcgtcatttggcagatggcgactgcgaaaacacaagatcaatgcgattggcaagcttatcggatgataaataacgacaagttatatgaaaaagtcgcattagccccgccgccaggcgtggaagcgcgctatccacttcaacaatgtttccggctgatgacggcgcttccatacgccagcggcgtatttgttggcttccgccatggtcggatagatatgaatagtgcgcaggatgtcattcaggccaataccatgcttcatggccagcacgaattccgcgatcacgtcgcctgcatgctggccaactatggtgacgcccagaattttatccttgccgggcggggtcagcactttgacgaaaccgtgcgccgcactgtcggcaatagcgcggtccaggtcatcaatattataaatgctgacttcataggcaacgccttgttccctggcgtcctgctcattcagaccgacgcgggcgacttccgggtcggtaaaggttgcccagggaatcactgagtagtcggtacgaaatttattgaagctgccgaacagggcgttaaccgatgcgtaccaggcctgatgcgcggctgtatgagtaaactgatagggacctgccacatcaccgcaggcgaagatattcggataattggtggactgaaattcatcaacccgcaccgtacgcccgggcgccagttccacgccgatgtcttccaggccgaaaccggcggtgttggctgtgcggccgatagccagcagtagccgatcaaagacgatgcgcacttcctggccccgatattcggcaatcaggatgtgctcgccgttttcggcaaggaattgctttgcggtatgttccaggcgtacgtctatgccttcctgactgaacttttccattatagtcgtggaaacttccgcgtcttctcgcgttaacaggcgcggtgctttttcgacctggatgacttgtgttccaaggcgggcgaaagcttgcgccagttcgcagccgataggccctccgcccagtaccagcaaacgtctgggttgctcgcgcaaattccagatcgtgtcggacgtcaggtaatcgatgttgtcaaggcccgggatcgcaggaacaaaaggtcgcgagccggtggcaatgacgatggaacgcgttgtcaaggtgcgcgtgccttccggcgtcgtaatttcaaccgcccagggagaaataatcctggcgcttccttcaatgacatccacgccgagttcccggtagcgctgcgccgaatcgtgcggcgcgacggtttcaatcacacgttgcacacgctccataatcccggcaaagtcaaaatcggctttaatgccgttgatgccgaattcggcagcgcggtgaaactgcgccagcaatttcgtcgaacggatgagggctttcgatggcacgcagccggtattaaggcattcaccgcccattttgtgtttttcaaccagcgtgacgcgggccttgacagcggcggcaatataagcggcaaccagtcctgccgcgcccgcgcctatgaccacgagattggtgtcgaacttgtcgggtttagcccactttttgtaaatttgtttggcttgaaaggccgaaacgactttgcgtgttataagaggaaaaagtcccaataaggcaaacgatcctagcagagcaggggagaatatgcccgacaaagtatcgattttagccagttgtgtgccggcattaatgtacaccaccgtaccaggcaacatgcccagttgactgatccagtaaaaggtgcgggttgtgatggctgtcaatcccatgaccagattaatgacgaaaaacgggaaaaccggcaccagccgcaaggtaaacaaataataagccccgtcacgcgccatgccttcatccacggctttgatgcgttcggcgaacttggctttgacaaggtcgcgaaacagaaaacgcgcggccagaaaagccagcgtggcgccgatgctggatgcaaacgatacgatcaatgttccccatagcaagccgaacagcgcgccgccggctaatgttaacagcgcgccgccgggcagggacaaggcggtcgcggcaatataaatcagcgcgtaaaagatcgtagccttgacaggatgggcattggtataagcaaggagggcctggtgcttggcctttaaagtttccagggtcagcaattgctgcagatcggaatagaaaaaagcgcctatcagcacggctataattatcagcaaaacgatgtgtgatctggtcattgtcttatcctagtgaatgcaatgctgattggagtgtttaatcactattagatgttatacacgggccttttttatcccgcttattgtgcaagcgatacttcataaaccgatcttttccaactcacccccgtaacctcatcaattgaatagtcttcatagatgcgaatttacttgtgatctggagggtattcgcactaacaacaatgcagccgtttataaagcattgaaggcactttgggtcgaatgccaacagtaggcgctccagggaccctgccgttgcgtaatatcagtggctgtatttcttataactatttgatattttttaagctatccgtttgatgatgtcgaaaatggctatagttacctggaaatattacctactgcatctaaatctgttacgctaatgcagcgagtgcgtagcgcgtttttgttagttgcctgatatcagaggcgcaggcggcactatcagatagacttgaagaagatttctaaccagaagccaaatgggttattcaagaaaacaaataaaaaaccgctatactgtgttgcgcaatgcgcccgcactaatttaactacgaactacagaaatttaatactgcgtaacatcacttattaacacctgaatattaatagtatattcttcatctgaaaacttgggcattgtaagtaaatcgaatcgatacatataaaaatgactttaaataacagcatcgagtggaaatattgtgtcggtttcgttactttcttatgctcgcaactaagagtgcgcttattttgctttgaaggaaattatcaggaatgcaaacgaataaacggataattcatcggttttttagtctggcaattctgatcattctggttggaatcagtattgtttttgcaacagttatcagagaagaggttaaaacctccaaatatcaagcccaatatctttccgaaataagcaagcaactgagtttcaaactagagcccggtcgcagttcatcgattcgttaccctgatcatggtccttatgatttgcggctaggctacgcgatgctgccggatatgattcagcgtgttgaaaaggcaggctttagcatttccgcccaggcggcctcgtctccgatgctgactcaactggtcgattatggcctattccccatctatcgcgagaaaactcaggccgggcttcgcatcgttgatcaggccaatcaggttttgttcagcgcggtttatccaacttacggttaccccaacttcgaatccattccccctctggtgctgaacacgttgctttttatcgagaaccgggaattgctggatgaaacgaataccaccataaaccccgccgttgaatgggaccggctgggatttgccggactgcaattaatggcgaagaaactgggcgctgatatcaatgtgccgggcggcagtacattagctacgcaattggaaaagtaccgtcactcgcctgatggctatacgaaatctctgatagacaagtttcgccagatgggcagcgcatcggtgcgcgcctatcttttaggacctgatacgcgcgaaatgcggcgagaaatcgccctggcttacctgaattccatgccgctagccgcgacgccgagattgggagaagtccatggtttgggtgatggcttgtcggcctggttcggtgcggattttaacgaagtcaacagaatgctcagtccgggcgcgatcaattcggaaaatatcagtcagaagcaggcgcaagcctaccggcaggttctcagtattctcctatctcaaaggcggccttcttatctattgggtccgggctatcaggcgcttcagtcattgaccgatcgatatttgcgggcgatggcgagccagggcgttatttcgccagcgttgcgtgatgccgcactaaaagtatccactgcccgccctgtaggtctaaattcgtctcttgccaaattcatggccgagaaaaaaacacagaccgtgctgagaacacgtctggctagagcgacgggcgtgaagtccatctatgaactggatcgccaggatttaacggccacgactactatcgactaccagacgcagcaagccgtcgggaatgcgttacgccggttgagcgacccggctacagcccgtgccgccggcgcggtaggcttcaggttgctgggcgacaatcaggatctgtctcccgtcgtctatagcctgatgttgtttgaacgcagtgaaaaaggcaatctgctgcgcgttcaaaccgataattttgatcagcctcttgatattaatgaaggcattcgcctggatcttggttcaaccgccaagttgcgtacgatggtgcattatttgcagcttatcagcggtctgtaccatcagtataaagaccgcccgactcaggaactggaaaaagtcgaactgcatccacgcgattatttatcggcatgggttatcgagcagcttcggctgcatactcagataggtctggaggaattgctgaatatggcgctggaccggcgctattcggccagtccttacgaaaattttttcaccggcggcggcattcatcatttcgagaatttcacgcgtgaagaaaacgctaaaatcatgtcggtgcgccatgctttgcgcgattccgtgaatctggtcttcattcgcctgatgcgcgatgtggtctatcatcatctttacaggcccgagggcgtcgcccgctggcttgagaatgaagaagacccgcgcaggcaagcctatctggagcgttttgccgatcgcgaaggactggtttatctacggcgtttttatgccaaataccaaggcaaaagcgcggaagaagccctggccctgctgacccagcgcgtcaaggccaaagcgtcgcggctgaccatgctgtaccaggccatttatccggatcacgacgagtatgatctcaacgcttatctgaaagcgaatctgccctcgtccattctagccaaggaagacattggcgagctgcacaagaaatattcaacagcaaaattcgacttgcaggatcagggctatatcaccaagattcatccgcttgagctttggctggtcggttatctggccaaacacccgaatgccgcgcgcgacgaagttcttgccgccggcgtcgaacagcggcaggccgtgtaccggtggctgctcaaaagcaaaagaaagcatgctcaacaacggcgtatcatgacgttgctggaggccgaggcatttaaagaaattcatcgtgcctgggtacgtctcggttatccgttccaggcattgacgccttcttacgcgacatctatcggcgcttccggcgatcggcctgccgccttggcggagctgatgggcattttgcagaatgatggcataagacagccgctgattcgattcgaaagcttgcactatgccgaggccacaccgtacgagacattactgaacagatcgcccggtaaaggtgagcgcgtcatgccggctgaagtcgcgcgggtggctcgcggcgcgctgactggcgttgtggagggcggaaccgcctcgcgtctcaggggcgtttataccgatctggaaggcaaacctctgactgtaggcgggaaaaccggcaccggcgatcatcgccgcgaggtatggggagagggaggtcgcctgattgagtcgaaattcatcagtcgcgccgccacgtttacgtttttcatcggtgaccggttctttggcgttatcaccgcttatgtggccggacccaatgccgaacagtatcacttcaccagttcactgccggtacagatagtgaagtttctggagcccacgctttcgcctttggtgaatcgaactgcaaataatccgggttccgtgccagtgcctaaaatggcgatggccgacaaaaataatgtaacagctgctccaacacagccttagaagctgttcacgtgaatgcgtgtgggagggcggttcactcgccctcattcgctcagttctaatatgggtcttatgaaatctccggaatctaagctgaatagtgttgagtttccagagaaatgccatgtctcatatcatcttaaaggtatcagtatcggctcactgtggctgagttggatagcgccgcacggcacgaatccgaaggtcgagtgcgttgccgcattctggccatacgccagttggcgctcggtcattccgtggcgcaagatcaaggatgcttcgggctcggcaagagccagctttacccgtgggtgcagcgctataatgcctaaggcttggtgggactggttggcgtcccacgtgcaggcgctattggttctggatggggctggctggcatcgctgcgccgccctggtcattcccgacaatctgaccttgctgcacttgcctgcttactcaccggaattgaacccggccgagtggctctggcgggaactgcggcaacggcactcgagcaaccgcgtctaggccaatcgcgaggcactcgatgaggccgtggcaaccgcctggctgaagttgactcgtgatgccagtcagctcacgcaactgattcatttcccccggattcaatccgctcaggctaacctatgtccgggaacttttaaagatgcgtataatttagcagttaccgaggcggcgcaaagtcaaattcgccaggattgaattgatcagttttcgcagcccagaaaggcacgttcgaagcgccctggaacactatcgcccgcggcgttgctgttggtgtcgttgggtgtttatgtgtattgagcagcaagacggaaggtatattattgagttctgtttagaaatagcgcctgattatgccatactgataagtatgcgtctgagttaatgactgacaatacggaacgattaagcaaatctttttatcaaacaggaagttttgaaatattggcggcataacatgcggtataagatggcaagcggttaataaattggattcatgggcctgattaacaccggatatttattggcttcaggctgagtccgtatctctttcaaactaacctaaaaggactgaaatgattaaatatacgcctttaaaagatcacgatacacctgtcaaagtattgttcaccggttatctatgcacagtcggcatcggttatgttgttgcgctgattcagattctgtttacgcacggcatggctgatggaaagttcggtctgtccatcgatgatatcgtttacagttattacggcaaccgttcgggcacggtggtggagacaaaactgaacggttcaatgaaagggatggcgcccgaggcggagcgcttccagatcatacaatgggttcgggatggcgcgccgatcaatgactatcagtcgtccggcgttgaaaaaattatcgagacacgctgcgtcacatgccataacaaagacgcttcaggcattccgaattttgcggatttcgaacagttgaaagccttgacgacgcaggatgaaggcgcgactttttcttcactgacacgggtttcgcatatccatttgtttggcatcagtttcatctttatgtttgtgggcctgatcttcgcattttccgaaaccacgcccagaccttacaaatccgtcgctatcggcatgccttacgtatttttgctggccgatattctgtcctggtggctgactaagattcatccgacgttcgcctggctggtgattctggccggtactggcatgggcgtttcatttgcgtttatgtgggttacttcaatcctggaaatgtggctgttcagacccgtgtttattgaaggccctggtatgaaggtacaagcatggttagaaagtttgacctgcgggggcgaagaaagtggtgtgaataaaacctggtgtgccgccaagcgcgggttcaccttcctgaaggacaaatggctgcagcatggctggccatggcttaaggggttatttaataaataggtttgttttgacctcgtcagtgcagagagactttggctgaagctctctgcatcctattcaattcatcataggtcagcagattgattaactgacatttaatcgaatcggttatcgagtgagccagcggctttatttcgcttccatatcttcaagctcaatgttcagggctttggtcgagattaataattcactgatggatgccagcaatgacagcactataaataccatgctaataccgaatacgatattgccgtaactttgcaccccataaaaaatcagccccattgccagtatgcagccgataatgccaatgactgccagcaattgcatggcaatgatgaagcgtatccgttgcctcaggctttcaatctgctttttggccacggggctttgggttttattgaacaggttatgctgctcccgaatgcggctggcaatggccagaaaacggttcgtgtaagccagaaacaggaccgaaatggcagggaataaaagagccggggttgtgatggtaatgttcatgagatgctgaaaataacgatgcttaggtattaaagtgtattgaaaaagtaaatttaattgaagagtccggtcatggaaacgacgtttttactgttttgcctaatgtcatattgctgttcatagcctttttcctgtgaacatgatagaaatctaaactttgagtttttattattctgtttatgcatcagttatgccacaagcgataaatgctcaagcagtgcgatgataaaagaggcaattaaatcggttggcagccgttgaatgcaccaaaataatacatatgcatcattttgatgctctataagctgctttgggtatttgcaaagacgcccgaagttgaagggcagggaaagggcgggtattgatcaggaaggaaaatgcagccggacagattgcctgcccggcgtacctttttaacttacttgtttttgttacgttcgttgacttctttaatcacttcatcagccacgtttttagggcatggcatgtaatgtgagaattccatcgagaactggccgcggccagaagtcatggtgcgcaagtcgccgatataaccgaacatatcgctcagcggcacgtcagctttgatacgcaccccggtaataccggcatcttgcgatttaatcataccgcggcgacggttcaagtcaccgatcacgtcaccaacgttcgcttcaggtgaaaacacgtccactttcataatcggttccaataattgcggagccgctttaggaatggactgacgatacgctgcgcgagcggcgatttcgaaagcgatagctgacgagtcaaccgcgtggaaaccaccgtcggtcaggtttactttgaaatccaagcatgggaaacctgccaacacgcctttgtcgatactggctttgaagcctttttcaacagctggccagtattcgcgcggtacgttaccaccggttacagttgattcgaacacaaaaccgctgcctggctcgcccggctcgatgatgtagttgattttcgcgtactgaccagaaccaccggactgcttcttgtgggtgtagtcgtcttcaactcgtttggtgatggtttcgcggtaagccacctgtggcttgccgacgttcacttcaacgccatgagtacgtttcaggatgtccactttaatatccaagtgcaactcccccatacctttgatgatggtttcgccgctttcctcgtcggtttcaacgcggaatgaagggtcttcctgtatcatcttacccaaggcaatgcccattttctcgttgctgcctttgtctttaggcgaaatggcgatagagataacgggatcagggaataccatcggctccagagtagctggtttatcaggatcgcacaaagtatgtccggtctgaacgtttttcaagccgatcagcgcgacgatatcgccggcttgtgccgtttcaatttcggaac

SEQ ID NO: 676 - DNA, 20106 bp, synthetic construct
  source 1..20106: mol_type = other DNA
  misc_feature 1..20106: note = Synthetic
tgaagctaacataccataaaccaataggtgtgggctatcggtaaaaatagccgcgtctaaaatacccttacgaatcgttgctgttacctcaccaccggccaaaatagcaccggcaaattcaaaaataaccgcaataacaatcgcttgcttgatcgtaatagcgcctgaacctactgaagtacccatggcatttgccacatcatttgcgcccactccccaagccatgaataagccaaaaacgacagccagtacaataaagatgctaatagaataaccaaaaaaatcaaaatagccagaagcaataatgtccatgggtgctccttattttgcgagtaacacttctaatcgagagccaactttctgagcggcatcagctagctcgcccaaccattcaacagcgcggtagtaaaacatcacatctactggcggtaaactggattccaatggaaataatttggcgcgaatcttgtgttggatcttatccgattcactttctaaatcattaatagcggaaataatatggttaaccactttttgctctctagtactaaacgcagtttctaacaattcatccaattcgttaatggctttaagcgccatggcagaggttttaatacacacgtctgttaattcaataatgtcctcaaaaatttcatcaggcaatgtcatcttacggttgatcattaacccagatacatctttagcaatgtttgcaattgaatcttgaattaataacaaatccaataaatctctacgtgaaaaaggcatcatgaacgttgaaggtaagcttaaacgcagtttctttttcagaacgtccgcctcaccctctttagtgccaatgattgatcgaatttcttcagcctgattccaatccttggcatgaatggcaaccatgaagccttttaactcgctaatgcacgaatgtgtatgggtcatgtgctgttgcaatggactgattggggatttaccaaacaagccataaatattattttttgccattttctcttcctctttttattgttttacttttcttatatcttcaagtgcgaattttctataaaaaaaactaactgtcaaggggttttttaaactttttttccacttttaaatcaacttcgtcttcttcaaacaaaatacgctgaccttccccttctaaatcatcgaactgaccactcttaacccctagcatcaaaaggattaccagaacaacacccacaaaaatcatgctcggaattaaccaataaattacatccattttttatccaaaaagtttcactatctacatcaatttgtcttttgaccttgtttcattatgctttatttctagatcttaactgagtattattcagaattattaacgctgtaactgtcattaatacgcctacaatcgtcgtccattgcaatgtttcacctaaaaatatcacactcaagccaatggcaaaaaatggcactaaaaaagtaaacacactgcccctcttggagcctaatttttgaacacctagaaaataaaccgtcgtcgcaaaagtggtagaaccaattgctaagaaagtaaaccccgtccaaaatatccgatccattgcaaaaatagagccactgcttggatcaaaaaataccacccagtcaatgatagtggcaaataaataaatgtaaaaactcaacaccacaggatgaattaattttgtatacgaagtagtaatggacatcagcgcccaacatagtgctgcccataataaataaacgttcgatgcattaaaaatttgactccagtcaaaggtccaggctttcatcatggtgagcacgcctgcaatgcctaacactaaagcgagccaatctttaatttttggttttttctctcgacttagcagcatcaacacatacacaataatcggcattagagtggttactagtgctcctgccaaaccaggggagccgtactttgtgcccaagaaaaataacttggtgtaaaaaatcaacaacacacctacgatgatggataacactaaatttccaacatcaatcttaaaaggtagcttcatccaccatacaacggggagcatacttagcactgtaagcaggtaacgatacgttaccaattcatgctcagtgatgtaattagataaaactttggcaatgggccaggatgcaccccagcccagcatggctaatatcatccatagaaataattttctctcagttgtcataataatcctagcaatatgcctgccaatatcattacaatcgcgactaattggttaattcgatgatccatgccaggtttagcaaataaacccttgacttttaccacggcaacattgattgcactaatacccaccgacaatccgaggccaactgttattaatatctctacaccgtatattacatcaacttgggtaagatcaataaaggcaggtaatatcgcaatataaaaaatcattacttttggattggtgattgaaatcaaaaaacccgttaaaaactcgttaatattacttttgtgttttgatttttctcccaacgttaccttgtgtgcattccaagcacgaatacccaaataaattaaatacgcgccaccaaaaattcgaacataatccataattggggtaattaaatcagagaacatctctagggaaaaaatcaccactgacaggtaaaccaaatcacccagcaccatgccaaaggacaaataaaatgcaggcataaagccttgcgatacactcttagcaaataccgctaaagtgcctggaccaggagtaattacaaatacaaaagcaattaagaaaagtgctataaattgtgaaatatccatgactcaatataactacatctgaattaaaaacatataaagaaatgttccggtaaatatactaactaaagggttgcctttccagacatgaatagtaatagtggcaacaacagctaggactgtataaaggccaatttcatttgaaaaattaacatcttttaatgtatagacaaccaaaatactcataatcatcggtggcgtatatttggcaatatagctcattattggatgattaccacgaccatgaaaaaataaaaatggcataattctggtagaaaacgttgctattgtcattaccaaaataaccgtcaaaatgtattctgtattgctcatcttgattttttaattaggttatttgctattaacaaagttacagataatgcgatactgactaacagcatttgctctgaaaataaatataaagcaacggctacagaaaaagcagcaatcatgaacggtaatagattttttatttttttccactgttctataagcaaaacaacaaataatgccgttaatgtaaattccatgccttgtgtattaatactaaacgaactaccaatcacagcgcctattgtgcaactaataacccagtaactatgatttagagcggtaatcagaaaatattgctgcttttttttggcggcgtctttggggtcaatcgttgttactaaggaataagtttcatcagtaagtccaaaggcaagatacactttccttagcccccaatccccataatgattcaacatagagatcccgtaaaatatatgtctagaatttatcaaaaaagtagatatggcgatttcagttaggccaacacctgctgccaataacccaataatcataaattgcgctgtgcctgcataaacaaaaaatgccatgagtgtcgccaaataccaaggataacccaaattttgaaacaacatgccaaacgccattcctagcggtatgtagccaaatagcactggaaaagtgcttttaatagcatcccgtgtcatcaacctaaagaaggtggtgtaaatagatccatctgctataatttaaataattattaaaaactgattttaacgcgatatgaacctagattatcttgattttgaacaacccattgctgatttagaaggcaaaatcgaagcgctttgcaatattaaagacaaggtcgatattgttcaggaaatggaagcactaaaagttaaaagcggtgctcttaccaagaaaattttctcatcactaagcgactggcaaatttcacagctggctcgccacccaaaaagactctacacactcgactacattgacagtgtctttgatgaatttaccgaactccatggcgaccgatcctttgcagatgatcatgcaatcattggtggtattgccaaattaaatgaccagccactcatgttcattggtcagcaaaaaggtcggtcaactcaagacaaactcaaatacaattttggtatgcctcgccccgaaggctatcgtaaggctctacgattaatgaaaatggcggaaaaattttccatgcccattgtcacttttatcgatacgcctggagcctaccctggcattggcgcagaagaacgtgggcaatccgaagcgattgctagaaacttgtttgagatgtcaacactcgccacaccgattatttccgtggtgattggagaaggtggctcaggcggtgcgctcgctattggcgtggctgatacaatgatgatgtttgaatacagcatttactcggttatttctcccgaaggctgtgcctctattttgtacaacgatgcggctaaagctaacatcgcagcagagtcgctcaaacttaccagtgcgcaccttaaaaaagaaaacttaatcgatgaaattattccagaaccactcggtggtactcatcgtgatcctgatgaggcaaaaaagctcctcagagatgcgttaatggaacaactgcattcaatcgttaaaatacccgtcgatcaattggttcaggctcgagccgacaaacttttaggctttggaaaatttaaagaataaagacccttacctaaaggataaaaacattgttcttgccctgagcggcggcattgactcggttgtattactgcattatctcaacactcatttttctggtaaattaagggccgtccattgcaatcaccatttgtctaaacactgttcagagtgggatgaattttgcaaaaacctatgtcaatccttaagcatcgactatttaaacattgatatttttattaaaaatgactctaatttagaagaaaatgcacgtaaaaaacgctatcattcattatcttgcaatttagaagaaaacgaagtactgtgtacggcgcaccatcaaaatgatcaagcagagactttattgttacagctgttccgtggcagtggcgtggctggattggcctccatgccgaaagaaaaaaccttaggaaaaggcattcactatcgcccaatgctgagtttgaataaaacccaaattattgattatgcaaaaaaatacaaattacgttggatagaagacgatagcaacaaaaatactgattttaggcgaaatttcttgcgtttagacattctcccaaagcttgaatcggtctatcaaaatttaacaaaaaccctatttagaagtgcaaaacatcaatcagaggcgctaaaactcactcgagaactggccgatattgatattaaagaaaataatatcgtcagtgatagcgggcgcatcaacactctagagctgatcaagctcggacctcacagagttaagaacatcattcgtcatcatttaagtttaattgggtttttagcacccagcgataaaatcatggatcaaattattgatttattgcgtgcaaaaattgacgcaaaaccattagttggctggggtcaatacgaaattaggcgctatcaaggagagttgtattttattaataacgatgttgataaaattgataatttttgcccgtttcacgaagaatttgaaaattttccaaatttttccattcgctatcgaaccgaagggcaacgcattaaattatcggataaaaaacattcacaatcgttaaaaaaggtcttacaagacgctaacatccctccatgggagcgaagttctctaaaaatgtactacattgatgatgaattacgtgccatggagcgcattggtagaatggagcacgccgactaagccttcattactcataaggattgttgatttgcattttttccaaaatttttatctctaaactttccattttttgtgcatccattggctcaacatgatcgtaacccagcaaatgcaaagtaccgtgaatagccatatgaatcagatgatgctcaaaagttttattttgcaattttgcctcattggccactatgctggtacaaatcactatatcgcctaaaatcatttcatcaatttcaataggtaaatcagacggaaaagacaaaacattggttggttgatctttatcgcgataggttttattgagattttgaatttcgaccttaccaacaattcgaatgagtagttcactcttacccttgcccaaatcagtcattacttgttgtaaagcatctttgagattttgctcattgaccgaaacatcattaatagggttttgaataacaaccattgtttagcccgacctgagtatatatggaaaaaatctgcaagacttaaagttgttaattgcaaggaaaatattgtagttgataattacctttaccaacaaaggatttaacgaagcaagtgataactttaagacttgccctatgggacttagccgacttcttattctctgtgttattttctttgagatatgaataactatccctgcacaaaatgccttgagaataagaaagtcggcgttgtcagagattttcatatatattcaggttgggctttaattttaggaataaaataactcattttacccatataaatttccccttaatggcgatcattgaagttgcaatacccgtacctttacacaaaacttttgattatcagtgtaatcaaaaagtagttgttggcgtgcgtgttaaagtcccctttacgcgaaaaaaagtagtgggtattgtcttaacgattaaagacaaaagtaattttaagcaacttaaatcggttgaagaagtattagacgacaagccaatcctagacaagccaatcctagattttttgttttggtcaactaagtattatcatcatccaattggtgaagtaatctcggccgctttaccaaagaacttacgactagggaaagaggctgttatcaaaaaaatggctgacttgccagacaaaattcaggagcctgattttgccactaccgatgaacaaaatattgccattgagaaaatcttaaaatcaacccatgaatatcgcggatttttgcttcatggaatcaccggtagtggcaaaactgaggtttatttgcgcattactcaaacgatgcttgatgaaggcaaacaagtactggtattggttccagaaatcggcctaacgccacaaatgattactcgctttgaatcgcgcttaaacacacgaatagtggcgattcattcccaactgaatgaaacccaaaaactcgacgcttacctcatggctaaaaatggtaaagccggtgttgtactaggcactcgtagtgctatttttgcaccgatgccgaatttaggattgatcatcatcgatgaagagcatgatggttcatttaaacaacaatctagttttcgttattcagccagagacctgtgttttattcgcgctaaacaagccaatattccactggttttaggcacggcaacaccatcactggaaacactgaaaaatgtaattgataaaaaaattactcaccttacactaactaaacgtgccggtgatgctgttctgccaaaggtgagcttgatcgacatgcaatctaatttcacccctcaagggggcactgaaaagagtgataatgccttatcggctgttttgattgaaaaaatgcgacattatttggcgcaagaaaaacaagtcatgctgtttattaaccgtcgtggttatgcgcccgtgtatttctgtaaagaatgtggttggaaagcgcaatgcactcattgtgattcgggaatgatttatcaccgacacattaatcgactcaaatgtcaccattgtggcgacgaaaaaatgccagcacacacttgcccagactgccatcagcccagccttgaagtgtttggatacggcacagaaagactggaagaaacactctcatcgtatttttctgatgttcccattatccgcattgatcgtgacaccacacggcgaaaaaaggcctttgccgaacacttaaaacaaattaactctgggaaaccgtgcatcattgtaggcacacaaatgcttgccaaagggcatgatttttctaatctagccatggttggggttttggataccgatgcaggtttattgtcgcttgattttcgtgcaacggaacacttagcacaactgctgattcaagtgtccggtcgtgctggtagaaatgctgaacaaggagaggtagtgattcaaacacgctaccccaatcatcctatttttaactatgtactttcctctcgctacatacaatttgcgactgaactgctaaaacaacgtcgcagtgcaaaaatgcctcctttttctcaccaagcacttttatgtgcaaatgccaaaaataaacaaaatgctgaagattttttaaaaaaagcaggtgctcttttaaaaaatatacaaatggattcggtagaaacttgggggccagtggcaaatgttattgaaaaaaaatctgattattattatttcaacttgtatttacaatcaaccgacaggtcggcactgcaccaaatgttagcgacttttcatcagcacatcaatacgataaaaccaaaaagcggtgtacgttggtatttggacgttgatccgattgagtagcaatctattgaattaaatgagatgcctttgctagctgaattaatttgtctttactgatattactaacatcatttttgctataaatatccagcaaataaatttcattttcgttggttttcaaaaaataaaccactctgaatccaccgctttttccgcttagattagagctattttttaatcgaattttataaaaattatcacctaaatcaatagatgtctttacaccgttttgtaattcattatttaaagtgattaaatcattagtaaattttttgtatcttttggcgagtcttttggcagattttgtaaacttagatgttttattaatctccatctttgagctcagcgatcaaatcttctaatgaggtttttggtatcttaccgtccatcatcattttagcctctaccatcgcctcacccaagcctgcataaaacctagcttctttttgctctttaagttctttcctaatggcttcaacaataaaagttgagcggttaatgtcaaaccctttagttaattcatctatttcttccactaaataagtcggcattctaaagccaatttgtttggtttctaattgctctaaactgtgcatattgcctcctatttttctatattataacaataatatatattattgtttgacaaaagacaatatttagaccttatccctaattatattaattccaacaataggatcaatatttagcttttcacaataatttacatattccacaatatctaatctgcgttcattattttctatgttccaaataatagaatgttgaacttctaatattttcgccaattgtctcattgttaaagacttctcttccctcgcctctttgagccattttgtcaccctaggataagattgactgtatatagtcttctgcattattatttgttcataaaaaatgaactaagatataatgaaatccttttgttcaaaaaatgtgaacaagtcattaaccttcaaataacaaaaatggacaatcaaaagccgcacattgacagtatcaaactcaaaaataaagtactctggtatttggatgtcgatccgattgagtagagttagacgcaccctattctaataaccttttacttaattttagacaataaaaaacccccgctgggagggctttggtcgcataaaagcggagcctacgaaaaataaatttcattggtatgaaaagcaaaattcttaagcgatagtcggttacaatctgatttatattctacacaaaggcaaagcattatgcaacaaaaagttttagggctagatttaggctcaaactctattggctgggcgcttcttaatgaggacaacaatacggcttcagagattatagatttaggctcgcgtatctttattaaagcagttgaggaaaaaacacccacaccaaaaaatgaaaaacgccgtgaatcacgccttggtaggcgcgttattcagcgccgtgcaagacgcaaacagcgaatgcttaattatttggtttcgcttgatttattaccaaaagaattacaaaaccacgctcaaccagagattgttttaaatggccttggtgatccttatgagttgcgcgttaaaggtttagatgagcaattaactccacatgaatttggcagaatattattacattttgttgcaaggcgtggttttttatctactaaaaaacaagttgcaggcgatttagttgatgaccctgatacgctagattatttaaatgcccttgataataagcccactaaagacaaggaagaggggcaatttaaagcagatattgctgatgtttatcaagcgattaaagatgctgatgctagaacattgggcgaatacctgtttaacctagaaagtggcaaagtgaagcgtaatcgctcacacgatggtggacaccttcgtaccgagcgcaaaatgtaccaggacgagcttgaattaatttggaaacaacaatcacaatactttaaccacttgccaagtgacttcatgcaaaaagataaaggagttttggtcattattttttatcagcgccctctcaagctcagaaaagaccgcgttggaaaatgctcattagagctgaataaatatcgcgctaatattgcacgcctagaagtgcagaaattcagatatttacaagacattaataatttgcaattttttgatcgttggcaagaaaaatggataagtattagcgatgagcaaaaaataaagttaaaaaacttgtttgaatacaatgcaaaaattaccgtaacaatgctcaaaaaagagctgggtttggacaggcctaccaaaatcaatctcgaagctaaaaatctaaagggcaatattacagctggtgaaatccgcaatataattggtagtgcttgggacgattgttctgataaacagcaacatgatttatttgaagatttattcactattaagaaaaaatcagcacttaaagcccgattaattacgcattgggattttgacaaacaaactgccgttaagctgtgtttaattgagtttgagcctacatattctaatctttcactaaaagccattaaaaaactattaccgtttttagaacaaggcatgatttactcagatgcccgtcaagcagcaggttacgattatgaagtagcagaaattgaagctgttaatacactaggcataccacccgaaacttccaaccctattgtcaataaaggcatgcacgagcttaggcgtttaattaatgccattatcaaacaatatggtaagcctgatgtggtgcgtattgaaatggcgcgtgatttggagatgaacaccaagcgttataaagaaaatgaatttcgacaaaagaaaaatcaaaaagccaatgaagaggcacaacttgcttttgagggtcttaatttgggaaaaaaatacgcctcacgagatgacaaaatccgctaccgtctatggcaagaccaagatgagagatgcgcttatagtggcgcaactatcgcccttaatcaggtattttcagctgagtgcgaggtggatcacatcttgccttttaaaagatcgctcgatgattcttacatgaataaggttttatgtttcaccgcagagaaccgcaacaaatctgatcaaaccccagttgatgcttggggtggtgataatgataaatggaatcaaattacccaagcccttagtcattgggataaatcattgattagtaaaacaaaacgtttctataccaaagaagccgatttacaaaaacgtgattttatttccagccagctaaatgacacccgttatatgtcaaaactggcgcaagattatgtgcgccaacttggctgtgatgtgaacattaccaagggttttgttgtcagtcaaatccgccatcaatggggttttaatagtatcattggtgaagtcaataaaaaagatcgcaccgatcatcgtcatcatgcgattgatgcggtggtaatcgctgccacttcgcgcaatttatatcaaaacgcagttaggcaaattaagcatgataggcttaatattgctccgccgtatgctcacattcgtgaggagctggatgagcgtcttaaacacaccattatctcccacgcaccacagcgcaaactttcaggcgcattgcatgaagaaacaggtgcaggctatattgaaaaacacggcggtttggtttatcgcaaaaccctaagcccagagttcactcttaaaaatgccctaagcattgttgatgaagctgttaaaactaaagttttagagcattttgaaaactatccaaaccctaaagaggcttttaatgctgaacatttagctttactcaaacttggtaaaaaccccattaagcgtgtgcgtgtattacaatccaaaaccaacgaaaagaaactcgcccaaaccaaatttggcgtgcgtgataaaactggcaaaatttttaaatacatgtcgtatggcaacacccaccacgttgaaatcatcaaaaatagcaaaacaggtaaagttaaaggcgagtttgtaaccaccatgctcgcctcgcaccgcgctaagggtattaacatacccaaacaagccattattaaaactgactatgggcaagattgggaatttgtcatggcactgcatatcaacgataccgtgagtatcgaacaaggagatggcgagcgcgtattttatcgagtgcaaaaaatagatacgggcgcaaaacgttttgtcttgcgtcttggcatagcatcaacactaaaaaataaagatgaggaaatttatattggtatcagtaaagataactttgataaatataaaatcgtaaaacacgatataaacactatcggtcattttatcgaacatgattaaacgcattgttgaggttagtaatccgagttatttacaccttaaacacaagcaattattaattgatcaagatcatgaattagtggcacaagtcccgattgaggatattggcgctttaattttagaacatagcgctattagcatcacccagccgttgattattgaatgccaaaagcataatgtagcgattattttttgtgatgaaaaacacctgccctattccactattttgccgattgctgagggcaataccctgcaccaaaaaatcctcaaacaacaaattaatatctctgaacctatacgcaaaagactgtggaagcaagttatcattcaaaagattaacaatcaagctgatacgcttaaacaatttaacaagccttatactcgattacataaattagccaccgaagttaaatcaggcgacagtactaattgtgagggcttggcggctcagtattattggaaggctttatttggggtggattttattcgtgatcaaaatgccgatggcattaacgccatacttaattatggctattcaatcatccgtgctatggtggcgcgtaatatttgcgctagtggtttgcaccctgcaataggcttgtttcatcacaatcaatacaatgctctgtgcttggcagatgacctgatggaaccgttacgcccttgggtggatagtattgcttatgagctgtatcaagccaaccccaacattgctattaccattgagagtaaaactccgtttttaaacctgattagccacaatgtgcgctatgataaaaagcaaatgccaatgatggtatcaatgcattatctaatggcaaatctaaagcgtaactttactaaagaatgctcaacattgacataccccatattacgagcgtaatataaagcttttgaacattgggattacttatgtttggaggcttacaaaccatgtgggtaattgtactgtttgatttaccaaccgatgataaatggatgcgtaaagattacacacattttcgcaagtttttgcttgaggatggttttaggatgatgcaatactcagtgtatatgcgccactccagtagtgaagaaaacgcccaagtacacgcgcgtagaatcaaactccacctaccgcctgatggcgaggtaagaattatcaaaattaccgataagcaatttggacgtatcgaggttttttacggaaaaaaacgccgacccatcgaaaccgtaccggcgcaactttcatttttctgactagaaaaaatgaaagttgcgcctatggtacagcgtttgtagcgagcatattgtaaccgactatcgcctaaacgcaaatcacaacagtaccgctacacacaatgatgttcttagtattgtaaccgactatcgcctaaacgcaaatcacaactaataatacagaagcgcatgggctagattggattgtaaccgactatcgcctaaacgcaaatcacaacagatattcgttatcagtgccagtaacttctattgtaaccgactatcgcctaaacagtgtgcacgaatttatttaaatagcatgcagtggtatttaaataaatgacaaccaaattcacaaatttaaacgcttataaaataagtcgacaaatgatatttatcacaactgcggaatagttttcgacaagagaaaactattgtaaccgactatcttgcgccctgagcgtagcgaagaagcgcccttggagtgcaaatcacaatcaatccaacactctttctaaatacaaatatacggcgtaaacatttttacgattagccgcatcgaacgctggctcatcttcaaattctgaccaatcaatggcgtcgtaagtctcttcaaactgatccattgcttcaacggcttttccaagtttgtctaataaaaaattaaggtaacgataagtcaaatccatggtctctttaggttgatcagaagcactgccatgtcctggtacaaaatattcaacttgcatattgcgtacacggtctagtgttttagaccatttaataatatcagcgtcgcccacaaacggaatacgcccttcaaagataatgtcgccactgtaaagagtttgatcggtcacactaagtaacgacatatcgccatcagagtgaacttttccaaaatagctgattaaaaatttatgctcgcccagactaaattgggtatctttatcaataatccggtcaggttcaaccagataggtttcatcgtttacccaaggaaacaatgtgtcacgtcgagattttagcaaagtttctgcagtttcagaatcaaggtaatcccaaacgcctttaggcgcccagatttgcgcaccttgtgctttaaaaacttgcagaccataaatgtgatcggcatgataatggctcacaatcacgagcttgattggtttatcggtaacttttctaatctctgacagcatggcattggccaaaggtggtgaacccaagccatcaaataccaccacgccttcagttgttacaataaaaccagcattagaaataaaaccctcatattcagtggctgagccagatatgcctggaatgtagtacgcatttccattcaatcttttagattccacctcaacaccaacttctgcatagttagctgcttgagaaaaaaatgacaacagacttaatgctaggattaatgttttcatgtctcttccacgatgatcttcattgcattggtgattgttaacagttcattctctttaatcgtaaacggtggcatggtgtagagtagcttaccgtaaggtcttagccaaacaccaagctcaatcaagcgctcttgtgtccattctaccccaatatcgtcatgtaattcaaccacggcaatggcgcctaaaatacgaacatctttgactttattattttgcttaagcgatgccagttcagcatgaaacgttgtttcaatacgagcaatattgtcttgccaagccgagctcaataataattcgatactggcattggcaacggcgcatgccagtggattggccataaaagtggggccatgcatcaatgtacccacggtgttggcaacgttatccgttgtgagtgtagcggcaagggacatgtagccaccggtaagtgcttttcctaaacacaatatatcaggctcaacgtctacatattccaatgcaaataattcacccgtacgaccaaaacctgtggcaatctcatccaaaataaataatacgttgtacttgtcacacagtacttttgcttgtgtgagatattgtggactgtaaatgtgcataccacctgcaccttgcactacaggctctaaaatcatcgctgcaattgagttggaattttgctttagggttaattctaaatcttgcagagcttcatccacactaaccactgatggggtttttacaaaaaagtgctttggcaatacgcctgaaaacaaatggtgcatgccgttatccgggtcgcacacactcatggcaccaaaggtatcaccatggtaaccaccgcgaatggtgatgaatttatgcttatcggcttgttttttattctgccaatactgcagtgccatttttaacgccacttccaccgacaccgagcccgaatcagtaaaaaatactttggttaaattctcaggcgtgatctcaaccaaagttttggccaaatcaatcgcaggtttgtgggttaagccaccaaacatcacgtgtgacattttgcctaattgtagctcaacggccttattaagcaccgggtgattgtaaccgtggatagcactccaccaagagctcataccatcgatcactcgcttaccaccagataggttcagataaacatcgtcagccgactctactaaataagttgaaatttcattggggattttggcatacggatgccaaatatgctgatgatcaaatgtatccatacagacacattttactgataccgctgtttataggtaatctttcaactctgccatcgaatcgatgaccaaatcaggattggcatcgcggatatcatcaccatgattgtagccatatgacatgcaaataatttcaaaccctgcagcgcgagaagctttcacgtcactgattgaatcgcccaacatcagcgaatcttttggatcaatgccgaagtgtttagcggcgtgtaataatggcagaggatctggctttttcttttctaatgtatcacctgaaatcacaataccaaaatcattaaaaatacctaaatctcgtaaaatcggcaaggtaaactgctcggctttattggtgacacaacctaaggtgtaaccctctgatttcatataatccagtccttctctaacgccatcatacagcgaagatcgccccgaagtgttctcagcatataattctaaaaagattggataagccttgtcaaaatcagacttatcaaccgtgccttctagctcacccgtgagtgaacgctctaccaattttggcacgccgttacccacccaatgacgaaccttggcttcaccccatttttctctacccatcaacaccattagttcatcaacacaatatgccaagtccggcacgctatcaaccagtgttccatcaacatcaatcatgatcagttttgggttaaattttttcattgttatccttgtattgtgtggtggtagtattttggtagaatacgccatatattattcttagggcattgtaatgcaaaactcaacaacaattggttttattggcgctggaaatatggcgtatgcgcttatctctggcttagtagacagtgatttttccacaaaaaatattaaagtcagtgacaccgataaagcgctattatccctacggaaagaagaatttaaccttgagatttttacggataatgccgcacttgcaaccaagtgtgacgtgattgttttagcggttaagcctcaagttttatctttggtatgtaatgatttaaaagacaatttaaaatccggttcgctcattgtttcaattgccgctggggttaggtctcatgacattgatcgctggctaggactcaacaaagccattgtacgcaccatgccaaacacacctgcattattgggcaaaggggttacagggatgtttgccaatgaaaacacaagtgatgagcaaaaatccctagcagaaaagatacttaaatccgtgagtcattgtttatgggtagaagatgaaaacatgttagacgcagtaaccgcgctgtcaggcagtggtcctgcttatttatttttaatgatggaatccatggcgaaagcgggtgttgcattagggcttgatgaagacacggcacaaacgcttagcattcaaactgcattaggtgcaagtatgatggccgatcaatccgttgattcactacacgaactaagggctaaagtcacctcgcctaatggcacaacgcaagcagcgattgagtcattccaagatcaaaactttgaaacgatggttgctcatgccatgcgcgctgcttttgatagagcgaaagaaataggctccgaattggccgatgagtgaaactctggtcatcaaccttaaaccttctaaatattatttaacgctatcttccttggtttatttattgagcttatttactagctggtactatttttatcacctttatttaagcatcctactcagcattactctgtccgttttagcatatcaattttttgccaaaataatttttttagcaaaaggcgaatccgttaaaaaaataactctgagtgataaacaacttagcgtggaaaaacagaacaagagcgtcaaaaaatacccttggttttatcccacgtatcagtctagttttttagtgataattacctttggaaaagaatccattgtaatttttaaagattcagtggaacatcattcactctctaaattaaacaaacttattaatgctaacacctgaagacacgcttaaacttaacgtgctaatttcaacttcagtggccgttcgcattgatgtttataagttgattgtggttgggctcactaaggataaaaaagagcaaaccattgcccttcagccaagtggcgatagcagcaaatacattcaagctgtacaaaaattattaataggaaaagtgcttggtggtatgggcggttatccttcttatctcaaacgttggtcacgaatggggcaggttagctcaagcaatttaaaatccttattaaaaattggcagtattgaagcggtagtggccgttgccaactctcagaacttaaacgacgaagtaatcgaactggtatggtggtgtgcaaccaacactgatcaacaagcagaaattgggcgttttttactcactcgtgattttgtggtcgaacaccctgtgggcaaaaaaattgctaactatttattggaattcttaccttttaccgatgacacgactcaactgatcgataccactaatttggttttacaagaaggcttaatcagtcaagaatctaaagatagattatggaaacaagggcaaagaaaaaccgcttttttagtgggatttattgaacgcatgaaagacagtctgcccaataacgatggtacagttgcactcagtctaaacaataaagagcttgactgcgttagtagtgaacaagggcagattatgctcaaaaccattgctcatatcttaaaaaaaatcaaccaagaatatgttttgtatcgtactttagaggtgctgggcaagtgcctatcacacccaatgattcatccttacgatcaaattgacgaactgcaaaaacaatctcaaagtgtattggagaaattaggtcgtgatgatgagcaaattaaagctcgacttttgctggctggtgttagtgaaaaattagcagtcagtacgatttctgctcatggcctagctgggtcagtaatccgcaaaaaattggttcacgttttaacgccaattcaagatgctctaaaactactgaccacaccttaattttaactaccccataacaattgcatgttggcaatcgccacaagtgaggctgtttccgttcgaagtactctagaacctaacagcagagactgatagcccgcactagttgcttgctcaatctctttttcgctcaaaccacctt

SEQ ID NO: 677 - DNA, 14770 bp, synthetic construct
  source 1..14770: mol_type = other DNA
  misc_feature 1..14770: note = Synthetic
tagcgcagaaaactggcgggctttatcaacaattaaatgtaaataatattaaaaattttcttgattttaataaatttagcgatttgaataataaatccaaaaagcaaggtcaaaaaatcagtgttaccattgataatggcatctattttgttttggcagtgttgccactatttttattactttttaggcgcggtacaaagtgagattactgattttactattattatttaatactgcttgggctaagaatttaggtgtatttgataccatttggcaaacccaagaccaagttgcaaaacagcactatgataaaaaaaactactcacaatcagccgaattatttgaaaacaaaacttggcaggcaaatgctttgtaccgagcaggtaaatttgctgaggcggctgagatatttaaaaatttagcccaaccttataatcaagccaacgccttggcaaaacaagaaaaatatcatgaggcgattaaagcatatcaaaaagtagccaaaggcgaacaaaattataacgatgcccaatacaacttaaacattgtaaaaaaaatcattgagcaacaaaaacaacaaaaacaacaaagtaaagaccaaaaagacgataaagacggcaaaaaagataaagaggaaaaagaaaacaaagagggcaaagaagacaaaaaatctagtgataaaaaaaacaaggacaaaaacaaagaaagtaaagaaaacaaagaaaataaagatgaggaaaacaaagaaaataaagaaggcaaaaaagataaagaaaataaagaaggcaaaaaagataaagaaaataaagaaagtaaaaaagataaagaagacgaagacaaagataaaaaagacaaagaaaaacaaaaaaccatacagcgtcaaatagacaaacaacacttagagcaaatttttaaaaaagtaaaaactcagccggttaattttttaaggaaaaaatttgaagttgaaagacaatcacgcaaggaaaaaaacagcaaattaattaataatcaaaagcaaacatcatggtaaaaattgtaacaataatagctctattttttattaacaacgccactgtagcggcagttagcattgatgttaaagttgataaaacccaaatcagcaatcttgataatctaaatttatttattagcaatattccttttaataaacatttgaataccaatgccttaaatcaagattttaagattgttgggcgttcaaaaagtacctcttttagttcaattaatggcaaaaatactaaaacttccagattgcaattaaccctccagccaaaacgcataggtacattaacaattcctgtgtttaagttaggtaaggcaacttctaaacccatcaaaattcaagttagtcgtgcaaatgagactgattttgaaaaaaatattatttttatcaaaactaaagttagccaccctaaaccaagagtgcaagagcagctaatttatacagtaagtttatatgtgcgttctaacatccgggatgcaaatttggattttagaccaaggattgatgccaatgttaaaaaactaaaagaatccaaaattttaagaagcgattttaaagggcagaaattatggaaaaaagactttaatttcgccatttatccgcaaaaaactggcaatttagagattccaagcatcaaacaacaagtccgagttaataataccaatgttttgctgttttccaatccaataaaattaaccgtgttgcccactgacaaaacctaccctgtaggggaatattggttgcctgcaaaaaatcttgagttgagcgctaaaccctttaaaaaagggcaaaaatttttcgttggcgagccgattgtgcgtcaaattataattaaagtcaatgggcaaagtgcaactcaagtgcccgatataatgctcacaaaaacgaaggcatttgagcaatatccagacaatcgttcaagcaaggaaaaactctcagaaaacaatgtgattagcacggtagaacaaaatattttgttgattgccaatcagtctggtgagcaaactctaccagcaattaatcttccgtggtttgatacccatgaaaataaaaccaaagtagcgcggattccagaaattaaaattatggttggtgcaccacttaacaccccaaaaacattaattttaccgatacttaaagacgaaccacaaaccaagcctaaacccgtagttagcaaaattaactggaagttaattgccattatcagtcttattttatgggtattgactttgttgattttttatctacattatcgctcaaaacctaaaaaacagcccaaaaatacaaaaacccccaatattaacgaactaaaaatgattaaaaaatatgctaaagaaaataatccagcgcagacaaaagctgcacttgatagatgggtttttgctgaatatggtttgttagatgtaggggcttttgccaaccaattaggcgctgattttgacaatgaggtgtttattttgcaacaaaatctatatcgatcaaaagggcaatgggacgggagaaaattctaccaaatatttgaatctgccttaaaaaataaaaccatcagcaaggataaatcaaacttacctacgctgtatcccgataatttttagccaattatccactaaagcctaataaactaataaatgagaccgagtctgatttttttcggatacaaaactggcaataaaagccacaattaaaccttacgatgaggcaacgagaatggtttgggtttttctattggttaaatttgtgagttaaatacaaggtggatttagaaaatagcccgccaaagactctaccaaaattatcaaagcctatacatgccaaattgacagttgcgtgacatgctaaattatcttgtagtttaatagacacttcacttttaataaaataacatagccgggtattttttgcccttgttgttgatatttaccgcaagaccataaatttaccaacattatcagcgacctaaaatatcaaaatctaaatcaatcttataatcagactttggaaaagggtttaatgttttcaggctcaaatgtttgaattgatagcgaatttagcaaacttgcatacaaattgcaagggggggaattttttattttcatattttgagctgcatataggttttaattcaaagttaatattcagtgccaattttattttttgctaaataaacccgttgagagataacggtcgcctcggtcgcaactgatggtaacgatggtggcgtgagtaactttttgggataactcaatcgtagcagataccgcaccaccggtggatgtaccagagaaaattccctctttgcgggctaaatctcgggtggtttgctcagcggcgttttgggagatgtctattattgcatcaacttttttgggatcaaaaatctttggcaaatattgtggtccccagcggcgaatccctgcaatttgcgccccttcttcgggctgcaccccaatgatttgaacctctggatttttatgctttagcgtggttgatacccccatgattgtgcctgtggtacccatagcagagacaaaatgggtgatttctccattggtgtcttgccaaatttcttctgctgttgtattgagatgagcgcccagattatcaaggttagcaaattggttaagttgcttacccttttggtttttctccattttctcagctaagtctcgcgctccttccattcccatatcttcactgactaaaatcaactctgcaccataggccgccatcgcatcgcggcgttcttgagagagattatcaggcataatcaaaaccattctataacccttgattgctgccatcatagccaaagcaatcccagtattgccactggttgcctcaatcaaagtatctcccattttaatttccccgcgcttctcggcttgggtaatcatattcaaggctgcccggtctttcaccgagccagcaggattattgccttcaagtttgagtaaaatggtatttgttgggttaggattaagccgttgcaatttaactagaggggtattcccaatggttttttctatggttgggtagggtttcatcgctgtctttctaaaaattgtatttttctaaaaatccaacctctgtctaaatcatccattttatttaaggtagcaaatatttgctgggcattttcgcccaggtcaatgttaagtaaatctagctctcttttttctacaaataaacaataatcaccagcacatagccgtgcttccattaatggggtattggtatttttcccagcagaaaaaatgatgcctcgtggtgctaattcaagggaatactcacgcttggcattatcagatttattcgcaaaagcatacccgagaaacacgctaaatccaagtaatagcgcgattctacatattgttaagaatggcatcgcgaacctcatctatagttggattaatgttaattattgcatctgtgcattgtgaaatggcagtgtctgggtctttgagtccatgccctgtgagggtgcaaacaatggttgatttttggggaattttgccagttttaatgtcagcgattgcacccgataatgaaaccgatgaggcaggctcacaaaaaatcccctctttttcggtgagtaatttttgtgtagttaaaatctgggcatcggtgcgggcatcaaaccagccgtttgattcttttataactttttgtgctaaatcccaactttgcggatgtccaatgcgaatcgcagtagcaatagtttcaggattatccaccatcgaaccgatcacaaaaggggctgagcctgccgcttggtagcccaccatcttaggggtatggtttgattttccatcgctatggtattctttataacccatccaatgagcagaaatattgccagcattgccgacgggcaaatagtggtaatcaggtgcgttacctaattcttcaataatctcaaaggcggcagttttctgcccctgtaagcggaatggattgatagaattaactattgatacgggcgcatgctcagccacttcttttaccaaacgcatcccatcgtcaaagttacctttaatttgaataatgaccgcgccatgaatcatcgcctgtgccagttttcccagtgcaattttaccttctggaataaccacaaaggctttaataccagcacgcgccgcatacgctgctgctgaggcagaagtattgccagttgaggcgcagataatagcttttgagcctgattccactgccttagttactgccatggtcatgcctctgtctttgaatgaccccgttgggttaagcccttcatatttgatataaatcttatgttttttgcccaacatagtggcaatattttgtagttggattagcggggtgttgccttcacccaggctgatgggacgggttgcatcggtaacgggaagtttactttggtaacgctcaattaaacctgtatatctcatttttattattctcaatctagggtttctatggggatgattttaattttttcttgggaaaaattgtgggtttgaatttgtgttattgctttgtttaatgttacagttttcactttgttggtaacaataacaataggggaattattttgtgcatctacttgtttttgcatcacttgttctacactgatatcgtattcagccaatgttgcggtaatattggccaatactccaggtttatcagccactaaaaggcgtaaataaaaaatactacaaacattgtcagtatcgcagataggcataggtttgagtgatttccagcccaatatatcatcacttatagtgcctttaataatatccaccaagttggcaatcactgcacttgctgtggtctcagcacctgcacctgcgccataatagagcgttgtgccaaccgcattgcctttgattagcaccgcattcatcaccccatctacattcgccaataggcgtgttttggggattaaggtaggttgtacatgggattcaattttcccatcggcatatttagcaacggctagatgtttgatgacaaaacccaattctgcagcgaatgctacatcttcagaggcaattttgccaatgccttcagtggtgatttgttcaaattgcaattcacagccaaaggccatagaagatagaattgccaatttgtgtgctgcgtcaatgccttcgacatcaaatgttggatcggcttcagcgtagcctaaatcttgtgcctgtttgagagcatcggaaaaattggcatttttgtcattcatttcactcaggataaagtttcctgtgccgttaataataccagcaatccattctatttcattggcacttagaccttgttctaaagattttaaaatagggactccgcctgctacagcggcctcaaatagtaaatacacattgtggctttttgccaatgatagcagttcattaccaaagttggcaatcagcgctttatttgcggtaatgacatgtttgttatttttaatggcttgtttgattaggtcttttgcaatacgggtgccaccgataagctctaaaaccacatctacggctggattattcaccactgcaaatgcgtcttcagtaatatttaacccatcattagggcaaattctggcttcactaaggtttttaactgcgacatgaataatgttaatttcttcattcgtatgggcaaaaatagtggctttatttttgtttaaaacattaacaacaccgccgccaactgtgcctaagcctaaaattccaatgttcacgagttttaacccccgcctataaatatagaagccacagattatatatgcttaggcaatggtaatggcgacacatttaagcggtctagaatattgcggagggattgtgtgctgattgttgaataataccggtgccaaagactttaacatatcttcatacacggtttttttaaactcaatcacagtttcaattggatgccaataatccacccagacccaatcatcaaactcaaccttaggatgtgtatttaatttaatattattttcatcgctggtgagttttaataaaaaccaaacttgtttttgcccaatacaggtgggtttttgccagcgtttgatatgatgattgggtaaattataacgcagccattttggggttttggcaatcacttcaacatcttcagcacacagaccagtctcttcttgtaactcacgaaacagtgcttcaatatcggtttcattttcgtcaataccaccttgaggtagctgccaagaatcttgttggcaacgcttagctaaaagtacttgccgtttatcattagcaataacaataccaacattagcgcgataaccttcagcgtctatcattacccttagtcgtcgccagaaaaggcacctaagatatgtaacaaggagacaaacatattatgcaaacccaaatacaaacctactgttgcagaaatataattacgctcaccaccgttaataatggatgacatttgtgagagtataaaagcgcccataatcaacactacagcaaatgagatcaataaagcaaaggcggatgattggataaaaaagaagttgatcaatgacaaggcaatcattccaatcatggtaaaaaatatcattccatttagaaaactaaaatcttttttagtattttgtgcataaaagctaatgccaaagaatgccacaccagtgccagttaaggcttgaataaccaattctgcaccattcggtagagcgaggtagtaagcaagcataggaccgatagaataacctaataaacctgccacagtaaaggcggttaatatacctttgttgctattttgggttttaggtaggacaaaccaaataaccacgattgccgctattaagctgaccattgccgcaccaaaaccggcgttagaagccactgaaaaccaagaggctaaactaccaaacactaaagtataagacaatagtcgcatggtatctgagagaactttatttttttctctaacattaaaaacaactgaattaggtgaataagtgcgcatggtttttttcctctgttataaaataaggaagttattttacactataaagacaatgatatgaaattggttttagggcttggtatgacaggcttatcaattgtgcgttttttatcaaaacacaacatcacttatcggcttgccgacagtcgcttgcagccaccattattaaccgattatttaagtgaattatctatcccaaaacctgtgctgggtggctggacaaaggcattattaactgatattgatgaagtatttattagccccggtatcgcccaaaacgagccaattgtcatctgggcaagagagaaaaatatccccattaccagcgatattgaattatttgcccgccatgtcaaagcccccataatcggcataaccggctcaaatggcaaatcaacggtaactcaattattaggggagatgattgcaaattctggaataaaagttgccgtaggtggcaatattggcaaccctgcactggattgtttgaatgataaaatgaaatattatgtgttggaattatccagttatcaacttgactatattcaacatttaaacttattaactggagccgtgctaaacatcaccccagaccatttgcaacggtatgctaattttgaggaatataccaaatcaaaactcagcttatatcaatattgccagcatccggtggtgaatattgatgagccactgatacctataaaaaccaacgccacgcgttttggcatcaatttacccgagcaagcaggagattttggcactgttgcttgccatggtagctgttttttgctaaagggtgataaggtgctgatggatactaaaaaaatccaactaatcggggaacacaatatcagcaatatcctctgcgcccttgccataggtgagcaaattggcttggacctcaattctatgttgcaaaccatcaaatgcttcaaagggcttgagcatcgtttagaatgggtggtaaaaaaacaaggcatagactactacaacgattctaaagccaccaatgccgtcgccactatccaagccttaaaaacgcttagcaaacgccataaaaatatcactcttatcattggcggtatcaaaaaacaagaagattggcgtgtgctattaaaacacattgataaaaatgttgcccacgctatcctaatagggcaaagcgcccaaactctagccaatggcatccaccaagcccaaaccacccacgcgagctcaatgcaagaagcagttgctctatcccaaaaaaccgcaaaaaccgcagttttactctcccctgcttgtgccagttttgatatgtttgataattttgaacatcgtgggcaggtgtttaaaaaatgcctcaattattcataaagatataaagaccccataaaattagacaaacactagatttacaaatttggttgttgaaaataaaaataatggggatggttgtttttacggctgattgttgagcaaataacaggcattaaaaaagcccccactgggagggctttaggtcatcttaaaagatgttttgcctacgaaaaataaatttcattggtatgaaaagcaattctcttaagcaatagtctgttacaatcaggcttcattatagccattaaaaatcaaaattgtattcttttttttaaaaagtttaagtatttttttatattttgactatcgcctacgcaaatcacaacaactattgaggtataactgcaaatatgcctaaatagtttttttaagataaattatacaatacaaaattagcaaatagatttactacttaaagaatactcaatagttgaaaattaattatttttctttataatactcttttatgagaaaatttagtatcagaaaaataaaacaattattgttagtaaaaacaaataccaaaaggtttgtaagcaacaaaaaggggggtagttttttgtataaaactgctaatccttatgcaaccttgtattattcagatgaacaggaaatatacaatataaaaacaaggagaaaataatgagtaaaaaagtattaggcttggatttgggaagtaattctatcggctgggcattgatgagtgaagaaaatggtgaagtaagcgagattgtagatttaggttcgcgaatttttaataaggctgtggaagaaaaagtgccgacacccaaaaataaaaaacgccgagatatgcgtttagggcgtagagttttacaacgccgagcaaggcgtaagcaaagaatggctaactatttaatttcacttgatttattacctcaggcattaagcaacaattttggacaagaaaaattattgaatgaattgggcaacccttatgagcttcgcactaaggggctagatgaacaattaaccccgcatgagtttggcagagtgattttgcattttgttgcaaggcgtgggtttttatccagtaaaaaacaagtggcaggagatttggtggatgacccagataccattgaatttttaaaagaattagaagaacaagagcagaaaaaacgagcagcaagagaagcaaagttgcttgctcaaggaaaaataataaaaaccacacaagacgatcaaagtgaggacgcatttaaagacgatattagcagtgtttataaggctattcaaaacagtcaatgccgaactttgggtgaatatttatataaaagagataatggcaaagttaaacgcaatcgctcacacgatggcggacatttacgcaccgatagaaagatgtatcaagatgaattgcaactaatatggcaaacacaacagcagtattttcccgatttgccaaaagattttatggagaaaaacaagggtgttttaaaaattattttttaccagcgacctttaaaacttagaaaagaccgcgtgggaaaatgcttattagaaccaaaacattatcgtgctaatgttgcgaggttagaagtgcaaagatttagatatttgcaagatgtgaataatctgaaatattctaaaccccacagtcaagagcgccaattaaacgacgaacaaaaagacaaattaaaaacttattttgaacatcatccaaaaatcacaatgactgttttaaggaaacaactgggtttagataaatctactaaaataaatttagaaaccaaaaatcttaaaggcaatatcaccgcctgtaacattcgcaatgtgattggcgataaatgggacaaatattcagatgaagaacgatctcaattatttgaagacttatttactattaagaaaaaatccgcacttaaaaagagattgattacccactggggttttgacaaacaaaccgccgttaaactatgtttgattgaatttgagacaagccattctaatcattcactcaaggcgattaaaaagctattgccatttttagaacaagggcttcgttatgatgaggcgagagttaaagcgggttatgggtatgaagttgtagaaaatgaagtacagaataaattatctgccccgctagagacttcaaacccaattgtcaataaaggaatgcacgaattgcgtcgtgtggtcaatgctattattaagcagtatggcaaaccagatacagtgcgtattgaaatggcacgagatttagaaatgaacaccaaacgctacaaagaaaataaagcacggcaaaagaaaaatcaaaaagccaatgaaagcgcaactgaagcttttagacaagaaacaggcaggcagtacccatcacataagcaaaaaattagttatcgtttgtgggaagaccaagataaacgatgtgcatatagtggtaagacaattgccttagggcaaattttctcagcagaatgtgaaattgaccatatcctgccgtttaaaaaatcacttgatgattcttatatgaataaagtgctatgctttgaagcagaaaaccgtaacaagggcgatagaacaccggttgacgcatggggtggtgataatgacaaatggaatcaaattacacaagctattagtcgttgggataaatctttaaaatcaaaggtcagtcgtttttatatgcaagaagcagatttacaagagcgagattgtgtctcaactcaattaaatgacacccgctatatttccagtttagcacaggattatatgcgtaaattgggttgtgatgttaatgttactaaaggctttgtggtcagtcaaattcgccatcagtgggggtttgataatttgattggtgaggcagataaaaaagatcgtactgaccataggcaccacgccattgatgcagtggtgattgccagcacttccagaagtctttaccagcaagctgttagagggattgagcacaataaactaaaaatacctcagccatacagtgatattttgcaagaactaagtgaaaaactcaagcacacgattgtatcacatgtgccacaatataaattatcaggtgccttacatgaagaaactggggcgggttatttggcacttaaagataggcaaacaggtaaaattatcaaacaaggcttggtatatcgcaaaaccttaaaccaagaatttaccttaaaaaatgcccaaaatattgtagatgaaggggttagaaatactgttttgcaacatattctagaccatgatgaaaatactaaaaaagcctttacttctgatacactaaaatatcttaaattgggtcaaaaccctattaaacgcgttcgtgtttggcagtctgaaaccacacctgaaaaattagcaaaaaccaaatgtggcattaaagacaagcaaggtaatatttttagatggatggcttatggtaataatcatcatgtggaaattattcaacacaaagaaacagacagcattaaaggggtgtttgttaccatgatggaggcttcaactcgggctaaaggtattggcatcaaaaaacagcctattgtcaataaaaatcacggtaaagactggcaatttttatacgctttacatattaatgatttggttagtattgaagatgaacaagaggagcgaattttttatcgggtgcaaaaacttgctggcgggtatgatttaacattaaggctacataccgacacatctcccaataaaataaacgataaaacttctgcagaaacaagaatgtttttattaaagcataaaaagatattagaaaattctctgaaaaactttatccaaaaatatgatatgaaactgcataaaaccaacgctatcggtaaattactagatgattaaacgcattgttgaggtatcaaaccccagttatttacacctcaaaaacaaacaattactcgtagagcaagaccacgacatagtggcacaagtgccaatagaggatattggagtgttaattttagaacacggtgctattagcatcacccaacccttaattattgaatgtcaaaaaaacaacacaactattattttttgtgatgaaaaacatctgccatattccactattttgccaattgttgagggcaataatctacatcaaaaaattcttaagcaacaaattaacattactgagccagtgcgtaaaaatttatggaaacaaatcatacaaaaaaaaatcacaaatcaagcaaatacactaaaacaatttaataaaaatgctggtcgtttaaacaagttagtgactcaagtaaaatcaggcgatgcaacaaattgtgagagtttggcggcacaatattattggaaagagttattcggcaaagactttgtgcgtaatcaaaatgcaggtggtataaattctattttgaattatggctattcaatcattcgggccatgattgctagaagtattgtggcgggtgggttgcaccctgctatcggattattccatcacaatcaatataatggcctatgtctggcggacgatttgatggagccgttccgagcctgggtagatagccttgcttatcaaatatacaaggaaaacgcaaacattagcatcactaaagaaattaaagttccttttttaaatctaatgagtgaaagtgtggagtttaaaaataaacaaatgccactaatggtatctatgtattatttaacggcaaacttaaagcgtaattttaccaaagaaaccaaagtattgcactatcctataagtcataatcaaataaataacaaataataatgtttggaggtctacaaactatgtgggtgattgtgttgtttgacttaccaacagacaacaagcaaatgcgaaaagactatacttgttttagaaaatttttactcagaggtggttttaccatgatgcaatactcagtatatatgcgtcattccagtagtgaagagaacgcacaagttcacatcaatcgtatcaaaattcacttaccacctgacggagaagtgagaattatcaagataacggataaacaatttggacggattgaggttttttatggaaaaacacgccaacccatcgaaaaagcaccagaacaactctcatttttttgactagaaaaaatgagagttgtttgtcattacagcattttaagccagcggattgtaacagactattgcctaaacgcaaatcacaactttaaacaagggggtaaaaaatgatactaaattgtaacagactattgcctaaacgcaaatcacaaccagtgatgtatttagcagaataacttgctgattgtaacagactattgcctaaacgcaaatcacaacctttgttgtcttttattgaatatatattttattgtaacagactattgcctaaacgcaaatcacaacctaatgagcagaaaaccaggaatagccaaaattgtaacagactattgcctaaacgcaaatcacaacgaggccacggcaatg

SEQ ID NO: 678 - DNA, 14740 bp, synthetic construct
  source 1..14740: mol_type = other DNA
  misc_feature 1..14740: note = Synthetic
tgatttattgcgcccttgatgcctcacgccgaaccaagtagccgctctacccccagaccctcaaaccacggcattaccagcgtctcgttgattgagtacggataggcgtggccccaatccggcagttccgtataggtcacgttgtagcccagctttgtcagcccagtatgtgtctgtcgggtgacatcaacggcaaagatcgggtcctgttcgccatgcacgatgaagatgggcaggtctttgccctgaccgcgcttcaggagatgattgatcgcgggatgaatccgcccggccaccggggcaatgccggcgaaaatgtccgcatacgccaaccccagaacataggtaaaaatccccccgtcagagaatccggtgagatatatgcgccggcggtccaccgcatagctatcccaaacctcctccagcatcgtgcggatggagcggcggtccagaacagggttcggcgggatgccgggcaaacgaatagccgaccaggtttcccgcaccgacttcggggcgagcagcatatagcccttgctctttgcggcccggagccacgtcagcagatagtcgtcctcccggctgtagccgctgtggaggcagacaatgagcggccattccgtgtgtggcgtgtagttctcgggtacgtataaagaataggccgagcgttgatctttccgttctttgcggacgataccgaccgggacgttcaggcccggcacctgtatttccaaggccgggagcgatgacagggtatccgggaaaacccagtgttgttggaggatgggcaacccggcacgtaattcatacagcagatgttttccccggcagaactcataccgccctttcaggaaatccatggcaaattcttgaccgatgaaacgcagcagaaacgcataggcgtcagcgcagtgctgcactgctttgctgaacgtggcatggaactcgtgcagcggctccggtggagaaaagagcgccaagtctgcctgtaatgcctcgaccgtttccccgaggctgtctttcaactgggcgttctgttcggccagtcgatggatatggagcccttcgagatgggcctcgattgtacgcaggaggtccaggagtcgttgctcagcgtgctgcattccatccgtgtattgactgcttcctgtttccatggctccccccttttggacatggatgactgaaatcaggatcaagcctgacaaggcagccctggtccgcttctgcttgacagcgaagaaagagtcatgtttctctgctgcaatcctcaccccatatcaggctttgtatggaaaacacacacacgattcccgccagagaaacaactccctcgaatgaagaagacagccagctctcccgcctgctcaagaccctggggccgggcttgctctttgccagcaccgccattggcgtctcacatttagtgcagtcaactcgcgcgggggccaactatggctacgccctgctctgggcgatcattattgccaacctcttgaagtatccatcctttgagtacggctcgcgctatgcgaacgcgaccggagaaagcctgatcgatggctataaacggttcgggaactgggccttatacctctacctgtttattacggtcagcccgatgtccattattatcgcggccatctgtttcaccaccgcaggactgttgaacaacctactcggcctcgacctgccggttatccacaccgccctgttcctgatcgtcggctgcgtcagcattttgctggtcgggaaatacagcgccctggacagcctcattaaagtcatttgtacggtgctgtttctctccaccctgaccgcttttgttctgactctcttgcgtggcccgactgcgccggtcgctttctactcgtccgaggtctggaccgcctcgggctttgcctttctgattgccctcatgggctggatgccggctcccttggatttatccgccctcaacagcctctggacgcttgaacgtttcaagcagaccggctaccggccgaccctgcgcgagacgcttctcgactttaatgtcgcgtatgtgatgacggcgtttttagccgtctgtttcatgacgctgggagccttcatcatgtacggttccggtcagtcattctcaaaccagagcgggacgcagttcacgcatgaggtgattcggctctacaccgcaacgctcggggactggagctacatcattatcgcctcttcagccttttccgtcatgtttggcaccaccctggtcatctttgacggctatgccagagccatggaccggacctgggccttattattttctcggagccaggacggaccgggcagccgcaccgtgtataatacctggctcgtgattggcgcggttggcggctatctgattattgcgctgtttctcaccagctttaccacgttaatcgacctagccactgttatttcatttctggtcgcgccgattattgccctggccaaccatcggctcgtccttagcccccacgtgccagcagccgcgcatcctccgcactggctgcggctgctgagttggaccggcatcgtctttctgacggtctttaccctggtgtatatcggcctgcggctggtgccgtaacaagcgtcaccttcagaagccaaagagattgacgtgctacgcattgggccgcgcggtgatgtgtacaaaggataggaggacgccatgaccaagccgcaaattatccttgacgagggcggaaacccggcattcgccgtgatccggtggcgagagtacgaacgcttgatggcgacgggtgacgaggcaagtctgaccgacgaagaactgtacgaccgggccaaggcagaaaatgaagaatcctttcccatcgacgtggcagaccgcttgctggcgggagaaaacgccgtcaaggtgtatcgtgactatcgcggactgacacagaagcaattggccaaggccgttggcataaaccctatctacctgtcgcagattgagactggccgacgtaccgggtcagcccggactctggccgctcttgccgcagccctgagcgtagacgtggacgacttgatctgaagggttacaatctgagtaccaaatccgtagctggtgggaaggtataagcaaagtgacccaacacgtacggctagacgacggacccggctacgggagcgatcggagcaatacccggatatcgggtctggatatcgacaaggcggtctttccggtttccgccctcaccatcaccgtctttgtcctcggtgcgctgctgttcccggacagggcgacactggtctttggagggattcggacttggctcaccacccagttcgactggctgttcctgctcaccgccaacctcgtcctgctgttctgcctgtttatagctatctccccgctcggcaaggtgcggatcggaggacgggaggccgtccccgagtattcctctgtcagttggttcgctatgctctttgccgccggtataggcattgggctgatgttcttcggggtgctggagccggtccagcacttcctgtatcccccgctcggtattaatgccgccgataccgagacggcccgcgccctcggcatcgccgcggcgacttttcactggggtctgcacggctgggccatctacgcgcttgtggggctcgccctggccttcttcagctataaccggggcctgccactcacgattcgctcggccttctatcccctgctcggtgaccgtatctggggctgggccggccacctgattgatacgctggccgtctttacgaccgtgttcggtcttgccacctcgctcggcttgggtgccaatcaggtgacgggtggcctcaattacctgttcgggattccggccaccgacctcacccgagtggtgctcattgtgctgatcaccgccgtggcgacaggctcggtgctgaccgggatcaatgtcggcatcaagcgtctcagtgagttgaacgcgattctggcagtatcgctgctggtgtgcattatcgggatcggaccgaccctctatatcgggactggcttcttcagcgggctgggcagctacctgactgcaattgtgccgctcagcaactgggtgggccgacaggacaccaccttcctgcacgactggaccatcttctacctggcctggtggcttgcctgggcaccgttcgtcggtattttcatcgctcgcatttccaggggccgtacagtccgcgagttcttactctgcgtcctcctcctgccgacgctgttcggtttgttgtggatgagtgcttttggcgggaccgccgtctaccaatatctcaccgatggctacactggcgtgaccgataccgtcagcgcgtggataccggagttggcgctgttcaagatgttcgaaccactgccgctgaccggtctgctttctgtcgtcgctctcgtcctgatcgtcatcttcttcgtcacctcatcggattccggctcgctggtcgtcgcgaccatcaccgccggcggcaatttcaacgtcccggttgggcggtgcatgttctggtgcgtgctcgaagggctggtcgccattgccctcctgcttggtggcggtctgcactccttgcaggccgcagccctcgcggcgggtttcccgttcaccctagtcctcatcgggatggccctcacgacctgggttgaactgcgccgtgaagcgctttgacgttggaccggtagcatctttttgacggtctttaccctgatgtatagcagtgtgcggctggtgccgtgacacggcgtcaaaatgattaagcgaatcccggtatggcatagctcggcttgccgtaccgggagccgccgcgcagccgatagctcctcgtgtcgcgcctggcctgttcttctccaggcttgacttcctcccccctctcgcttatcggcctatttttggggttacttcctatgccgacgctgctctacgaacctgatgaacacccgccgtatacgctcgcctttggtatcagcgtacaacgagtgatggccatggcacccagcctggtgctgatcccgaccattatcatgcgggcggcagagcaggacgagacctatctggcctgggctatcttcgccatgttgatggtcaatgccgcgatgacggtcttgcagacgctccgcatcgggcacctgggttccggctatccgctcgtcatggtgaccagtagtgccttcatcggcgtgtgcatcagcgcgctcggtgcgggcgggccgtccctgatggcgaccctgcttctcgtggccgcgggctttcagttcacgctggccacccgtctatccttgttgcggcgcttcatcacgccgatggtgaccgggacgctcctggtcctgattgccgtctccatcatgccggcgatctttcggatgctgaccaccgtgccggacgggacgccgtgggccgcagccccgacgagtgcggcggtcacctttgccacggtcgtggcgctcctgctgcgagcctcagagcggtggcggttgtgggcaccgctgattgggataacggtcggttgcgcggtggccgcgccgtttggcctgtacgacccggcaccgataggagccgccccctggattggttttccccggaacgcctggccagggctggacctgacgttcggacctgccttctggtctctcctgcccgccttcctgttcgtcatgctgatcggcacgacggggaccctcggccatgccgtctccacccagcgggtctcgtggcgccagcaacgggcgaccgatctccgctcggtccagggcgcggtggccaccgtcggcttgagcaatctgctgtgtagccttgccgggacaatcccgaccgggaccgccccgtcgagcgccccgtttgtggagcagtccggcgtggcggcgtgccgggtcgcggtgtgcgtgggcgtcggcttctttgctttggcgttcctgcccaaggtgatggccgtgttgatcgccattcccagcccggtggcggccgcctatctggccattctgttcggccccatcctggtccagggcatgcaactggccctccaaagcggcaacgactctcgcaagacgctcatcatcagcatgtcggtgtgggtgggggtgggctttcagtctcaggccatttttcccgactatctgagcgggacgtgggcgatcctgcttggtaacggcatcactgccggaggcctcatggtggtgggactgaccgcgttcatggagctgaccggtccccgccgccgccggctcgaaatcgggctggggatcgccggcctgcccaaactgacggcgttcctgcgcgaactggcggcccgcctgggctggagtggggaggcgacccagcgcctgtgtttgatcggggaggaggcgttgacgagtctgatccagcagatggacgccaaggccgccgagcacgccaagccgcgcctgcgggtgctggcccgccaggacggagcggccgtggagttggagttcgtggccgcagttggcgaggacaaccttgaggatcacattgcgctgctcggggaccaggtggagacacccgacgagcgggaattctcgctacggttgctgcgccactttgcctcgtccgtccgccatcaacagtaccacaacattgatatcgtgaccgtgcgcgtggacggctcgggctaggggctggacgctagcccagaggaatgaccggaaggcaggctgcgggtcagacggcgaccgggagactcccttcgcgcgctccgacaccaagacagccgagcgaccagctcgcagccggtcggctcacgggagctagtcctgagcggtagtcgcgattagcagttggccggcgaggccggcccggcgatgcacaccccactcggctatttccggagaggaaatgacctcgacaaacgtctctttggacgggaactcgacaaccaacacctcgtcccacagttcctccacctcgccgagcacgagatgcttcgcgatcccggaaaggacgaggcgtccgccggccgacgtgacgcgttcgaccattttccggcggtagagcccatacgcttcggcacccgtcagctccgtctcccggccatcagcgtacgccgccctggccttgaacttcaacaagtgtaccatcgtaaccggaccctctatcgcgagatcgagaagggcctcgaaatcctcggctgtgcgctgcaccttgttcagtaccttcatcgttgtgtcctcctagcgatttctcgtggtcggcacatgtggctctgccgtttgtcgcaacggtcttcgctcatagcatggcaatagcatggccaatcgctcccggccagggtccggccgatttacgcgctccgctatcagccggatcgaacgcaccacaccgtcccacgcctcgcggccgaccgtgctggatatgttgacagcagcgtcgagcctagccggccacccctcccgcccacggcgtgcagaatgcgtgtttgggagggtttgacggaaatactcctccccggcaataaagaggggacagtgagaagaaggagggcggtggatgtctgaccgtgaggggtctcttcagcaaaaaatacgcctcgtgagtcaggttcttgtgggcggcctgctgttgtcgagcgtgagtattgcaccgagttcggccttctctccgacagaaggggaaagtgacggcgaagcgctctaccaggcgcactgcgcgcgctgccacgaggggcaggtcaaacgcgcgccgcaccgcgacatcatgtcacgtctgcccgccttgatggtcctgaattctttggagcgcggcaggatgaagttcgagggtatgacccggaccaatcaggagcggcgcgccatctcggagtggatgaccggtaagaagctcccgcctccgaccgaaaaagacgcgacggtcgccgggttctgtgaagacgcgccaggcgagttctccattgaagacggagccctgcagtggaacggctggggagccgataacttcaacacccgcttccaatccgccgaggctgccggtatcagcgccgaccaagtgcctgagctgaaggtcaaatgggtgtttggtttgcccatggattttcgggtctcccagccgactgtggtgggtggtcgggtgtttatcggttcgctccagggccggatttattcgctcgatgccaaaaccggctgcttgtactggtcggtcaaaatggacagcggggtacgtgcgaccatggtggtcgataccctgccgggcaccaccccgccgcgttacgttgtttatgtgggcgatgcggcgacaaacatgtacgccctggacgcccgcacgggcaaagaactctggaaggtggacgtggacgaccatccctcggcgcggattacggctacgcccaaaacgcacggcaaccggctctacgtgtccacgacctccctggaagaaatcgcgggctccgacccgacctacgagtgttgtacgtttcgcggcaagatcatggccctcaaccgctttaacggcaagctggtctggaaagcgtataccattcctgatccgccggcgccggtccgcaagaatgctgtcggcgtgcagctctgggggccgtccggcgccacgatctggtctttccccgcgctcgacccggagcgcaaccgcatgtatgtgaccacgggcgataattattccgatccggcctcgctgacgagcgatgcggtcgttgctcttgatctgcgcactggggaggtcttgtggtcgaaacaatttactgcgggtgacgcctggaatgttgcctgcgagaccgaggacgataccaactgtccggaggcgcgcggcccggacttcgacttcgcctcctcgcccatcgtgcggatactgcccggcgaccggcggatcatcctggccggccagaagtccggggtgatgcacgccatagacccggaccggaacggagagattctctggcaggagcgggtcggcaagggcggcctgctcggcgggattcagtggggctcggccgcggacgccgaacaggtctatgtggccctgtccgatgtcgtccgtaagacgatagagaatgcggacgggggctggacccggatcctggacggcagcgttgggggcggcatgtttgcccttgatatcgagagtggcgcgcgcaaatggcacgtcccgccggtcggctgtggcgaccgaccgcagtgcagcccggcccagtcggcggccgtgtcagccctgcccggcgtggtgttctccggttcggtggatggccatctgcgcggctatgccaccgacagcggcactgtcgtctgggactacaacgccgaccaggagtatgagagcatcaacggcgtcaagaccaagggcggctcatttgacggcccggggccgaccattgcggacggtatgctgtatgtccactccggttacggctatcggggcgggatgccgggtaacgccctgctcgcgttctcggtcaatggcgagtaggcccccctctttttccaaaatccaggaccacgttccctgaaaaggtaaactatcgtgaaatagttcatgtcaattttcgctgaaattgcaaaaagtcgagcctgggcaggtagttagggatttctcatgcaaaatgaaattttcacgtgaaattgggcttttttcacgcctcttttttgcattgggggggcttaaatcggtcttaaattgggattatggaacattgtttttggaaaatttctgtcccgtttgtgtgtcctatgagagtgggaaattcggggccacccctccccaaaaggcgggcttttccgggccagatgagactcgtttttttcagacaggaccgaagtccttgaaatcactcaagtcagggtgagacccagcccccaaatgagactaaagtgagactataccgttcaaaattggattttcacgcgcaatggagaagaaaaaagcccccactgggagggctttggtcgcttaaaagcggtgcctgcgaagaagctacttctttggtatgaagagctgacgacagaccttggtgagttacactgccaaggaatatacacgggagacgatacatgagcaagcgcattctgggactggatttaggatcaaattccataggctgggcgctcctaaaaacaacagacgccgggaaaccaaccgggctcattgatctcggttcgcgcatattcaacaaagccgtcgaagacaagacaccgacgcctaagaatcagaagcgccgcaacagccgattagcacggcgagtggtgcagcgacgcgccagacgccgccaacggatgctgaattacttggtcagcctgaatctgctgccggccagtctcaaagaccatccgaagccggagagtgttctgaatgcgcttggcgacccgtattccctccgcgccaaggccctggattcccccctgagtgtacacgaactcgggcgcgttcttctccacttggtacaacgacgcgggtttctcagcaaccgcaaaacccggctgggccgggagatgctggacgacccggacgtacaagcagtgctggccgagttggaagaggacacaaccggcggagatagagacaggacagacgaagaaaaagaagagaacgcattcaaacaggacatcagccaactgcgaaaaaccattgaggcgtccggttgccgcactctgggcgagtaccttgcctcactgaaaccctcccagagcaagcggaaccggcagcgagacggaggacatctgcggaccgaccggcagatgtaccaggaggaattggacgccatttgggaagaacagaaaaaacaccacacggtgttgacggacaaggtaaaggaacaaatagagcagattattttccatcagcgcccgctcaagctccaggccgaccgagtgggtaagtgctccttggaaccgcgatgcacacgagcgaggattgcccgtttggaatatcagcagttccgttacctccaggatatcaacaatctccaattttttgatccgtacacagaaacctggagcgctctcagtgacgagaaccgcgctacattagtcacgctatttgagagtacaccgacgctcacttttcccggactgcgtagagcgcttgggctggctcgaacgactgagttcaatctggaaaaatccgaagtcaaaaagctcaaaggcaacacaaccgcctgcaagatacggaaggtactacccgaatgggacgcattctcccaggacaagcaatatgctctcgtggaagacctgttgaccatccagaaaaaatccgtactgaaaaagcgtctcatcggccactggcagtttgactccgcaacggcggtcaacctctgcatggtggagttcgagccgggtcacggtaatttctcgaccaaagccgttcgcaagctgctaccctacctggaacagggggaaattctctctgaggctcgtgttgaagcaggctacggctacgaacaggaagccataacagcgaaagaccgtctcggcccaccaccgaccatagccaatcccatagtgcaaaaagggctgcacgaaatacgccgggtggtgaatgccattattgccgagtacggcaagccggacgcggttcgcattgaaatggcccgcgacctggagatgaataccaaacggtatgccgcccgtctcaagcagcaaagggcaaacaccaaggccaacgaggaagctgctcagaagtacgccgaaatgcgccagaaaaatccgcacctcggtttgtccgaaaattcaagcagaaacgacaaaatgaaatatcgtctgtggaaagaccaggaagagaagtgcgtctacagcggaaggcagatcatcgtatccgaactgtttgggccagcggttgagatcgaccatatcctaccgtacagcctgacgctggatgactcctatatgaacaaggtcatttgctacacggaggagaaccgcgacaaacgcaatcgcacgcctatggacgccttcggtagcaatgaggacaagtggaaccagatcacccagaccatcagtcgttggggtaagagcctcaagtccaagcgagagcgtttctacaagagagaagccgatctgcaagaaagagattttatcaacagtcagcttaccgacacgcgctatatcagtcgggaagctagccgttatctgagcaccctgggagttgaggtcacatttcccaaggcggcattcaccggttggctccgtcgccagtggggcctgaacagcctgataggcacgaccgatgagaaggagcggacagaccatcgccaccacgccgttgatgccacggttatcgcttgcgttgaccgtggctttcatcagcgtttggttagattggcgaagaaactcgaacgttctcactcggaactcaacctgcgagatatatccatagatattccgtggcaaaccttcaggcaggacgtacacgaccaacttcaatcgctgattgtctcccacgttccgcaacggaaaatcagtggcgcgttacacgaagaaacgggcgtcgggtttatcgcgggcaacggtgttgacggaccgggaacagtctatcgccaagctctggatacggatttcaaggtcacgcagattgacaagattgttgaccctgtgattcgggagcaggtccgaaagcatttagcaaataacggtaatgatccaaaacaggctttcgcagacggcaagggcgtcgttcacaagaatggtaaaactcccatcaagagggtccgagtccgccagtcaaaagttcccgatttggacaccctgaaaaaaaccaagttcggggtccgtgaccgtcaggggaaggtgttcaagtggatggcgtatggcaacacacaccatgtcgaaatcatccgacaccgaaaaaccgaaaaatatgaagggagatttgttacggcgatagaagccgcccaccgcgccagagggatcaacggctcgaagcgcctggtcattcagaccgaccacggcgaagcgtatgaattcgtgatggcgctacatatcaacgatctggtcagtaccgaagccgacgggaagacggagttttaccgagttcaaaaatttgaacaagacgggagcaggttggaacttcggctgcataccgcggcaacactggagaacaaggaagaagggctgaggaaatcaatatcgacgctaatgaaagactactccctgcaaaaacatcttgtgaatgctatcgggaagttgcgtaatgataaaacggatcatcgacattagtgagtcagcctatttgcatacggacaaaaagcaactcctggtagacagggatgggcaaaccatagcctccgttcccatagaagatctgggggttctgatcctgcaacatccggctattgtcatgacgcagaggactatactccgctgccagcagaataatgtggtcgtggtgttttgcgatgagcgccacctcccctactccgttattcttcccattgcagaaggccacagcctgcacagcaaggtactacgggaccagattcaaaccagcctacccgtccgtaaacgtctatggcagcagattgtgaagcgtaaaatccgggaacagattgcgaccctgcaagactttggtattgacagcacccccctccggcggctggaaactgcggtcaagtctggagacagcgagaactgtgaagcccaagccgcccggatttattggccgctgctcatgggtgagggctttcgacgtagcgacgatgaactgagtatcaatgctttactgaactatggctacgccatcatgcgagccgtagttgcacgggcgttagtcggtagtggcttacatccggcgttggggctgcaccaccacaatcagtatgacggactgtgtctggcagatgatgtcatggaaccctttcgcccctgggtggaccttcaagtacggcagatagcggaacagcactcagagccacagatcgacaaatcgaccaagcaactattgcttggacaattgagcaagacggtggattggaagggagacagaatgccgcttatggttgcctcacaccatctggcggccaatctcagacaagcgctcggggagagcgggggcacattgcactatcccaagcgcatagcggacgcctgacgatggtgactttcggcgggctgaatacaatgtggactcttgtcctgtttgacctgcccactgacaccaagcaggccaaacagcagtatgcgcggttccgtaagcgtctgttggaagacggattcagtatgatgcagtactccgtttatatgcgtcactgtgccagcgaggaaaacgccgaagtgcatgtagagcgggtgaaggcttttctaccgccggaaggcgaggtccgtattatcaagattaccgacaaacagtttggcagaatccaggttttctatgggaaaaagcgcaaacctcctgagcccgcacccctccagattgaacttttgtaatcaatctggagggcgaaaccgccaagattccagcgggttgcgccggggaaagtgtaactcaccaaggtctgtccgcaatccacaacaggaaatagtggccggcctgaggcgtccggagtgtaactcaccaaggtctgtccgcaatccacaactgagaccgtagtcgaggcactcggcggtctagtgtaactcaccaaggtctgtccgcaatccacaactgttggtagaagatgtatgggttgggaagtagtgtaactcaccaaggtctgtccgcaatccacaacttgtcgtcgcccgtctcacccctcactatagtgtaactcaccaaggtctgtccgcaatccacaaccgcggatcatctctgccacgtttttg

SEQ ID NO: 679 - DNA, 14468 bp, synthetic construct
  source 1..14468: mol_type = other DNA
  misc_feature 1..14468: note = Synthetic
attggcgcggtactaagtaaaatcgaaatcacactggaagaaaagcaacggcatctgcgcagcaaggaggatattcaattgctggcgctggtggctaacaccatgctgtttgtggccatggccgaaattattgatattgatttacttattcagtacaaaaaagaaatcttggtcatgttcctcgccaccacggtgattcgtgctttgatgatggctaaattcgccttgatcaccaatagaacgaataagatgaccaatgtgaatttccgctggtggggtgtgctgactttcgccggtatcaagggcgggttgtcggtggtcatgctgatgatgattccagccagtttcccgcatctggatatgttcaaggcagtggtgattggcgttattctgctttcaacgttcatttattcactgattctgattgcaatcatcggcaaaaatgccgagattttcaaaaaagaaaaagaagccgaacacgcataagcggtagcgccgttaaggaagtgctgaataaagctggttcgatgctgttgcaatgaaaaatgagcgagttcagggcaaaggttgcaagcaatacccttgctattgctcaagtctttaacgcagaaattgcttgtttttttgtgcagtatcgcaacatgagttgtgcagagcttccttaaggaggtgctgattaattctgggtaaagcagcttgcattaaaaatgtgccaaatcaaggcgcaatgtgcacgtaatagcacggctattgcgatacattgcaacgccgagttggtgcattataaatgtaaaatgacctccttaaattacctcgtccggagcttcggcacggatagaaagcgcatgaatcgcacccttgaatgcatcgcccagcgcatcgttcaccaaacgatgccgcgcgacccttgattttccggcaaaacattccgccacgatgtgcaccgcaaaatgcccgccaccacgttcgcgaacacccgcatgcccggcgtgctgcgccgattggtcctcaatttcgagtagatccggtgcaagcttttgctgcaagattatacgaatggattcaacgcgtttgctggttttctccgacccgatcatgtttcctctttcttcttgcgatagagaatgaacaccttgccaatgcgatgcaccagttccgcgccaacacgagcgaccagttcttcgccaagcgccacacgctcatcccgatcttcgccagccacatgcaccttaatcagttcatgctgattcaggcaattctcggtttcggcgaccagcgaatcacgcattcccttttgcccgatacgaatcaccggtttcaagtggtgggcagcctgtttcagctttttcttctgtgcagcatccagcggcatgcgttatctcctgtggttgtctctgtgggtttcactataaattgtctctatgcattatccctgtgaaaaacacacgcactctagaagcccatcatccggagggaaagcttcgacgtgaaaatcccggctatttgaaaaccacagaattacatcaaataaatgacgggatattgaatgcgtgctaaattttgctatcccttccgaataacggagagcgaatgaatcatttcagtgaagaccctaggcgtgtacttattctcggtggcggtaccggcggcatggcggcgttagaaatgctgcgcgatgaggcgttggtagaaattgtcggcgttgtcgataccaatccgcaagccgaagctatgatactggcaagaaaactcgatattcccgtattcgacagtatcgaagctggcattacgacttgcgccccgtgtgtggccttcaacctgaccggcaatgaaatggtcgaggatgtcgttgccgaaaaaatcggggtgggcggcgtaatcggcggcttggaagcacggcttatcgtgcgcatgattaatcgcatcaaggaaaccaagaaacaattacagcgcgaagccactcacgaccatctgaccgaaatctacaaccgccgccacattatggcgttgctggaaaaaggtttacttcaggcagcgcgttacgaatttccgtattccgtagtgctgattgaccttgaccacttcaaacacgtaaacgacacctatggacaccctgccggcgatgcagtgctgatcagcgcggtcaacgtcctgcaatcctgcatacgtgatgccgatacactggggcgctggggcggcgaggaatttattgtcctgttaccgcacaccaacgaacaggaagccgtcaaagcggcgcaaaagtggattgagcacatcgcgacgacacctgttacgctaccggacgggcaggaaatacacatcagtttttccgccggagttgcgtgttatgccgaaaaacatgaccggcaacccgtgcaagaacgtattgaagaactcctgcgacaaaccgacatcaatctctacgaagccaagcgcggaggcagaaaaaaagcttgtggcacaagcgaataacaaattgatttagcgtatgaatcacttgcaaaaatccgggtggatgagttgcaaccccacgcagcatgcttattcgttcacaggcatcctaatccgcaaattcaggtagtgtttctgccgcaaagaccggcccgtccacacaaacacggcgataatgttcgccgtcttcttcctgcgttttaaccacgcaacccgcgcagccgccaaccgcacaggccatgtgttcttccagtgaaagccgggttggtaaattgaattcgcgacctaagcgggccaccgcatgcagcatcggatgcgggccgcaggaaagcagcgtacaacgattccgctccgcatcattcaacgccagcaaataatcacgcgccagatcggggacgtgcccggcataacatccgtacatctccgtattcgatgccaaacggcaggcaattccgcgctcctccagtgaagcgatgctcaaaatggtattgccgccgatgcccggcagcaagaattgtgatggtttaagcgcaaagggaaatttcacctcggaaccggcaaaaaccaccacatccgtatccttgtgcaagcgattcccgttcaatacatccgcagcaaaaatcatcggcggaatgccaacgccgccgccaatcaacacataacgccgtgtcgaatcactcaaatcaaatggccgaccaatcggcccgagcatcggcagaatctcacctgttttacgttcagccagttcgcgcgtgccttcgccaatcaccttgtacagcaaatccaccgtacccttttgcggattggtcaacataatcgaaataggccgccgcaatggccgcccctcactcacccgcagatgcacaaattgcccgggtttggcatgcgccgcagttttcggtgcgttgagcctcaaaatgaactgttcaccagcatgttcgacgctggcaagcacttcagcctgttcctcgaaaaccatattcctgtttacgccctggcgcatggaaagcgcctgctttgcttggctgctagcgatcatttccggtttccagtttccagttcgtcatggatacacaacgctttatgacgaaagtacattcctccataactaagaatggctgtaataaggcctgtcatcaatacctttcccaaggcaggctttccgtatgcgccagcaacaacaggggggaaattagcccaccccacaagcatttctcgcctatgccaagcagaccgtccgcaaatttccccctagcctttgcgctcttgtaacgtttatgagaaaaatccatgcctatcatctaagactccttaaaatgctttgctatgagctacttgtaaaagtctgggtggataagatgcaatcccactttgagtggattttcaggctggcttgaggggcatggtggttccatgcctcgaagattcagcctggaaatacgccgaagtggggaagcagattgccgctcacgacttttgcaagtgaatttccattcatcctcttagctgctgtctcggtattcatcgccgtctccatttccggcacgaaacccttcacttgggttacaatgtccgctgatgcaataaaccttgaagagacaccaccttcaaggaataggaagctggcatttcgcagatttggattactgaatcttgtttcgactctccgtatttgcggtgcgcaacgagaaccagtcatacaagcaaatgaaacaattgaaatcctgaagcttttttatcaaacgtcagtacgctggagcaaccggactgaatcgccgcatgcgcaatcagtaaatccaccaaatcttcgctgccgtttcttgccgattggatgaggtgttgcaacacttcctgagcatcaaacgatagaacaggcatcaataaaagcttctgcaacgcatcaagaatatcttgccttgaaatatcgtacacggattccagcacccagatcaattccagtgcaaccggtaacggcacaaacaggctgtattgttccgcctccgcccgtttgaacagatcacgcacaatacgcgcctgtttttcatcatcgttgaccagaaaccgaatcagaacattcgtatccagcgccttcattcaaaatcctgttgcaactttctctgaatagcagcatccatttccgcaacacttgcccgcttgcccttagccgcaacatgcaggcatgcaaaaacttcatccacatttctggtaaccggccttaacaacacctcattgtcgccaatgagtgaaaaatcaattttatcacctgcatgcaaatgtaattttttgcgcaggcttccgggaatcgtaatttgtcctttgctggttaaagtcgccagtggcatatggattgctccttactaataataattaggcttactataaggtaaggaaataaaagggtcaagcatggtgatcaaaaacaatccgcccggattttagtgtgtatgtcactcgcccggtcagctctctaccgtgccacggggtattttttgatttggaaaacaacttgttgcgatccagcgtccatttcgcatcagcatcgaagatacaaatatcggcggcctcaccttcggataatgttccggcattaagatttagcaattgcgccggattacaggtcattttggcaattaaatctggcagtgatagcaccccgtcacgcaccaacgccagcgacaccggcagcatcgtttccagaccgacaataccgaatgcggcgcaagacaggccgcaacgtttatcgtcttcgtggtgtggtgcgtgatcggtggcaatcacttcaatcgtgccatcacgcaggccttcgatgacggccagacgatccgcttcggtacgcagcggcgggctcattttggcatcggcattaaaaccgagcacctcttcttcggtcagcgcgaaatgatgcggtgcggcctcggtcgagactttcaggccttcggattttgcctgccgcaccagttctacagaccctttgcaggaaacatgcgcaacgtgataccgcgcatcgacaagacgggtaagcatgatatcgcgtgccaccatgtcatcttcgccttcgctgggcatgccatcgacgccaagttgcgttgaaattcgcccttcgttaatgcaaccgccttcggttagttgcaaatcctcggcatgctgaataagcaaaaaatcgaagctggacgcgtattcgagtgctttgcgcatcacgccgccatgccacaccggcatgccgtcgtcggaaaaagcaacggctccggcgcgtgccagttcacgcatttcagtcagttctttaccgtcgagatttttggtgaccgcgccaatcggatgcaaatgacacaacccgacctgattggcacgttcgataatctggcgaatcacaccggcatgatcgaggcgcggcatggtattcggcatgcaacacatcgaagtgacaccgccagccactgcagcgcgtgaacccgattcaatatcttccttccactcctgccccggttcgcgcagatgcacatgcatgtcgataagaccgggacaaacaacttgcccggtggcatcaatggtgtttgatgcgccattgagagcctccccaatagcggcaattttgccatctataaccagcacatcagcgatttcatcacgttcattggccggatcaacaacccgaccgccgcgtattaaaatatccgtcataacagccgccccgtcaccatcccgtttatcataacaatttcccctgcgcctgcatcgccgcctctgcctgtttgcggcgtttgcttcgcgcctgcggttgcggactgctgccgcataattcggtcagcacggccatgcggattgcaacgccatgctccacttgatcaaggatatgactacgcgctgaatcagcgacttcggaagcgatttccacaccacggttcatcggacccggatgcatgaccagacaatcatcacctgccttggccagtcgtgccgcattaagaccataggcttcgtggtattcccggatggaaggaaagcagcaatttgaagtcagacgttcgctctgcatgcgcagcatatataacacatcggagccgggaatagcggcatcgaagttgtgaaagacctcgcatccgaattgctcaatgcctctcggcaatagcgttttcggcgcaaccaagcgcactttataatccagttttttcgccgccagaagatgcgaacgcgccactctggaatgcgcaatgtcaccgacgatggtcatggttttcccgctcaccccacccgcctttgtttgcaacgtgagcaggtcggtgagcacctgtgtcgggtgctcgtgcgcaccgtcaccggcattaacaatggatgtatccggcaaaaaatcagcgagaaattcgcaagcgccggaaatcgaatggcgaatcaccagcacgtgcggttgcatggcagccagcgtttcaccggtatcaagcagtgtttcacctttttttgtggcactggtcgaagctgaaatgttaatcacgtcggcggaaagccgtttgccggcgatttcaaaactggtacgcgtgcgtgtcgaattctcaaaaaacagattaatcaccgtcttgccgcgtagcgtcggcgctttttttaccggacggcgggatagctcaataaaggattcaccgagctgcaccagatgctcaatctgctcgcgcgacagctgtgcgatgccaaataaatgttgaaaaggagcactcataatttcaccctcatctgttcaatcaaccatgcaccatcggttaaaagtttaaccgaacagtcggcatcggtagcgtgaatgaggccggttaaatcagcacttatcggcaactggcgaccaccgcgatcaagcagcaccgccagcgaaatacgcgccggacgaccataatcaaataattcaccgagtgcggcacgaatggtgcgtccggtgtacagcacgtcatccaccagccaaacatgcttgccgctaatatcaaagggtaaatgacttggacgcacttcgggattcgcgcctagagtatccaaatcatcacgataaaaactgatgtcgagattgccacgttccacttgcgctccggcagcttcaagacgctgttgaatcgcatcggcaacacgcgcaccaccacgttcaatgccgatgatgataatcggttcggcgtgtatatctttggagtgtatgtctttggcatgcagacattcagcgcgcatgtgtgcggtcatgttagccaatgccgtctgcacagcacgggtatcgaaaataatatcaggcatacgcggctccgttactcaattcgggatgtgcggcaagaaaatcttcaagaatgaccgccgccgccgtctggtcgattttctcgcggactttcttttcgttcaatccctgagcatacaagcgctcttttgccgcccacgacgacaagcgttcatcctgcatgaccatcggcaacgttgtcagttgggcaagctcggcagccgcagcgcggcaatcttccgcctgcgcaccttcgctgccatccatattgcgcggcagtccgataacaatgccattgcagccatattcagcggccagtttgagcgcctgctttggccagttctgatccttacggaacagacagctcacgccgcgaacggagattgccagcttgtcgcaaacggctgtgccgatgcgtttgccgccaatatcgagcgccaacagcggtagtgctaggggtgtttgagaggagaaatcagtagttgagcaggatgtgactgtcatcaaaaccgagattgtgcagcgtttcgcggcaagcgtccaccattgtgttcattccggccagacaggcaaccgcattttcacccggaggcgcatcccgttttaactcgtcctgcacataaccgatggggccatcccatgagccactactgctggttaccgatacgctaacctgaatgtcgtgcgcagccagagactccagttcatcggtgagcagacgatggcagggggtgagaaaaccgcaataaatagaaacttttccgtagcgttcgcgatgaggaatcaaatgtcgccacacactacgcagtggtgcaacgccggttcccacaccaatcagataaagatcgcagcctgcgaacggtgtcagttcgaagccgtgcccgattggcccctccacttcgacggtcgcacccgattcaagcgtcgatagcaggtgagcaatgcccggacgttgcttgataacaaactcaaagacaccattattttccggttcagaagcaattgcaaaatatcccggttgcggctctttcaatccgggcaggccaatccgggcaatctggccgggaacaaaagacggcagtctatcaccggaagcgggtgcaagcgcgaggtgaatcaccgtctcatcgcactcgggactgttcagcttctccgaagctttgacgcgcatcaaatatggaagagtattcgacaaattagtcctcgctcacgcatcacctgcgtgcagcacattgcagcggagaggtacaagatgcaagacatcatttcagaaaacacagcatggcttgaattgcgcgtgccggaaaatgccgttggcgaagctgactttgtacagatgtgcgcgcatctggatgccacaggccacgctttgcaaaccgatgcaaaatcggcaatcggcgaacatgtcgcgtggtttacaacaggcccggacatacgcgaaacccgcgcacgcattgccgccgcagccatgcttcttggtgtgcagaacaaagatatttcgctcgctgaaatcggtgatgactgggaaactgcatggcaacgtgactggcacggcatgccggttggtgatcgtttgtgggttcgcccgtcattctgcaaagcagcccccgagggccgcattgatatagtactcgaccccggcatggcgttcggaacaggacagcacgccaccactcaactctgtctgcgcgccatcgagcgtgtttgcaaacaacacgcgccaaaaaccatgctcgatatgggtgcgggatcagggctgctggcgattgccgctgcaaagctcggcgcgaaagtcattctggccattgatagcgatccaatctcggtcgaagccagccgtattaatgccggtatcaatgacatcacgcttgaatctctgctcggcgatgttcccccacagcaaagtttcgaactggtcgccgccaacatccttgccggtcccctaatcgacatggccccggcccttgcacaatgcgtcggccaacgcctcgtcctctccggtctgttaagcgaacaaaccgaaaccgtcaccgccgcctacctcgccgccggtctgaaattcgcacgcaccgataccatgaacgaatgggtctcagtggagttcgttccgtaggtaaggccggattttggaatatgcgcaaccgtccataaaggacactcacgtaaaaagaaaaagcccccgaatgcgagggctatggttgcttgaaagcagtgcctacgaaaaatttatttcattggtatgaaaagacttcgaggcattcgttagatacaatggtttaatcatagctcttctgctacggtttctgcaagctttttatgtgggggataacgatgaagaaagttcttggcttagatttagggagtaattccattggttgggcattgctcgaagaaaaagatgggaaagcacatcgtattatcgacttgggtagccgaatatttaccaaagctgtcgaggaaaaaacacctacaccaaaaaatgtaaagcgacgagataaaagacttgcacgcagagtgctgcagcgtagagcacgccgcaaacagcgaatgctgaactatttagcatcactggatttattacctacaaaactcaagggacataaccaacctgaaattgttttgaatccactgggcgacccttacgaattacgtgcaaaagctttggacactccgcttgcgccccatgaacttggccgcgtattgttgcatttggttcagcgcagaggctttttaagcaatcgcaaaacactgttaagcgacatgatggatgatcctgatgttttatctgtgctgaatgaactggatgcacaagacgaacatgatgatacaacagaaaaagccaaagaagaaacagcattcaaaaaagacatcagcgaacttcgcaacaaaattaacgccgcgcattgccgcaccttgggggagtacctttcaaaacttccccgccatacagccaaacgcaaccgaatacgcaatggcgggcacttacgtacggacaggcagatgtaccaagaggaattggatctaatctgggcagaacagaaaaagcaccatgcgatgcttactgcaaacgtaaaagagcagattgagcggattattttctttcaacgtccgctaaaacttaaagaagatcgcgtgggtaaatgttcgcttgaaccacggaataaacgtgcgcaaatcgcccgattggaataccagaagtttcgttatctgcaagacatcaacaatctgcaatatctcgacttttttgaggataagtgggttgcgttaaacgatggacaaaaagaagtattaaagcctctgtttgagagcaaaatatccgtcaccttttccaatatccgcacaaagttgaaactggataaaagcactgaattcaatctggagcacggcaataaaaaactcaaaggtaatattacggcatgtgaaatgaggaaggcgttgccgcaatggaatgatttaagccctgatgatcaattggcattggttgaagatgtgttgaccatgcataaaaaatccgcattgaaaacccgcttaatgaaccattggagccttgatgcccgaactgcggtaaacttatgccttttggaatttgagccggggtatggcagccattcactgaaagcaattcataagcttttaccatttttgaagaagggtgaaatctattcagaagcacggcaaaaagcaggctatggctatgagcaggaagacgaagacactattgaccgtctcggcatgccgccagaaatacccaaccccatcgtaagtaagggactacatgaattgcggcgtgtggtgaatgccattattgctaaatacggaaaaccggacaaaattcgcattgaaatggcgcgcgatctggaaatgaataccaaacgatacaaggcatttgaaaaacaacaaaaagccaataccgatgcaaataaggatgcaaccaaactttatcaggaaatgggcaaaaaatacccgcatttgcatctatccaaatatcccagccatgcagataagatcaaatatagactatggaaagatcagcaggcgctttgtgcttatagccttcaaggcatgaaaatttcggatgcggagttgtttagcgctaacatcgaaattgaccacatccttccctatagccagtcgcttgatgattcgtacatgaataaagttgtctgccatacacgggaaaatcgtgtcaaaggccagcgcacaccaattgatgcctttggttcggatgaggatagatggcaacagatttccgggcgttttaataagtggaatagaaacctaaaatccaagaaaaaccgattttatatgactgctgaagatgtgcagaaacgcgattttatcaacagccaactgaatgatacccgttatatctccaaagtagctctggaatatctcaaaccgctgggtgcagatataaatgtaaccaagggaattatgaccagttggctgcgccaccaatggaacttaaatagcctgattggacaggataaaaagaataaagatcgcgtagatcatcggcatcacacgattgatgcagtggtgacggcctgtattgaccggactttttatcaggcattagtgaagttggcgaaagacttggaaaaagaaaaaagccaattcacgcctaaagatattcatacagataccccgtggccaaatctccgcaatgatctgaatgaagcgcttgaaaatatgattgtgtcgcatgctcctcaacgcaagataacaggtagcctgaacgaagagacaggtgccggttttattgagggtgtgggcacagtgtaccgcgccaacctttcgcctgatttcaaattatcgcaagtaaaaaagattattgattctgaagtgcgagagcttatcgccaagcattttctagcttatgacaacgacccgaaaaaagcatttgcagaagggatcaccgtttatcataaagatggcaaaacaccaatcaaacgcgtgcgtatcgtgcagtccaaaacaacgcacaaaaaacttgaatccacgaaatttggcgtaaaagataaacaagggaatgtctttcgctggatggcatacggcaacatgcatcatgttgaaatcgtgcaacataaagaaactggaacctataaagggatatttatcaccatgatggaggctcatcgcagagccatgacaggcacaaaatcggcaagaaaaagggacgtgcgattcgagcctatggtgatgacagatcatggtgaagacattcgattcatcatggctttgcacatcaatgatttggtaagcattgagactgatgatggcgagaggttttatcgagttcaaacattagatagcttcaataaaagagtttatttaaggctacatacagctagcacaattgctaacgacagtgaaacgcttcctgacagggaattgacagtcatggctttgataaaaaaaggtatgaaactgcaccgaatgaatgcgataggaaaggtgatggatgattaaacgcattatcgaaatatcgactgcgcccgcctatatctcggtgaaacacttgcaactggtgctaaagcgggagggtgatgaaatggcaagcattccaattgaagatataggtgtgctgatcgtcgatcatccgggttgcacctatagccatgctgcattgaatgaactgcttgccaataatgttgcggtcatcatttgcggtaaaaatcatcatcctaatggcctactattgccactggatgcgaattctttgcaatccgaacgattccgtgtgcaggtcgcagccaaggagcctgctaaaaaacggctatggaagcagcttgtgcaggccaaaatcaagcatcaggcatggtgtctggatcaatgtgaatgcgaaggcggtgatggacttcgttttctggccggaaaggtgaaatccggtgatgtgggaaatcatgaagcgcaggctgccgcacgatattggaagcttttgttggggggtgatttccgccggaatcgggatggtttaccacccaacggtatgctcaattatggctatacggtacttcgggcggcggtcgcccgtgcattgtgtagcggtggtctgcacccgtcttttggcctacatcatcacaatcgctataatgcctatccgctggcagatgatgtcatggagccgtttcgcccgcttattgaccgggaggtgttcgacttctggcgaaagggagagacaagcgtcgcgcccgaactgaaacagtccctactcggcatattgtctcaagacgtgtttctggctggcgagaaacgtcctttgatgaatgctctgcattttttatcggcaaatttattacgcgcattagccggggatgatccgtgtttgattattccaacgcctgattagtggccgtcgcggcatttggtgggtttcgttcagtgtggattattgccatgtttgatctccccaccgacagcaaggctgcacggaaacattatacactattccgcagaactcttttgaaagacggctttggcatgatgcaatattcagtgtatattaggcattgcgccagtgaagaaaatgccacggtgcattttgatcgggttaaaaaatcattaccaccagatggcgaggtacgtttgatccaaattacagacaaacaattcggtagaatggaggtgttttatggaaaacgacgcaaaaaaaccgaacaaacacctgcccagattgagcttttctaaagctgtttcatcaaacaagaaaggctggatttctccagcctttcaagcacttacagacaaggtattgtatctaacgaatgcctaaagccaaatc

SEQ ID NO: 680 - DNA, 14451 bp, synthetic construct
  misc_feature 1..14451: note = Synthetic
  source 1..14451: mol_type = other DNA
aaccgcttccgccccttgctctaaacaatacgacttaatggcggctaatgttatgccttcgtccaggacatcgtcgattatcaggatagtcctggattgcaaaggtgtcgccggttttaacacccattcgattgcgccgccggaagtttggttttgataacggctggcgttgatggaatcgatcgtcaacggcatcgtcaggcgcggaattaacatacccgccgcaatgatcccgccgttcaagacgcataacaccaaggggttgctgtttttcaactcaacattaataccggcagccatgctatccagcgctgcttcgacttggcttcggctgtatattaactcggctgacgtctgtacttgttgtatttccttaagcataccgggataccagctccgtgataaggtttgatgattcttgccattttgcgctgcgcattaatgtctctctatccatagcaggcttgccgcgcattattgcaagacgttgttcccttagaggattgtttttaaccggcaaggactcaagcacggcttcggcggcaaccggattattgcacaccagcagcatgtcgcagcctgcgtcttgcgccagccgggcgcgctccggatagccgcctgccaccgcagcgccttccatgcttaagtcgtcgctgaataccacgccgttaaagcctagctccttcctcaatacttgctgtatccaaaacgaggaaaaaccggcgggattcgggtcgatagccttgtagatcacatgcgccggcataatggcttccaaaccttcttcgataagcgccttaaacggcagcaaatccttgacgcgaagcgtagccaaatcccgttcgtcaaccggcaaagccagatgggaatccgccgccacaccgccgtgtccgggaaaatgttttccggtggccgccatgccggcagcattcatgcctttgcggaattgacttgccaaggctgtcgcgcgctcgcattcagtagagaaagaccggttaccaatcacctggctgataccgcaatcgacatccagcaccggcgcgaaactgaaatccacgccgaccgccaatagttccgccgccatcagccagcctgcggtttccgccaattccggcgcatccgcataacaacaagcgggcggcaggcgggtaaacccgttttggaaacgctgcacccggccgccctcctggtctacggcaatcaaaatccggccgttgcgggctacgcgaatctccgcaattagccgggttatctgttccggatcggaataattccgcgcaaaaagaattaccgccccggtattcggatgattgatgatgtctttctcgtgcggcgttaaggtcagtcccgccacatcaagcatcaccgggcctaagagataatcagtcgtcattgttgagatatcgatcgcgaaagaaagcttaattccattttaaagtgcgcttatactaaagtatctgttgttagtttgcagctaaaagatcgtttgctgcgagcaggattgatgactatgaactggcaaaatattgtagaacagatcgaaatagccacgggatcgccgtttcaattagcgaatgcgcaacctcttgcgggcggggacatcaactctgcttattgcctgcaaggccaaaaccggtcttatttcatcaaactgaaccgcccggaaacatccgctatgtttgccgccgaagcggaaggcttaatcgaactggcaaagagcaagacagtgcgggttccagcgcctgtcgttcatcgcagtacagaacaacacgcttatttggtgctggagttcatcgaattcggctccggcggaaaaacctcccagagcctgctcggccaacaattggccttactacaccaacaacatcaacctttttacggctggcgctgcgataacaacatcggcagtacgccgcaaccgaataaccggtcggacgattggcttgaattctggcggattcaccggttacagcaccaacttcacttagcggctacgaaaggctatcgcggtcatttgcaaaccagcggcgaacagctatgtcaccggcttgccggatttttcgacggctaccggccgcatccgtcgctgctgcacggcgacttatggggcggcaatgccgcaacggaccggcacggcaatccggtcgttttcgatcccgcctgttattacggcgaccgcgaagccgacctcgccatgaccgaattattcggcggcttcagtccggattttaacgccgcttaccgggaaacctatcctcttgatcaaggtttcgccgtaagaaagaaactttacaacctgtatcacattcttaatcacttgaacttgttcggcagcggttatctgcggcaagccgaagctatgatctccggcttattaagcgagattagataatctgggccgctaccgccggtccactgaaaacgcacgaacgttactgttgtattcaatgcattattcgattatgcggcggcgcttcctagcggacatgtccaatataggtttatatagagtgtatactttcgaacctttgagaatatattatcgatccggttttatgatgttataactttaattctcgtaaccttaagcccgctatacccttttgtccactaacggttaaaccatcataaagccgggtcgaggcttgatttttattatcaattttgaattaatcaaagcattttttatatagatcatgagtcagcaaacgctttcaaacgaaaaactcgatatcaaccaagtcttggattggctagccgaagacgccatattatcgcccgaacatttagaaaaatgccggcaacaaggcgcattcagcatcaataaagataaacatccgcttaaaatcgtcgccgaagcaggcgtccaagacaaaacccagatgggtaagattctgactttggagaatttaaccttatggttgtccggaaaagtaaacctgccctattactacatcgatccgttaaagatcgatattcccacggtaacaacgctttatagtaagaattacgcgctgaattacaacatcctgccggtgatgttcagcaacaacgaaattgtcatcgccaccgccgaacctttcgtacgcatttgggaagccgatttgttccggatgcataaatgcgcaatcaaacgggttgtggcgaatccggacgatatcggccgttatttgggcgaattttattcattcgccaaatcgctaaaaggcgcggcgcaagcgcgcagcgaatctaaaggtacgggcaatatccaaaatttcgagcaattgctagaactcagcaaaaccagcgacctcgacgccaacaaccagcacatcgtcaatttagtgaactggctgctgcaatacgccttcgatcaacgcgccagcgatattcacatagaaccgcgccgcgacaaaggcaatgtccgcttccgcatcgacggtattttgcataacgtctatcaactgccccagcagatcatgaacgccgttctcaaccgcttgaaaatcctgggccggatgaacattgcggaaaaacgcctcccgcaagacggccgggtcaaaacccaaaacaatctcaaaaaggagatcgaactgcgcttatccaccatgccgaccgccttcggggaaaaactggttatgcggattttcgaccctgaagtgttgatgcgtaatttcgaggaactcggcttcaacaaacgcgaattggatttgtggaacaagatgtcgtcgatgtcgcacggcatcattctggtaaccggaccgacgggatcaggcaaaaccaccaccctttactccaccttaaaaaaactggccacgccggaagtcaatttatgcaccgttgaagacccgatcgaacaaatcgaaggcagcttcaaccaaatgcaagtgcaaccgaacatcggcctggatttcgccagcggcatccgcactttaatgcggcaagatcccgatattatcatggtcggcgagatccgcgacctgcaaaccgccgaaatggcggtgcaggcctcgttaaccggacatctggtcttatcgaccttgcatacgaataatgcgcccgctgcaattacccggttaatgaacctcggcatgcccgcttaccttatccagcaaactatcgtaggcgtcatggcgcaacgtttgattcgcaccttatgtaagcattgcaaacaagcgcgcgacattagcgaagcggaatggcagtcgctggttgcacccttcaaagcgcctaaaccggataaaatttaccatgccgcaggctgtctcgaatgccggaataccggttatctaggccggatcggcatctatgaaatttttgaaaatacgccaaccctgcaaaaactcattattgacggctgcgacagcgatgttttgcaaaaacaggcttgcatcgaaggcatgcgccctttgcgtttaagcggcgccgaaaaagtcgcaaaaggcttaacgacgatagaagaagtgttacgggttgcgcctgaaggccttaattagaatcgacaaaaatataaactctaaaaaacttccccttttagggaatctctaaaaaattttctcaatattataaaatagactaattggttaagctaaaaactctataaacgaagctagaaattcttccgcctaaccaaatcagacccatacttttaaaaactcctatgaccagactcgacaatcaaagattgactttggccgcaccctgaatctgtgccttctaaagaaccgctcatcgctcgtcttgaccttcatccatgacggttttgtgtttcagtctaaacaaagccgaaatatcctcttcgccgaaatctgccgtcatcaagttttcataatcggcgatcgttaattcggcgaccggcaacggaatattaatcgactgcgccattgcccggcagatcaataaatccttatggtgcagcgccaatttaaaaccaggcgcgaaagtaccattaatcatcgtattgccgcgccggtctaaaaaccagttgcctgcggcgccggctgaaaccacttcaatcaccttcgccattggcaaaccttgggcttgtccgaaggctaaggcttcagtgacggcttggttaatgcccgcacacatgatttgattgacggctttcgtggactgcccggcgccggtcgcacccatgtaagttatgcgcgccgccatgcttgatagtaccggtctgacacgatccagaacgatttcatcaccgcctaccatcatggataaagcaccgcttttagcgccttcgaccccgcccgagaccggcgcatccaggaaagaggcctgttttacggccaataaagcggcggctgtcctggcggtttcgctgctgaccgtcgacatgtccacaacgaccgagccgggtttaacggtcctgctgacggcgtcgaccatttccagcacatcctgatcggcggagacgcagagcaaaatcaattcggcttgctcagccacctcttccggacgaaggcacactttaactttgaactcttgcgccaaatcgacggctttgctcgcggtacggttatacacagccgttaacaatccccgtgcggcaacgcgccttgccatccattgccccatgccgcctaaacctataaaccctgttttcattttactttcccgtttacctcttactgattcaaagaaatgctccggccttatgaagctttaattgcctgcctatcggatagcttatgcgtttcggttcgctcagcttctttgacctttaggctacaagcgccctttgggtacgaacggttaaacatcaaagcgccggatcgataataaacagaatctaaccactttcttacaccttggcaaattccgattggttgatggttaaaaaataaccgggtttgcatctaaacaccaacgacagccgtataccagttgtattcatcaacaaaccacgaggatatcgctatgattcaccaactgtttaaaccaaccctgctcgcgtccgcactgttaactgtgtttaccggtacgatagctcatgcagccaatcaccgcgaagcgcctttgacagcgctggaccaaaaagccgacatcaccgatttttttgccttcgccagttacgacaatgccgataaagtgacccttatcctaaatgttgaccccttgctggaaccgtcgaacggacctaattactttcccttcgatccggaaatcgtctacaccatacgggtcgataacgaccatgacgccgtggaagacatcgtgttcgagttccgttataaaaccgaagtccgtttgcctaatgtttttaccggctttgtcggcgccggcgcaggtatcggtgcgcccgataactcgccgccgcccatcgtccccggaacgccgattgtgccgcccgctatcacggcattgaacggaccgggatcggaaggcttaagtctgcgccagaattttgtggtggcggttaaaaaaagacaagggaaagactttaaaaccattctttttaaagataaagacgttaacggcaagccgttattcgccgtgccgtccaatgtaggttcgcgcaccatgccggattatccggctttagccagccaaggtatctacgaggtcggcaaaggcgtcaaagtcttttccggcacggctgacgatccgttctggatcgatttaggcgcggcgttcgattcgttgaatttcagggaagccgtcgctcccggcgtattaaccgaagctcaagataaagcggaagttaatgtagctgcggacgatgtcgcggggtacaacgtgaatacgatcgctattgaagttcctaaaagcctgctcaccaaagacgggaaagcgtatccggcaaccgatgcgttagccgtcatcggcacatggggtgcaacctataggcatcaggaaaaaagatattcgaaaataccgggcaaaaaagccaggctttcggaagaactggtgcaaattcagcgcatgggcaaccccttattcaacgagttgattataggcaccggttttaaagataaattcagtatgagcaaacccaaggacgatgctcaattcgccgatttcgccctcgaccccttattagccagagtgttgaatgcggtaacgggcggcaaactggaaatccctgccccgccccgtaaggatctattgcctctggtgcaataccgcgcacccatctgtccgggctgtgacacaccagaaagccaaggaccggtcgcggatttactccggctgaataccgccattccggctacaccggttgagaaacgcaaccgcttaggcgcgattgcgggcgatttaggcggatttcccaatggccgcagagtgtatgacgatgtattcgatattgcaggacgtgccgttgccggcgtactggcaggcgaaccctttgccagttcgccattgaacagccgtatcggagacggggttaatgtcaacgacgtgccttatcaagaaacattcccgtatcttggctgggcgcaaagcggacgcgatagccgccatatcgacccaggcgaacccggctgtaccgctaacaccggtttggattgtgcgttataagtagctcctcgaacgggagccagccggatacttgggctgtgctccttttttggatttacgttgaggagccgccatgaagatgatgatgttgttaataattacagggttgatactacaaagcccttgcgcgagaaccgaaccctacacgcctgcatctgataccgaaatcctggaacggctgccggtagctgcccacggcaaacaaacgctgcaggagctacggagcaagctcactcgacagccggacgattaccggcttgcgcttaacttagcacgggcttacattacgtcgggcagaacctattccgacccgcgtttttacggttatgccgaagccgtcttgacgccgtggttaacacggccttataaccggcccgatgcactggtgttacgggcgacgatcttgcaaaaccgccatgattttcaagcagcgttagctgatctcaacagcgcattaaaactcaatccgcgtctgccgcaagcctggttgacgcaggccgcaatctacgaagtccaaggcgattaccccgccgcactgcgaagctgcatggctttggcgcgatattcggcctcatcatcagcggcggcttgcatccattcttccttgagcctatccgggcaagctcaatcttcttaccagcaacttaccgcaatcgttagcgatcaaggcaatcccgaagaactcacttggacttataccttactggcggaattagccgaacgcttgagtctggaacaagacgctgaaagctggtatcgaaaagcgctcggccaacagcaacggagcgtctatttattgaccagttacgccgacttcttattggatcgcaaccgttgcggagaagttgtcgaacttctggcaaaagaaagccaagccgacgcgctcctgttaagactgacgttagcggaacagcgcttgcgcttaaaatcattcaacggccacagggaccttatccaagaccggatagccgcagcaaaagccaggggcgataccgtacatcagggcgatgaagcacgtttcaacctgtacgtgctcaataacgcgcaaaccgctcttgaactggccgcccgtaattggcttgttcagaaagaaccgcgcgatgcccgtatcctgctggaagcggcattggcagcaaaacaacccgaagcggcgttgccggtcatccggttcatcgagcaaacccggctggaagacgccagattatcgcctttattgcaaacggcgcgaggttaaatcatgaaacgattgttctgtttgttgttatacgtttggtgttcgatagcttcggcccacaaacccagcgatagttatttaacgcttactatagacagcaatcgcgtatcgggacgctgggatattgccctgcgcgatctcgatttcgccataggactggataacaacggggatagcgccatcacatggggcgaactgcgttcgaaagccgccgagctgagccaatacgcattttccaggcttaagcttaacgacgcaaacaccgcttgttcgcaccgggagaccaatctgatgatcgatgaacatacggacggtaaatacgtcgtgttaatcttcgaaagcgattgcagcttagcgcccataggaaaactgggcgtcgattaccgcttatttgccaaactagacccgcaacatcgcggattactaaaactgaatcaaaacaacataagcaaaacggctgtgctggtcccgggcgaggccgccagaatattcgaaatatcgtccggcaaacaatccggcgcggaactcttggatttcataagcgaaggcgtccgccatatctggatcggattcgaccatatcctgttcctgttcagtttattgataccttcggtcatggtttaccaatggccgcggtggcgccccgcgccatcctttaaagacgccttacgcgatgtcgtcaacgtcgtcaccgccttcactctggcgcattcgattaccctcagcgctgcggtgttaggttacgtcgaattaccgtcccgctgggtggaatccgttatcgccgtttcagtagtcttagccgcgctgaacaatctcatcccgctgttcacagcaaaacgcgcactactggccttcgctttcggactcattcacggtttcggttttgccggcgtcttagccggtttggatttagaagaccattcaaaattatggagtttactaggctttaacctaggcgttgaaatcggtcaaattgcgctggttctggtatttctacccatcgcctacaaactcagccggtaccgcttttatcaagctgtcgtccttaaatcttgctcgatcggaatagctggcttagcttgtgtttgggttttagagcgggcgtttgagatatcggtgaggatttgaatccaccaaagaaaaaagagtaggttcacgaaaaagcaacgtgcaataaaaaacccccgtcggctattaacctcgtgagggcttgggtcgcttgaaggcggagcctacggaaaaaatcattccattggtatgaaaagcaagacaataggctatagttggttacattatgcaactgattatagacgaaggtttggaatgagcaagaaaattttagggctggatttgggcagtaactctatcggttgggcgctactggaagaacacaacggaaaacccggcaaaatcattggattaggcagtcgaatctttaccaaatcggtcgaagaaaaaacaccgacacccaaaaatgtaaaacggcggaatgcgcgtttaacacggcggattttacaacgccgcgccagacgtaaactacggatgttgaattatttgatctcgctcaagcttttgccgcaagaactaacggacaatccgtcgcccgaaatcatcctcaacacgctgggtaatccgtatcaattaagggcgaaagccttggattaccctttgcaacccttcgaactaggccgcgtattactgcatcttgtccaacggcgcggatttctcagcaaccggaaaacattgttgggcgacatggcggacgatcctgatgtgttggaggttttagcagagttggaaggcgaagacgacaacggttccgaacgcgccaaggaagaaaccgctttcaaagccgacatcagcaaactaaaaagcaccattgccgaatccggcaaacgcaccttaggcgaatatctcgcctcgttagatcatcacgactgtaaacgcaaccgtaaaaccgatggcggacatctacgcaccgaccggcaaatgtaccgggatgaactggacttgatctggcggcaacaaaaacaacatcatcctgtgttgacggatacggtaaaggaagaaattgaaacaatcattttttaccagcgcccgttaaaacttcgcgccgaccgtatcggtcaatgctcgctcgaacccgccaaaacccgcacccgcattgcaaggctggaaagccagcgtttccgatatttgcaagacatcaacaacttgcaatattttgatccatatagcgacacttacgtaacagtcaatgaaaacgataagcaaaaattggtaaaactgttcgagaccacagaaaccatcagttttgccgccatccgtaaagcactgggtttcggcaaaaattacgaatttaacttggaaaccggcaacaaaaaactcaaaggtaatatcactgcctgcgaaatccgcaaacaactgcctacctgggatacgtttggtgatgccaaacaacgtgacttggtggaagatctagttaccattaccaaaaaatcggtgctgaaaaaaaggctgatggtgcattggagattcgatgccgccacctccgtgcaactgtgtttattggaattcgagccggggcatagcaacttaagtctaaaagccatcaacaagctactgccttttctgcaacaagggcaaatttattccgatgcccgtatcagcgcgggttatggctatgaagtgaaagaaatcacggttaaagagaagcttggtacaccgcccgaactgcctaaccctatcgtcaaaaaagccttgcatgaactgcggcggctgattaatgccatcatcgccgaatacggcaaacccgacgccatccgcattgagatggcgcgggatttggagatgaataccaaacgctaccaagacttcatcaagcaacagggcaaaaacaccaaagccaacgatgaagcagaggaaaaatataagcaacaagcgcaactcagtccacatttaaagctgtcgaaataccccagtaaacccgacaagctcaaataccgcttgtggcaagaccaaaaacaactgtgcgcctacagcggcaagacgattagcctatcggaactgttcagcgcaaatattgaaatcgaccatatctggccttacagcctgtcgctggacgattcttatatgaacaaagtcgtctgttatgtgaaagaaaaccgcaacaaaggccaacgcacgccagttgatgcttttggcggcgaacagtggaaccaaattacccaagcgatcaaccgatgggacaggccgttaaaatccaaacgtgaccgttttttcaccccgacagccgaattgcaacagcgcgatttcatcaacaaccagctaaacgacacccgctacataagcaaagtggcgcaaacttatcttaaagagctcggcgctgacatcaacgtcagcaaaggcgcgacgaccgcatggctacgccatatctggggcttgaatgatttaatcggcgaaaccgataaaaaagaacgcaccgaccaccgccaccatgccatcgacgccttagtaatcgcctgtatcaatcgcagcctgtaccaagccctggtgaaaaccgcccaagatctggagcgcaaacaaaccgggctagacatgaaagacatggtgatcgacccaccctggcttaacttacgggaagacttagaccaaaaattaaaagaaatcatcatcgcccatgcaccgcaacttaaactcagcggcgaattgcatgaggtcacaggcgcaggttttatcgaaggtatcggcaacgtcaaccggaaagacctagatggcacttttactcaagtcgataaaattatcgactcgaccgtcaaggaaatcgtcgcccagcatctgcaagattacggcaacaacccgaaactggcgtttaccgaaggcgtgaaggtgctgcacaaagacggcaaaaccccgatcaaacgagttcgagtattacaatccaaaaccacgctggcgaaactggaaaagaccaaattcggcgcacgggataaacaaggcaaagtgttcaaatggctggcttacgggaatatgcaccatgtggaaatcatcaaaaataaggaaaccggcgcttattcagggcaattcgtcaccatgatggaagcctctcggcgcgtcaaaggtatcaacatgccgcgccaaccgattatcaaaaccgatcatggcgcggattatgactttgtgatggcgttgcatatcaacgacttggtgagtattgagaaggaaggcaagcgggtgttttatcgggtgcaaaagctcgattcaggaagcaatcgattcgtgctacgacttcataccacaacaacgcttgataataaaaatgaggaaatctatttcagtattaatgaaaactcatttgccacttggagattgcaaaaacactcaataaacgccatcggaaaaataattgaatgatcaaacgcaccatcgacatcagcgaacccgcctatttgcacctcaagcatcagcaattgctgatcgataaaaagggcgagaccatcgcgcaaatacccattgaagacatcggcacgttaatcttgcaacatccggcgattataatcacccaggcggcggtcatcacttgccaaaaacacaatgtcgccctggtgttttgtgatgaacgctacctgccttattcgctgttgttacccatcagcgacggcaacaacctgcatgccaaaatcttgaaacaacaaatcgccttaacactgcctactaagaaacggctctggagccaaatcgtcaagcaaaaaatcaccaaccaagcgaaaacgctcaaagctttcgacaagacctatcaaccgctggaacggctggctagtaaagttaaaaccggtgaccctgaaaacctggaagcccaggccgcgcaaaaatattggcggctactgtttggcgagcaattccggcgcgatactgagctggatggcatcaacagcttgttgaattacggttacgccattatgcgcgccatgattgcccgcgccatcgtcggcagcggtttgcatcccgcattgggcttgtaccatagcaaccagtacaatggcctgtgcttagcggatgacctgatggagccgttccggccttgggttgattttgaagtctatcggttggctattgacaatccacaaatccaagtcaataaagaaaccaagttgcctttactcaatctgttagccgaacccgtgcaatgggagcagcaaatcctgccgctcatggttgcctgccattattttctagcagttcttaaacgggcttttgaagacagcgcacttcagttaatctacccgcaacggcaaacccgacggtaacgatggcttttggcggattaaattcgatgtgggtcattgttctcttcgatttgccgaccgataccgccgaagcaagaaagcaatataccgtatttaggaaacatttattggaagacggctttataatgatgcaatattccgtttatatgcggcactgcgccagtgatgaaaatgcgttggttcacgccaagcgggtcaaagcgcggttgccgccggatggcgaagttcgtatcgtaaaaattaccgacaaacaatttggcaggattgaagttttttatggcaaaaaacgcagaaaaatcgaagaggcgccggagcaattgtcgcttttttaactgcaaaaacggcaattactccttttggaacagactcttgcaaaaaggccagtgtaaccaactatagcct

SEQ ID NO: 681 - DNA, 14438 bp, synthetic construct
  misc_feature 1..14438: note = Synthetic
  source 1..14438: mol_type = other DNA
atatttttttcaatagcccttgacttgcgcgatattaaagcccatactctaatccagcttgaaaataagatttaccctctgtttaccttttcgatgtatctgtgttgtttctcgtccggtttttcaaagtaatctcccatttttaccagctccatcagccctagggctttatttatctttacaatttataggacttatcatgtctactaccaccggcgtcgtcaaatggtttaactctgaaaaaggttttggctttattgagcaaaaatctggcccggatgttttcgtacatttcagaaacatcaataactcaggcggctacaaatctttagacgaaggccaaaatgttcagtttacagtgacccaaggccaaaaaggcccgcaagcagaaaacgtcactgttatctaaatagccttctaaaaaacccgctgttgatgccggattgtccggtgttggcagcgggttttttgttgtctagaatttggtaagcgtttaagatggatataaagatgcgggcaattgattgaagtaggtaatcacttttaggagattcatgaacagcttctttgagaggctaacaacaataagcccccggctttgccgggcgtgatttaactgtggcttaagctcagaatataaacagcgattcattaagcttgtttgttgagttcgtttcttttatgaccttgggtactccctaacgcgttagattaaaaattcggaaagaatatgccacctccatgttatcaaatgatgctagaactatccaaaaccgatgaaacgatacggtctgctattaaatcctgttatccccgttcatgggatgaaaatcatataacttacacatggctttctaaacttcgtgaaactccaccgaaaattatttttactaagacgccaaaaattagcgtaatttgggacgcgtacaaaatgaccggacaactcgaacgcgccaacggagatgttgcatttatcgtaaaagtctcatttaacaatggcaatgcaatcgcaggggttgcctttcttgaagcaaaacgaatttatgaagatggaaattatgacgcgctaaaatatgaacagcttgagtatataacttataacaaaacacatcaccatatcttgctctatgattttaatgaaacacttaagccctcgtattatagttgctgctgggattacccttgtgatagattcctatcaaaggaagctattggaattgttgtaccaactccccatgcccttgcatataaaacaaaaaaccgttcactagccactattggaatccgattatcagagcaaatatttttccgatacttcaagggattagatttaaattttgaccagaatcttgtagaaagcgtaaggaaaggtatcactggtgacgtacgttatctggcggtcgcgcatgtaattcttaataaggaaaccgaaattgaactgtcacttgatggaattcagccctatgaagctagtggttttcgacctatcaatgattaatggcctaaattctgttggcattttgccaatcactgcagtgggttggtgtgaggaaagaaccccaacaaaatcattatattaaacattatcttttgagtacgcgctattaatggcatgtggaaaaaatacatacacagtcaagttgagaagcaattgaaagcttgcccaatcgaagttcaaaaaaagtatgggaaatggaaggatgttatcgccctatcatctggctagcaagggctgatgctaatcaaagggttttctgatgaggcttttgttgacaagaatggaatcattcagcaatcaataggctaataaatgacctgttgggtatcgctaaaattagttgtaccgagagttgtaccgaaacgccatttttaagattcacaccaaagagccaatttataaccccttgaaaaagttggtcgggacgacaggatttgaacctgcgaccacttgtcccccagacaagtacgctaccaagctgcgctacgccccgataatagatgatggcttggtaagatttaccagcctaagatgttaaacggctaattatacaacagttgaactgtaatggtgctaattatttaaagccgttccttggccatttggctgtgttaccgtacttgtggtgtgctattgctctgcacccgaataattttctacccgcgctttgagtttttggccggagcggaaggtgaccacgcgtctggcggtgatggggatttcttcgcctgtttttgggtttctgccggggcggctgtttttgtcgcgtagctcaaacttgccaaaaccggatattttgacttgttcaccttgttctaaagagctttttatttcttcaaagaacaattctacaatttctttggcttcccgtttgtttaagcccagttcttcaaataaagtttcagcgaaatccgctttggttaatgccatagtttagtccctcagttttgcattaatggtaattgtcagttttgctaagattctgcttaggatagcctcaacttcagaatcggtgagcgtttgtgtgtcgtcttgtaaattaaggcttagggcgatgcttttgcagccctcttcaacacctttgccgcgatagatgtcaaacagggtgatcccttttagggtggcttcgtggctgctttttatgcagtcgataatgtcgtcggcagtgacgctttcggcaacaatcaacgcccagtcacggttgaccgccggatatttggacaggggtttaaatgccggtatgtttttttccagcaataggttttggtcgagttcgtacaagtacacttggctgtcaaagcctagttgcttttccaataacggatgcaacatgcctatgcaaccgatgcgctgaccggcggctgataagatttccgcactttgcccgggatgcagggcgggcagtgtcgcgggggcaaaagtggggctttgtccggtgagtttgaacagggcttcaatatcggctttaatatcaaagaagtctactttacggctggtcttgctccattgctcggggtaagcgctgcccaaagccaaacccgcgagcattttttgttgttgcaattcaccgttttctttaacaaagcgcaagccggtttcaaacaagcgcacgcgggtttgttggcggttggtgttatgcaatgccgcttttaacaggccgcaccataaagttgtccgcattaccgccaattctgatgaaatggggttttgtaggcgcaccacttcatcattaggggcaatggcttgttggatgtcttcgtcaacaaaactgtaggtgatggcttcttgatagcccctatcgaccagcaaatctttggcccgttccagatcggtgactgtttcggtagccagacccagtggggcatgcaacagcaaacggctgttgggcaggttgttgtagccatagatgcgggcgatttcttcgatcaagtcggcttctatgctgatgtcaaaacggaaaccaggcggtgtgacttgccagccatcagcttgttgcttaatcaccatgcccagccgctgtaaaatgcctgtgatggtgggttcgtcaagggtcacgcccagcagtttgctgatacgttgttttcttaggtgaatggcggggcgttgtggtaaatgttcggctgcctcgaaaccactgaatgtaccggcttcgccgcccgctatgtctaagatcagctgggtggcgcgttcaatggcgcgttcttgtagggtggcatccacgccacgttcaaaacggtgtgacgagtcggtatgtaaaccatagcggcgcgctttgccagcgatattgcgaggagtgaaaaaggcacattccaagaatacgttacgggtgctatctgatacggcagacgaactgccgcccattacgccagcaagtgccaaggcgtgttggtcgtcggctataactaaggtgtcggggtctaactggatagtttgcccgttcaataagaccagctcttcggccgcatgggcatagcgtacggtgataccgccgtttaattggtcggcatcaaacgcatggagcggttggcccagctctatcagcacatagttggtcacatcgacaattggccctaagctacggatgccggaacggcgcaggcgttctttcagccaggcaggtgtttcggcaaggacattgacgttgttgatcaggcggcctaggtaacgcggacacgcagcgggttcggtgacgttaacggcaagggtatcgctatggctgaccggagtggttgctattgcctgtgccgtccaaggcagttggtttaataccgccacttcacgggctatgccttccacgcttaagcaatcggcgcggttaggggtcaggtcaacttcgatcagtgagtcatttaaggcaagatagtcacggatatccacaccaaccggcgcgtcgtcgggcaattccattaagccgttggcttcggctgccagtcccaattctttttcggaacagagcatccctaacgattccacaccgcgcaatttggattttttaatgttgaaatcgccaggcaatttagcaccaaccaaggcagcaggtatttttagacccatgcgtacattgctggcaccacaaacaatttgcagcggttcggcagtgcctaccgccacttggcaaacgcgcaagcggtcggcatcggggtgttgttccaatgccaacacttgcccgaccaccacaccactaaaaaaagcggcggcaggttcgaccgaatcaacttccaagcccgccatagtcagttgtgcaaccagttgttcggtgtcgatgggtgggttaacggattcccgtaaccaagcttcgctaatttgcatgttccaattttccggcttaattgaattgttctaggaatttaaggtcattttcaaaaaataaccgcaagtcgttgatgccgtagcggagcatggcaaggcgttcgacccccatgccaaaggcaaaaccgctgtattgttcgctgtcgatgttgaccgatttgaacacttcagggtgaatcatgccgcaccccatcacttccaaccagccagtttgtccgcatacgcggcagcctgcaccgttgcacatcacacattctatatccacttcggcggacggttcggtgaacgggaagtaagacgggcggaaacgcacttggctgtctttttcaaaaaacgcccgcaaaaattcgtacagcacgccttttaaatcggcgaagctgacatcggtgtccaccaaaaaaccttccacttggtggaacatgggggtatgggtcaggtcggaatcgcaacggtagacgcgtccgggcgcgatcactttcagcggcggcttttgggcttccatagcgcggatttgcaccggagacgtgtgtgtcctgagcagggtatgcgcgtcaaagtagaaggtgtcatgcatggcccgtgccggatggtggtcggggatgttcaacgcgccgaaattatggtaatcatcttcaatttcagggccttcaaccgtttgaaagccgacactggcaaaaattttgttgatgcgcctcagggtggtggtgaccggatgcagacccgctatggattgcccgcgacccggcaagctgacatcaatgcgttcgctagccaaacgcgcggctagggcggcattttccagcaaggtctttttgtgttccaattgaccctgaaagctgtcacgcgcctggttgatcacctgcccgaccaagcgacgctgttctggctccaatcggcccagttctttcatttgtagcgtgaacaagccttttttgcccaaatagtggatgcggacttggtcaagttggtttaggtcttcggcttcggcaagcgctgccaatgcctgcgcgagaatctcttctggagtagcggacacgttttcgctcgcttaagttaagttggaatggacggtgcttaggctacagctgcctagcaaagatttgtattaagactaggcaaatgatccaggcattgctttttaatgccaacagggagcttttgcctagtcttgctgggtttttggcccagcaaaatgaaaaaccaccagccccaaggtcgaccctcgtgccggtggttcttttagcgcgtattattgcaatgggctttggttagctttggcaatctctgcgattttaccaaatgcttcaatatcacgcacggcaatatcggccaataccttacggtcaatgaccacgttggcgttagttaagccattgatcaaacggctgtaagaaataccaaattgacgggctgccgcattgatacggacaatccataaggcgcggaattgacgttttctttgtttgcggtcgcggtacgcatactggccagctttgatgacggcttgtttggcaacgcgataaacgcggctacgcgccccataatagcctttggcttgctttaatatttttttgtgccgcgctctggcggtgacaccacgttttactctaggcatgattgctccctaatcaactgtaaggcatcatgcgtaaggccatacgcacgtcagatggatgaatcgacattggcttgcgcagttgtctttttcttttagtggatttcttggtcaaaatatgacgcttgaaagaatgtccacacttaaaaccgccgttgcccgtgcgtctgaaacgcttggcagcaccacggttggtctttattttaggcatttgtttgctccaacgaataataaaaaaatccctgagaataacccagcaaggcaaaatgcatggccttgaaagattagcggcacgatggtgttgccaacgtgctacagccacatcctgtgctgtgcgtttaaaggcgggttgccgcctttattttttctttttgggagccataaccatgaccatttgtcggccttccaatttagggaattgctcaacaatagctatttcttccaaatctttttcaatacgctttagctgatccatacccaaatctttatgagccatttcccgaccacggtagcgcacggtgattttagttttgtcaccgtcattaaggaatttggtgaggcttctgagcttgacctgataatcgccttcgtcggtgcccggcctgaacttgatttccttgacttggatttgcttttgtttctttttggcaacttgcagttttttgttaagctcaaactggtatttgccataattcatcacccgacaaaccggagggtctgcattgggcgatatttccactaaatccaaatcggcagcataggcaatttgcttggcctcgtctaacgacataatgcctaatgattccccttctgcgcctgttaccctcacccgtctggcggtgatggtgtcgttcagacgaacttcatctttttttgcagcgatatcttaatcctccaatgcttgttgttttctgtctgcaatctcttgttttatcaggtgggtaaactcagtgattgacaggctacctaaatcttggcctttttgggtacgcacggtgatgcgttggctttccagttccttatcgccaaccaatagcagataaggtacgcgcaacatagaatgctcgcggattttaaacccgattttttcatttctcaagtcgattcttgccctgatgccagtcacttcaagttcccgcaggatagtgcgggcataatcggcatggcggtcggcaatagtcatgaccatgacttgcacaggcgccaaccaaactgggaaagtaccggcaaattgctcgatcaaaataccaataaagcgttccaacgaacccaagatggcgcggtgcaacatcaccggcacttgtttggagccgtcttcagcaatataagtagcgcccaagcggcctggcatggagaaatccacttggatagtgccgcattgccaaacccgtccgatacagtcttttaatgaaaactctattttagggccgtaaaacgcaccttcaccgggttgcaaatcccattgcaagcctttggtgtccaaggccagttgcagggcactttctgccttgtcccaaacgacatcgtcaccgacacggttttcagggcgggtggacagtttgatgatgatgtcatcaaagccaaaatctttgtaaacctcaaacaacaaatcaataaaggtcgccacttcctcttggatttgcgcttcggtacagaaaatatgggcatcgtcttggacgaaatttctgacccgcatcaggccgtgcaaagtgcctgatggttcattgcggtggcaagaaccaaactccgccaagcggatgggcaggtcgcggtagcttttgatgccttggttataaatttggatatggcaggggcagttcattggcttaatggcataatcacgattttccgaatgggtcgtgaaaatcatgctgccgaacttgtcccaatgcccagacttttcccataacgaacggtcaaccacttgcggggttttgacctcgccgtagccattaaggcgcaatttttcgcggatgtattgttccacttgttggtagatggcccaacctttttcgtgccagaacaccatgcccggcgcttcttcttgggtgtggaacaagtccaaagttttggccaatttgcggtggtcgcgtttctcagcctcttccaagcgatgcaaatattcctgcaactcttttttgtcgccccaagctgtgccataaatgcgttgcagcatttcatttttggcatcgccacgccaataagccccagcgattttcattagcttgaaggcttttagtttgccggtgctaggtacatgcggaccacggcacaggtcggtgaagccgccttgctcatacaaggacaggtcttcattggcggggatggaggcgataatttcagctttgtaatgctcgcccaaatcttggaaaaactttaccgcatcatctcgagacagcaacgaacgcttaatggcaaggtcttggtctgccagctgctgcatttttttttcaatgacagtcaggtcgtcaggggtgaaaggccgatggtaggagaagtcataaaaaaagccgttgtcgatgaccgggccaatggtgacttgcgcgtcggggaacagctgcttgaccgcttgggccagaagatgggcggtggaatggcggataatatccacgccttcggcatcttttgcggtaattatttgtaaatgggcatcgtcttcaatgagcgtgctggcatccaccacacgaccatccacgttgcctgccaaggtggctttagccaagcctgtgccaatggattgggcaatttccatcacagtgacagcatgggcgaattcgcgctgcgaaccatcgggcagggtaatttgcggcatgggcttttagtgttcttgggttaatagaataaaaaaagcactggctagccagtgcttttgaaatctggtaggcacgattggactcgaaccaacgacccccaccatgtcaaggtggtgctctaaccaactgagctacgtgcctgcaaacttgatctactattatagcaattgatttgctttgtgcaataccaatgattatttttatcggcagtcaggttagggttttttcggggtgatgcggttcagccgcctttgggtacgttccataagcattttttggcgttcaaccgcccacatatccagccccgtgtgtagcgggatttggtgcttgccaatcatgtcacacaagccctgacggatggcaattaacctgataatacctttatctttgggatgtttggccagcaagtcggcaaattcttgttggtcggctcggttgaggcagaaattaaggggcggcggggcggtttgtgcttgggcgggtagggttaggctgcacagaaaaaatagtgccccgtatttttgcattggcttgttcatagtttatcgggcttaatactatttaggttgtgattggataatcaatcagaataatctatagttaactcacaaaaattgcgggcataaaaaagcccccttaggttttaccttgcgagggctgtggtcgcgtagaagcggtgcctacgaaaaacaatttcattggtatgaaaagcaagtaagccttagtcggttacactaagtcaaagattatacacaagagcaaataatggtcaaaacaattttgggtttggatttaggcagcaattctattggctgggcattgctgggggaagaaaacggatgtccaagtcgcattattgcattgggcagccgtatttttattaaagcggttgaagaaaaaacaccaacgccgaaaaacgtcaaaaaacgcaatgcccgattaacccgccgagtattgcagcgtcgcgcacggcgcaagcagaggatgcttaattatttattatctcttaggttgttgcctgatgcactgcaaaattgccttacccctgaaatacatctcaacgctattggcgacccctataaactccgcagcaaagccctcgacgaaccattaacagcttacgaattgggtcgggttttattgcatttagtgcagcgacgtggctttttaagcaatcgcaaaactttgttgggcgatatggcagacgaccccgatgtacttgccgtgttgaccgaattggaagggcaggaagataccagttcggagcgagccaaagaagagaccgcatttaaacaagacataactgaattacgcaaaactatcgcaactgccaactgtaggacgcttggcgaatatctggcagcaaaaggtttgcacgattgccagcgtaaccgtacccgagacggagggcatttgcgtaccgaccggcaaatgtaccgcgaagaactgatggctatttggcaaactcagaaaaaccaccattctgtgttaactgatgatgtaacggctcaaatagaacacatcatattttaccaacgcccgctcaaactacaagctgatcgagttggcaaatgctctttggaacctaaacgcagccgagccaacattgcaagattagagtgccaacgcttccgctacctgcaagacattaacaatttacagtattttgaaagccatacagaacagtggctaactctaagcggcccacagaaaaaaaggttagagcagttattcgagcaacaagccagccttagctttgctggcatcaaaaaacaccttggatttgacaaatccactgaatttaacctagagcgcggcaacaaaaaactaaaaggcaatacaacagcctatgaaatccgcagggtactgcctgattgggataagctggatgacgacaaacagcgtgctttagtggaagacctgctgaccttccagaaaaaatccgcacttaaaaaacgtctggaaacacattggggcttcgcacccgatagtgcagtgcaactatgcctgctggaatttgaacccgggcatagcaatttgtcgcttaaagcaataaacgccttgttgccgtttttacagctaggccaattgttttcagaggcgcgcgtcagtgcgggctacggttacgaggtggagcagcttgtgctacaagacaagctcccagcaccgccagaaaccaataaccccatcgtcaacaaagggctgcatgaactcaagaggctggtaaacgccattattgccgaatacggcaaacccgatgccatacgcattgaaatggcacgggatttggagatgaacagcaaacgttacgctgaacatgaaaaacagcaaaaagccaatactaaagccaacaatgaggctgacagtaaatttttggaaatgcgccaacaaaacgcacatttagggctgcgcaactatgccggaaaaaccgacaaaataaaatatcggctgtggaaagatcaagacggccgttgtgcttattctggtcaggctattagcctatccattttgtttggcccagaaatagaaattgaccatattttgccttatagcgagtcgctggatgattcgtacatgaacaaggtggtgtgttacacccaagaaaaccgtgttaaaagtcagcaaacgccgcttgatgcctttggcaaggacgaaactaagtggaatcagataacccaagccatcaagcattgggataggcggttacaaagcaagaaaaaccgtttttttatgactgcagccgatgtgcaaaagcgtgactttatcagcagccagctcaatgacacccgctatattagccgtgtcgcgctagagtacctaaaaccgctgggggcggatatatcggtcagcaaaggcatcaccaccgcgtgggtacgccaccaatggggattaaacaatttattgggtgaatctgaccaaaaagatcgcagcgaccatcgccaccatgccattgatgccgtggtgattgcgtgtattgatcgccgtttttatacggcactggttggtatggctaaagatttggagcgtaagcaatcacagctcaatatgaaagatattcatatcgaccctgcctggccttgtttgcgtagtgatttagagcaagcccttaacaatctcattgttgcctatgcaccgcagctgaaactaagcggtgaactgcacgaggtaacaggtgctggatttatcaagggcattggtaacgtcaaccgtaaaaacctagatgccagctttacccaagtggataaaattatagaccccgtggtgaaagcgcaaattgaaaagcacctgcaacaatatggcaacaagcctaaagaagcatttgccgaaggaaaagttgttgtgcacaaagacggcaaaacgccgattaaacgggtgcggattgtacaatccaaaaccactttggacaagctgaaaaaatccaagtttggcgcgcgggataagcaaggcaagatttttaagtggttggcttatggcaatttgcatcatgtggaaattttgcgtgataagcaaaccggcaaatataaaggcgaatttgtcaccatgatggaagccagccaacgcgccaagggtatcggcaaagtgaaacagcccatcataaaaacagatcatggtgaagccctagaatttgttatggcactgcacatcaatgatattgtcagcattgaaaacaacgggcaaagggtgttttatagaattcaaaatttagacagccataacaaacgcttaaaattaaggctacactcagacgcattagcaaaaacacaagataaagccaaagataaggcaaggcaacaaaataccacattggcagataaagattcaacaattccagctttgatggtatatggtctacaaaaacataaaattaacatcctaggcaaaattattgcatgattaaacgtattgtagacatcagcgaacccgcctatttgcaccagcagcatcaacaattgatgattgacaaaaatggtaagactgccgcgcagatacccattgaagatttgggtgtgttgattttgcaacatccggctattgtaatgacccaagctgtgattatcagttgccagaaaaacaatgtcgccgtcattttttgcgatgcgcggcatttgccttattccgtgctattaccgatcagtgatggcaatagcttgcacagcaaaattatccagcaacaaagttgcctaagcttgccgaccaaaaagcgtgtttggcaacaaattgtcaagcataaaatcaaaggacaagcacgggtattgaaccagcttggcaaaaatgccaccgcactggaacggctcgccgatgacgtaaaagccggtgatcccgacaatttggaagcccaagccgcacaaaaatactggcggttattgtttggcgacgcttttcgacgcgataccgatgccgaaggcattaatagtctgctgaattacggctatgctattatgcgggcaatggtggctcgtgcgattgttgccagtggcttgcatccggcgttaggtgtacaacacagcaaccaatataatgggctttgtttggcagatgatgttatggagccttttcggccgtgggtggatttacgagtctatcagttaagccagcaaaatactgaactaagcgttaccccagacaccaagcaagcttttttaaagctcttgagtgtgcctgtgcgttggaatgaacagtcaatacccttaatggtggctagccactatctgctagctgatataaaacagacgtttaatgataaaaaccaaaaaatcaattaccccgaatggattgaataaatcttatggcttttggtggcttgaactctatgtggattatcgttttgttcgatttgccaacggatacaccagaagcccgcaagcaatacacgcaattcagggggtttttactggatgatggtttcactatgatgcagtattcggtgtatatgcgtcatagcagcagtgatgaaaacgcagcggtgcatatcaagcgggtcaaggcaaaaatacccactgatggcgaagtaagaattattaaaataactgacaagcaatttgggagaatcgaagtgttttatggaaaaaaacgcagacctatcgagaaaatgcctgagcaaatctcgcttttttaagggaaaaaacggaacttgcccagtattatcatgcggttattttgaaggtagtgtaaccgactaaggtctacctgcaaatcacaaccg

SEQ ID NO: 682 - DNA, 14300 bp, synthetic construct
  source 1..14300: mol_type = other DNA
  misc_feature 1..14300: note = Synthetic
gacaagagaaaggcaggggcaatgcaaagcagcaccgcggtcgagtattttttgcagcatttgcgtaccgagcggcagctgtcgccgcacacgctggatgggtacgcccgcgatctggcgaagctgctggagcgggtcggcgatgggccgctcgcgcagatcgaccccggcacagtccgccaaaggctggcggaattgcaccgggcgggcctcggtgggcgcagcctgcaacgctggctttccgccgtgcgcaccctgttcgattacggcattcgccagggctggtgcgcgcacaatccggcccgcgacctgcgggcacctaagaccggtcgcccgctgccgcaaactctggatgtggacgaggtcgcccgcctgctggctgacgattctcgctggcctgctggctggcagggggtgcgcaatcgggctgcgctggagctgctgtattcctccgggctgcgcatcagcgagctttgcgggctcgatatcggcgacctggatctcggcaccgccggtgtgcgggtgtgcggcaaggggcgcaagactcggttgttgccggtcggtcgcttggcggtgcaggcattgcgggcttggttgcgggtgcgcccggagcgggccaatgccgagtccgggcaggcgttattcctgaaccaccgcggcgggcggctgagtgtacgcgccgtgcaacagcagctgcgtaaatgggggctggcgcagggcatcgcggtgccggtcagcccgcacatgctgcgccattccttcgccagccatttgctggaatcgagcggcgatctgcgggcggtgcaggaattgctggggcatgcggacatccgcagtacgcagatttacacccatctcgattaccagcatttggcggaggtctatgaccgggcgcatccgcgggcggggcgtaaggggaggagtgaatagaacgcgctggaggcggttgcgtggtcgctcggtggatgccggtttggcggcgcagtggaattaccataggatggcttgctcgcccaattcaccggagaaaacatgcccactcgcatctatcccaagattgctagttatcattctgagccttacagactcgtactgatcgcgcaggatccgggcaattccggtgccgagaagaatcgggcaggtatcgaattcatcggtatagaccagcaccgaagacaagaagagcgagcggacactctagaacgagcagaatgctaacttgccatctggccgaaaatgcggcacggcacggtgtgagcgcacggtacgcgatgagttatgagttggcgcaggcggaagcagcgcgccacatagcagactagctagagtgtgaaaagtaggcgcaggcagaccaaaactaagttacactcagcgcaagccaaaatactaaaccagaggaagcactaaaatggatacaaccacaatcattctctttgccctagtacaccttatcgtcatattcttcattgcattatgcatattcttcattgcattatggttgtatcggtatctcaaaaaccaccctttaatgcgtcggttcggtgctgcgcttgccaatacttttcccgatcacaacaagtaccgagcaaccgtcaaagacggaaaaactaacgtagaagtaacagtcttagcagtaagcacgcacaaagcaaaacaaaaactcgaagaacagtacggcgaagacagtgtcatcagcgatcctgaaagaatcgagcccagaccaaactagatagatcaccgcacggacaaaaaagaagcccgcacagggcgggtttcatccacagcaggagctcggcttgcaaaccgtatcagcccgctgccgcatccgccgtggcttgcgggctgggcgggtagtagcgcggatctagttccatagtccagtcgaaggggtcgggggcgcggcgttcttggatggctagtagggcggtgcgcagttcggcggcgacctggtcgacctgcggtaggcggtattcggtctcgccgtcggccagtacgctgatcgggctgacgatggcggcggtgccgcaggcgaaaagctcgctgactgtgcccgcttcaatgccggcgagtaagtcggcgatcggcatatcgcgctcgatgacatcgagcccacggtggcgggctagatgaattagtgaatcgcgggtgatgccggccagcagcgagtcggttaatcggggggtgtgcagggtgccgtcgatcagcgcgaagatgttcatgccggacagctcttcgatgtgttccatggtccgcgggtccagccacagcgattggtgaaagccacgctgttgggcccggcgggctggtttgagagccgcggcgtagttgccgccagttttggcggccccggtgccgccgcgggcggctcggcaggcatcgcgctcgacccacacgcgcatgtggccggcgtgatagatggctgaggggctagaaatcaccataaaggtaaagctgtcggatgcgcccattcccagggtggcgcgggtgccgaacaggaaggggcgcaaatagagggattcacccgaccgccgcgggatgaacggctcgccaaaacccgctactagtccgatgccgtccataaagacggattcggggatctgcaccatgcccatgcgctccgccgagcggttcatgcgcgctaggttttccagcgggcggaaaaaattggcgcggcgggtgcctacgcaataggccttgaggccctcgaaaatctcctgcgcatagtgcagcactttggctgctgggtccaattcgatggtgccgtagggggtcaactccgccggttgccaagcctcatcgcggtagtcggcgcgatacattatcggcagtttcaggccgccgaaatcgagcttggctggcaacgtaaagtttgccagttcagcggcgactgcggggtgaatttggtagcggggcatgggttaaggcgggcggcgttgcggcgaccggccagccgcactcaggagtctttttgcgggcgcggtgctggctttgcgctgcggccctggagggggaactgggcgaccttgtcggcgggcttgacctcgctgatgcgcacttggcctgccttgtccacctcgtcgatccgcaccacggcttggatcggaatcatggaatagcggacgttggcaaattcggttttcaggcgttcttccgccgggtccacaatgtgttgggagcgctcgccgaagacgaattccccgacctcgataaagcccaccagatcactttgaaagacctgccgggcgtagacttcgtagacctgcccctgattgtaaaaacagacgcggtagatgcaggatggctcaggcatgggggcctcttggcgggcggcggagctggtgggagatgcgcgattctagcacagcgggcgggcgggcggattggggcctctttccaccgttgccccaccgttgccgccatcgctgccttcatcgcaccattccaccggcccgctctgccgctataatcgcgccgcccgcacctgctcgccaaatcgccgcgcccgcaatgaaaaagctgtttatcgaaacccacggctgccagatgaacgagtacgactcggcgcggatgcgcgatctgctcggggccagccatgggttcgtgcaaaccgatctgccggaggaggcggacctgctgctgctaaacacctgctcgatccgtgaaaaggcgcaggaaaaagtgttccaccagctggggcgttggaaaaaacttaaggcccgcaaaccggatctgctcatcggtgtgggcggttgcgtggccagccaggaaggcaaaaaaatcgcccaacgcgccccgcatgtggatgtgattttcggcccgcaaagcctgcaccgcctgccgcaactgctaaaacagcggcgcgatggggcggacgcggtggtcgaccttagctttccggaaatcgaaaagttcgaccgcctgccgcaaccgcaagccgatggggtgagtgcctatgtttccatcatggaaggctgctccaaatattgcagcttctgcgtggtgccttacacccgcggcgaggaggtcagccgtccgctggccgatgttttggcggaagtggccgcgctggccgcgcagggggtgcgcgaagtttgcctgctggggcaaaatgtcaatgcatggcgggacggggcaagccgctttgccgacctgctgcctttggtggcgcagattgacggcatcgagcgcattcgctacaccacctcgcacccaatcgaatttggcgatgacctgatcgccgcctatgccgatgtgccgcagctggtcaatcatttgcacttgccggtgcaaagcggctcggaccgcattctggcggcgatgaagcgcggttacatggcattggaatacaaggcaaagatccgcgccctgcggcgggtgcgcccggggattagcatttcatcggactttatcgtgggctttcccggcgagaccgagcgcgatcatgccgctactttgcggctgatcgaggaggtcggcttcgacagttcgtttagctttctgtacagcccacggcccggcaccccggccgcggacctgccggacgacacgccgctggaggtgaaaaaagcccgcctgcaccgcctgcaagccctgctcgccgggcaggcacggcggatcagcgtggcgatggaaggcactgtgcagcgcattctggtcagcggctacgccaaaaaggaccccggccagctgtgcgggcgcaccgagaacaaccgggtggtcaatttccgggcggacgatgaagggctgatcggtcagtttgtgccggtgaaaatcgcccaggccctgcccaattccctgcgcggggagctggttggctagggggtgggcttagcctctgggccgctggggggcgcatagctgcgggcgcaggacatggctggcatgcgctcgtcctcgcgcttgatggattccataaaccgtgtccagacttcatccggctgccagatgctggccagatcccgttgcgcgactggttccggcacacccaaacagcgagtgcggtacagataaacgaagcatgccacccgccgattcagcgcacagtggagccagatggggcggtcgcggtgcgtttgcataatggcttggaaaagccggtactgctgcggctgcggtgcctgccatgcgactggaatctggatgtaattcatcccctgtgcggcgaccagttcggcctcgttggacagcgcatccgggtgctcaaactgcgctaggttgaccacggtctcagcgcccgcttggcggattagggcaaattccgccggctgcggctgtcctgaggtgtgaatcaggcggtcgattcggcagtagtggcgtatgtgcattgctttatcaggcgacgggcgacgggtcggagggaaggccatcaggataccgatatttggggtaccattgcgggcttgtctggccaactaaatcaatcaacggggcgcatatgctctacgtcatcgggggatttggggtgctgatgctggccgctggtgcgctgctgatcttgcagccggcggtgctggtgaacgcattgcgccagcacttggattctaatggcttgcattttctggcggtggtgagccgcttggtgctgggagccatcctgcttagctacgccgccgactcgcgctttcccatcgccctgcaaacactcggtgctctgatttttgccagcggtgtggtgctgggggccatcggtcggcacaatttccaacgcctgatggcatgggcactcggcttgcgtccggtctatcagcgcacggcgggggtgctggccctgatcctgggcggtgcgctggtcgcggcgatcgggtgaaccgccgcttggcactgtccgcctaaagcgttatccttcgccgtccattccagtgcccccggcacccaattcctcgttgaataacacggctattttcgagaccgcactcgaacccaatgatgcccgccgcctcgccagcctgtgcgggcaatttgaccaaaacctgcgactcatcgaacaacgcttggatgtgcagatccgcaaccgtggcaaccgctttgccatcgagggcgcggcggctgtggcccaaactgcgctgcgcctagtggaagaactgtacgagcagacccgccgcgccgccgccctgctgccggaagaaatccacctgcgcctgcaatccgcagccctcgatgcacccgccgccgacaacgaggccccactaagcatccgcaccaaaaaagaatccatccgcccacgcggtgccaaccagatcgattacgtccgccgcatccgcgctcaggacattaacttcggcataggcccggcgggcaccggcaagacctatctggcggtcgcctgcgcagtggaggccctgctgaaagacgcggtcgagcgcattttgctggtgcgcccggcggtggaagctggcgagaagctcggctttctgcccggcgatctcagccagaaagtggacccctacctacgcccgctttacgatgcgctctacgatatgctcggcttcgccaccgtaggtaaattgatcgagcgcaacgtcattgaggtcgcgccgctcgcctacatgcgcgggcgcaccctcaaccacgccttcgtaatcctcgacgaggggcaaaacagcactcgcgaacaaatgaagatgttcctcacccgcatcggctttggctccaccgcggtgatcaccggcgatgccacccaagtcgacctgccgggcagcatgcgctccgggttgctgcatgccacccaagtgctcagcggcgtgaaaggcatcggctttacccatttcagttcccgcgatgtcgtgcgccacccgctggtcgggcgcatcgtcgatgcctatgagcgggccgacaaatccgccagtgcgaacaaagcagcacccgccccacgcccgtgaccattacgctggattttgccaatgcttccggacaccccgccccgccggccaccgccttccatcgctggattgaccgcgccctcgcgcctttgcagccggacgccgcgctggccctgcgcattctggacgcgcccgcgatgaccgccctcaaccgccgcttccgccagcaggataaacccaccaatgtgctggcttttccggtcgaatccgccccgcctgcggctctcgatcatctcggcgacatcgccatttgcgccgcgctggccgaatcggaagcgcaggcgcaaagcaagccgctggaggcccactacgcgcatctgagcatccacggggccctgcatttggccggcctcgaccacgccgatgagccgaccgcagcgcacatggaggtgctggaaactcaaattttgcaatcgctgggcttcgcctgcccctattcttaaactcgacttccaacccctgcttcatactctatggaaaactccgacaaacccccctctagtcagggctggctaggtcgcctagcggcccgcctctcgcccaccccggaaaaccgcgagcagctggaacaggtgctgcaaaaatcgcacgaatcgcacatcatcgacagtgatgccctgcaaattatggccggtgccctgcgcgtcggcgaccagcgagcgcaagacatcctagtgccgcgggcgcaaatgcgctgcctgggtcttggggccgcgctggacgaggtgctggctctgatcaccgaatccggccactcgcgctttccggtgttcggcgacgggctggacgacctccgcggcattctgctggcaaaagacctgatcgcaccgctcgccgccgcggaaaccaaaccagacctcgccgccctactccgcccggccaccgtcatctccccgtccaaacggcttggcgagctactcaaagaattccgcgagcggcgttaccacatggcagtggtcatcgacaaatacggcagcgtcaccgggctggtgaccatcgaagacattctggaagaaattgtcggcgacatcgaagacgagaccgacgagcaagaagccgacagcattcaactcatgccgggcacccccgcccgctaccaaatcgaggcgcaaaccgcgatcggcgaatttaaccaatactttcaagccaacctgcaagagggcgaatacgacaccctcggcggactggtgatgggtctgcttgggcacctaccggcagtcggcgagacagtggatatcgatggctttcgccttgccgtactagaagccgataaccgccgcatcatccgcctagcggtaacccgccaacaccccgaacccgccagcgaccccgaccaaaaataatgcgcggctggcacattctgctcgcggccacggcgggcggcctaatgcacttggggctggccccctaccacctgcggctcgccgcttttgctgccattttgctctacgctgcgctgctggccggctgcgcccgaccggcccaggcattcaaactggcattggctttcggcacggggctgtttggggccggggtaagctggatctacgtcagcatccacattcacggtgccgtgcccggcccgctggcgatgctgttcactggcggctttgtgctggtcttaagcctgctgttcgccctgccttggaccttgctgccactgctggcgcaaacccgcaatcggcgtttgctggcttttccggccttttggtacttgggtgaatggctacgcggctggctattcaccggcttcccctgggcctacgccggctacacccagatagaaggccccttgcgcggctggctgccagtgatcggcgcactgggcaccggtgccctgctggccggcatcgccgcgctcttggtgtacgcgaccacagtgcgctccggcgcgaccatcgggcgggttttggcgactggtctcggcatcggcatactcagcctttatttggccgagcgcgactggaccgaaccaatggaacccgccatccccgccaccctagtgcagccggacatccccctgcgcgacaaatgggacccagcgcgggcggcgcagatcatcgccgtgttggaagccaacagccgctggcaacccggcctgctcatctggccagaagccgccatcccctacgtgggcggcgcgcaggcaagcagctacctagcccagctacagacgcgagcggcggaatcggacaccgccatgttcaccggggtgctcagccgcgagcgcggccaatacttcaacagcctaatcggattgggcaccgcccagcgggtctatcacaaacgccgcctagtgcccttcggcgaatacgtgccactggaaagctggctacgcggcagcatgcattttttcgacctgcccatgtcggtcatcgtgcgcggcccgcccggccaagccccactgccattccgctaccgcggccagcaatatcaaatcgcccccgccatctgctacgaaatcgcctacacccgcctagtccgccagctggccgcggacgcgcaaatactgctcacaatcagcaacgatgcctggttcggcaccagcatcggcccctggcaacacatgcagatcgcccaggctcgcgccgcggaaaaccgcaaacccgtactgcgggtcaccaacaacggcatcagcgggctaatcggcccacaaggcaaaatccgcgccaccctaccccaattcacccgcacccaaatgcaggtcaccgtaaccccacaacaaggccaaaccccctacacccgcctaggcaactggcccggactggccctttgcgccacaattttgctgtgcctcagcctacgacgaacaaaaacaccgcccaccaaatcgcaggcataaaaaagcccccactgggagggcttgtggtcgcataaaagccgttgcctacgaaaaagcatttcttggtatgaaaagctaataggtagaccttggtcggttacactagcccccagtatacacaggaaacccccatgagcaagaaaattctcggtctcgacctcggtagcaactccctaggctgggccctgctcagcgcggatgacaaggaacgcccgaacggtctgattgatatgggggtgcgaatcttccccaaggcggtggaagacaagacccctacgccctgcgcacccgcgccctagacgaacggctcgacccccacgaactcggcagggtattcctgcatctagtgcaacgccgcggcttcctcagcaacaagaaaacccgcctcggcggggaaatgctggatgacccagatgtgcaagccgtgctcgccgaactaggagatgatgacgctgatgacggggcagacgcagaggaaaccgcctttaagacggatataaaggaactacgcaacgaaatcgaaaaatccggcaagcgtacactgggcgaatacctagcatcacggaacacagatgaaggcaagcgcaaccgacaacgcaacggtggccacttacgcactgatcgacaaatgtaccgtgatgagttggataaaatctggcaacaacaggccaagcatcacccagtactcaccgccgcggtcaagggagaaatcgaggaaattatcttccaccaacgccccctaaagccgcccaaaaacattggcaaatgctccctcgagacgcgcaacaaacgctgcaaggtagcgcggctggaataccagcgattccgctacctgcaagacatcaacaacctgaagtaccactgcccgcatagcgagggcgacattagacccgccgaagatccggataaacacacgaaaatggtcaacatttttgaacgcaaagcggctcccacttttgccgagatccgtaaagctctggggctaaaacgcattaaattcaatcaagaatacgagaatagcgtcaagaaactcaagggcaacgcaaccgcctgcgccattcgtgaaattcttccagaatgggatggttggacagaagacaaacggatcagattagtggaagacctgctcactatccgcaagcaaaccgcactaaaagcacgcctgatggggcactggaagtttcccagcaaaacagcggtgcaactgtgcatgctagagtttgaaccgggctacggcgatcactcccttaaagcaatacgcaagctactgccccatttggaacatggcaaaatttactccgatgctagggaggcagccgggtatggatacgaacaacagaaaacgctatctgctaaccgcctaggtccaccgcccgaaattcccaatcctatcgtccagaaagggcttcacgaactgcgccgtgtagtcaacgccattatcgccgagcacggcaaaccggatgtcatccgcatcgaaatggcccgcgaactggaaatgaacaccaagaagtacaaggcttttctcaaacagcagaaagcgaacaccgatgccaatgatagagcaattaaagcctatgaagccatcgcgaaacgagaatccgggctgaggatgtcctctcatgttggcaaaaccaacaaaatcaaataccgcctctgggaagagcaaggagagcgttgcgtatatagcaatcgcccaataagccagactgccttattcagcgatgaagtagagatcgaccatattcttccattcagccagtcgctggatgattcttatatgaacaaggtagtttgctacgccaaggaaaaccgctataaaggtaaccgcacacccaaagatgctttctccggcgaccccgcaaagtggggtcaaatcacctccgcaatcagcggctggcccaagcaggagttaaagagcaagcacaaacgcttttatatgacggaagccgatatactcaagcgcgattttatcggcagccaactcaccgatacccgctatatcagtaaggaagcgggaaaataccttgaatccctaggtgccgaaattacctacacccgtggtgcaatgacagcctggctacgccaccattgggacctcaaccggttaattagcgaaacggataaaaaggaacgcaccgaccaccgccaccatgccattgatgcggtcgtgactgcctgcattgaccgcggtttttaccaagccctggccgccaacgccaaacgcgaagagcgcacaggggttaggatgcgcgacctgattaccgacgcaccgtgggatgatctgcgcagcgagacagaagataagctaaatcaaataatcgtctcccatgtaccgcaacgcaaaatttccggtgccttgcacgaagaaacaggcgtgggttttattgacggtgtaggcactgtttatcgcaaaaatctggatggcaatttcactcaaaaaaatgcagaaagcattattgatccggttatcaaagagcgagtaacgcaacaccttaaagcctacggtaacgattcaaagaaagcctttgctgacaatgtcactgtctatcataaaaatggtagaactccgatcaagcgggttcgcgttgttcaagctaagacggatgaagccaaattaaagaaaaacaaatttggggtgcgaaataagcagggcgaaattttccgctggatggcttacggcaatatccaccatgtggaaattatccgcaataagaaaaacggaaaatatgaaggtgtttttgtgactactatggaagccgcccagcgagctagaggcatcaacagtagcaaggaaccaattatccgcacaaaccataaagaagatcgagaattcgttatggccattcatatcaatgatttggttagtataaaagtagatggcaatactcaattttatcgagttcagaaactagataggggcccgaaacagataaaattacgcttacataatgcggccacgataaaaaatgaagccgaaaccttaacggccaaagagtcaaccatacctgcgttgatgaaaaaagagctgcgagtttgcaaaatcaacgcaataggaaaattgcaggatgataaaacgcattcttgatatcagcgagcaggcttatatccatctacatcaacaacaattacagatcgaaaaacagggcaagctagtcgcctctatcccggtcgaagacttaggcgttttaattttacaacacccggccattgtggtaactcagaccgcgctagtcgcttgccagcaaaacaacacggtagtcgttttttgcaatgcgcagcacctgccctattcggttttattgccgttgactgaagggcacagcctgcacactcgcattctgcgtcaacaaatggaaataacccagccgacccgcaagcgtctgtggcagcaaattgtccgcgctaaaattgcgcaacaggctaccgtgctggagcaaaccggcgagagcagcccgcacctgcatcgcatgttgaataaagtcaagccgggcgaccctgaaaaccacgaagcacaggcggcgcaacactattggcgcaaactgatgggcgatgacttccgccgcgaccgcaccgcaggcggcatcaatgcactgctcaattacggctacgccataatgcgcgccgtgcttgcccgctctctggtgggcaccggcttgcatccggccctagggctgcaccatcgcaaccaatataacggtctctgtttggcggatgacctaatggaacccttccgcccctgggtggattacgaagtccaccaatacgcagccaacgccgacccgcccgaagtctgtcgcgacagcaaacagcgtctcttggcactactgagcgcgccggttagcctagccgacaagcaactgcccctgatggtcgccagccaccagctggccgccggcctgaagtccgccatcgcgggcgacagccgcgacctactcttcccgcagaaaatctgggacaattagtggcgatatttgggggcctgcacaccatgtgggtgatcgtcctgtttgacctgcccacggatactaaggcggcgagaaagcaatacaccctattcaggaagcacctgctagccgatggatttagtatgatgcagtactccgtgtacatgcggcactgcgccagcgatgagaatgcacaggtgcatgccaagcggatcaaagcctgcctgccgccggatggcgaggtgcgaatcgttaaaatcaccgacaagcaattcggcaaaatcgaggtgttctatggcaaaaagcgcaaacccatcgaaagcgcaccaacccagctggaatttttgtagccaaaaaactgcaaaaatccagctagttcaagcacttatttgcaagatagtataaccgaccaaggtctacccgcaaatcacaaccttgggtagacggaatccgcaacaacaataagtataaccgaccaaggtctacccgcaaatcacaaccgcgaccccaagaaggccgccgctatcgccagtataaccgaccaaggtctacccgcaaatcacaactggcgtcaatgtcaaatgagcgccggatgtagtataaccgaccaaggtctacccgcaaatcacaaccggt

SEQ ID NO: 683 - DNA, 12554 bp, synthetic construct
  misc_feature 1..12554: note = Synthetic
  source 1..12554: mol_type = other DNA
ctgtcgtcaatgtaacaaatatcttgtcaaatactgagttggcattaggcttaatatgccttgctagaattttatttgttgcttatgatttaaccaagacttggcgtggtgttcaaaaaaactgatagagacctttgcataaataggaacaatcatcagaaacccacttttcatccacttggcgattttttaaacccagccttagccctgctaggacaaggtttaaagaaatcaccaattgggcaaaaattggattttgccaatcatccctatttatgcaaaggtctctataaatatgaatagccattaagatcccacttttcactcaattagcaattttttaggatgtttcgtagttccccaagaaggtaagtccagttttagttttactgaaaaaaagtttaaagaagttgtcaattagaaaaaatttgaattttgttaatcatctgtatttatacaaaggtctgggtataatttacctgacaaagatatatttaaaatctgaatttgaaaaataatatgcccacaagattaattaaaatatttaaacaattatggcttgcttttatgaatttaattcaaggaaaggatcgtctttttgatggagatgatgaggtctttaaaaaatctattcaagatattgactattatggtgaatacggaatgggaaggtctactatttgggttattggtaatacccgagtaaagaaagtttttgcagttgatacaagtaaagtatggcttgaaaaggtacggagtaatttaaaccatgcaaatgtattaacggctaaatgggtagacttagggcgtttagcaaagtggggaatcccaatagattattcaaaaagggaatgcataataaattatgttgaatcaatatggaaacacgagcagaaaccacaatttgttttagttgatggcagatttagggttgcttgttttttgtattaccttgcaactggcgcaccaggcactaaaattgtttttgatgactatgtaaatagacctcactatcatttaattgaagagtttgtagagcctaacaaaacatgtggtcgccagtgtatgtttgttgttccagagaaagtagataaagaaaaaattatgaatttaatgcgtcaatttttatttgtaatggaataatacaatatgaaagttgcaattgtaggtgtgggctatgttgggatgtccagtgctatgcttttatctcaaaaccacgaggtaattgcactagatattgatgttgaaaaagttaagcgactcaatgataaaatctcaccgattatagacagtgaaattaaagactttctgataaataaagaccttaactttagcgcaacacttgacaaagagttggcttataaagacgctgattttgttattattgccacgccaactgactacgacattgaaaccaattattttaatacctcatctgtagaaatggttattcaggatgttatagatatcaatccaactgcaataatggttatcaagtcaacggttccagtgggttataccaaaaatattaaatctaagtttgccagtgacaacattctattttcacctgagtttttaagagaagggttggcgctttatgataatttgtatccatcacgcattattgtaggtgagagatcaaatagagccaagcaatttgcagatttattggtagaaggcgcaatcaaaaaagatattgatattttatttaccaattctactgaagcggaggcagttaaactttttagcaatgcctatcttgctatgcgggtatcctattttaatgaacttgattcttatgccgaggcacatggattgagttcaaaacaaattattgaaggtgtaagtttagacccaagaattggtaattattacaataatccatcatttggttatggcggttattgcctgcctaaagacaccaggcaacttaaggctaattataaggatgtacccaataatttaattagtgcgattgttgaaagtaacgcaactagaaaagattttattaccgagtcgattattgctaaaaatcctaaagttataggtatttatcgcttagtaatgaaaagtgctagcgataattttagattctctgcagttcaagacattgtgaagcgtattaaagccaaaggtattaaagttgttatctatgaaccagtattgcaagagaaggagttttttcagtctaaagtaattaaaaacttagaggaatttaagaaaataagtgatgtggtggttgccaatagaatggcagacgaattgcaagatgtaaaaaataaagtttatacaagagatttgtttgggattgattaaaggcatataaaatacaaacacttttccgttggtttttttccaaaatctctaaaaacaagaattttaatatgatgaaattttcagtactaatgtcaatttaccacaaagaaaatccacaaaattttgatagggcgatgcaaagtgtatgggatgagcaaagcattaaacccaatgagataattttggtagaagatggtgtactgactgatgagttgtatcaaagtattaaaaaatggaaggagaagttaggtggtatttttaaagtcacttctcttgaaaaaaatgttggtactggcaatgctaaaaagattggtgtggaaaaatgtaccaatgaattgattgcggtaatggatactgatgatatttctttgcctgataggtttaataaacagttggcaatttttaacgctaaagatattgatgtttgtggggcttgggtaggtgagtttgaaagtgatgaaactaagataatttcatataggagagtaccagaacaacaatgtaatataataaaatttgccaaaagtagaagtccagttaatcaccctacagcaatgtataagagaaaattagtattgagtgttggaaattatgcaaagcacagaagaacaagtcaagactatgatttgtttgtaaggttgatattgggcggtgcaaaactttacaatatacaagaacctttggttaatatgaggatgggtaatgaatggttggaggaccgaaggagtggattgaagcaagcgatacttgaggtaaatgtgcaaacagaattttacaaaatgggttttcttaatgcgtatgaattgtttagaaatatagtcatcggttttacaatacgactgttacctaaaatgctattaaaagcagtttttaagataataagaaaactataaaattttaatggaacaaaaaagacaattttagtcactagtggtgcaggttatattggtttcacacttatgtggaattgcctgaaaaaggctatagaaaaattaggctggttggcaaaattaacgattaatgatatttcgctgatgtttggcgatttgtcagttgcttaaaatgaaaaatgatttaaaatattagaacaagcattaagagacctttgcataaatagggatgattagcaaaatccaatttttgcccaattggtgatttctttaaaccttgtcctagcagggctaaggctgggtttaaaaaatcgccaagtgggtgaaaagtgggtttttgatgattgtttctatttatgcaaaggtctcttaaaacgaaaggagaaaagaaaatgaaaaaaatactaggattggatttagggtcaaactcaattggttgggctttgatgagggaaacagatggagaagtcagtcagattatagatttaggttcgcgaattttcaacaaagctgtagaagaaaaaatacccacacctaaaaatcaaaaacgccgaaatatgagattagggcgcagagttttacaacgccgagcaaggcgaaagcaaagaatggtcaattatttaatctctcttgatttacttccccaggcattaagcaataattttggacaagaaaaattactcaatgaattgggagatccctacgagcttcgaaccaaaggattagaccagcaattagaacctcatcaatttggcagggttttattgcattttgttgcaagacgaggttttttatccagtaaaaaacaagtagcaggtgatttagtagatgaccccgatacacaaacttacttatcaacacttgatagaaaacaaaccaaagacgaagaggggcaatttaaagcagatattgccgaggtttatcaagcgattaagggcaatcatgctagaaccttaggtgagtatttattcaatcttgaggttgggaaagttaaacgcaatcgctcacacgatggtgggcatttgcgcactgacagagccatgtataaagatgaactgtacaaaatttgggtaacacaacaattatattttgatttgccaaatgaatttatcagtgaaatagaaaaaattattttctatcaacgccctttaaaacttaaaaaagacagagtaggtaaatgctcattagagccaaaacattatcgtgctaataccgcaaggttagaggtgcagaaatttagatacctgcaagatatcaataatttggaatattttgaacgccatagtgagcaatggcttaaattaagcgatgaacaaaaaaacaaactcagaatctattttgaacatcatccaaaaatcactattactgcactaaaaaaagaattgggtttagataagcctaccaaaataaatttagaagccaaaaatcttaaaggcaatatcactgcttgcgaaattcgccgcgtgattggcaatacttgggatgaatattctgacgaagcacagtctcaattatttgaagatttatttactatcaagaaaaaatcttcgcttaaggcaagattaatcactcattgggattttgataagcaaaccgctattaagttatgtttgattgagtttgaaccaagccactccaatctttcacttaaagctattaagaagttattgccatttttagaacagggtttggtttatagtaaaaaagatgtggatacaggagaacttggcgccttacaagccgcaggttaccaagaagaaattgtagaaaataaaaaaactgaaagtttggataaattaccagcaccacaagaaacctccaacccaattgttaacaaaggcatgcacgagttacgccgtgtagttaatgcagttattaagcaatatggtaagccagatgtggttcggatagaaatggcacgcgatttggaaatgaataccaagcgttacaaagaaaacgaaatgcgacaaagaaaaaatcaaaaagccaatgaaaaggcgatcgaggtatttagacaagaggtgggtaagaaatatccatcacatgatgaaaaaattcgttatcgtttatggagagaccaagatcagcggtgtgcttatagtggcaatgtaatcgcattggggcaaattttttcagctgactgtgaaattgatcatatattgccatttaaaaaatcgcttgatgacagttatatgaataaagtattgtgctttgaaaaggaaaatcgtaataaggcagacagaaccccaattgatgcttggggtggcgataatgacaaatggaatcaaatcacgcaagctattagccagtggaaattcttaaaatcaaaagtagatcgtttttatatgacagaaaaggatttaaaagaacgctattttattttttcccaacttactgacacccgttacatttctcgtttggcacaggagtatttacgccaacttggttgtgatgttaatgttaccaaaggttttgttgtgagtgaaatgcgccatcaatgggggtttaacagtctcattggtgaaaccgataaaaaagaacgcaccaatcattgtcatcatgcgattgatgccgtagttattgccagcacctccagaagtctatatcaacaagcagccaatcaaattaaacaaaacaagttaaaaatcccagaaccttacgcagatattcgcactgaacttgaagaaaaattaaagcatgtgattgtctcacatacgccacaacgaaaactctcaggtggtttacatgaagaaacgggtgctggatatgttgcaaagcacggcggactggtttatcgtaaaacactcaacccagaatttacccttaaaaatgcgatgagcattattgatgagcaagttaaaaccaaggttttagagcagcttgaaaattatggtaatagcaaagaggcgtttaatgaggaaaatttaaaaaccttaaaattgggtaagaatcctattaaacgggtaagggttttgcagtcaaaaataaaaactactaaaaaaaacactgcagaagatattttgcaacaaactaaatttggcgttaaagataaatcgggcaaggtttttaaatatatgagttatggaaacaatcatcatgctgaaattattcagaacatcgaaactggaaaaattaaggcagaatttgtaaccatgatggaagcatcgaatagagtgaaaggtatcaatatgccaaaacaaccaataataaaaactgattatggtaatgaatggaaatttttaatggctttacatatcaatgatactgttagtatagaaaaaggaaatggcgaacgggttttttatcgagtgcaaaaactagggggagggtatgacattacactcaggttaaatatagcgtcaaccactaacgaccagaatcaatgcttacctttgatggcaaaaggtgtcattgaaaacaatctgattgtatataaaattaatgccatcggtggtttaatcgatgattaaacgcattattgaggtgtcaaacccaagttatttgcacctcaaaaacaaacaattgattattgaacaagcacacgaagtggtcgcacaagtcccaatagaagatattggcgtattgattttagagcatagtgccatcaccattactcagcctttaattattgaatgccaagagaataacacagccgttattttttgcgatgaaaggcatttgccatattctactattttgccaatttctgagggcaacaatctgcatcaaaaaatccttaaacaacaaattaacatcacagaacctgtgcgtaaaaatttatggaagcaggtcatacggcaaaaaatcacaaatcaggctaacacactcaaacagtttgacaaatcttttatgcgtttagaaaaattagcaaaggaggttaaatcaggtgatataacgaattgcgaagctttagctgcacaatattattggaaagccttatttggtaaagattttgtacgcaatcaaaatgcagatggtattaatgccgtccttaattatggttattcaattattcgggcaacgattgccagaagtattgtggcaagtggtctgcatcctgccattggtttatttcaccataatcagtataacggtttgtgtttagcagatgatttgatggagccgtttcgtccttgggtggatagtattgcttatcaactataccaaaagaatgcaaatatcagtatcaccaaagaagttaaaatgccttttttagatttaattggtgaaaatgttaaatttaaaaataaacagatgccgttaatggtgtctgtgcattatttaatggcagatttaaaacgaaatttcaccaaagaaagcaaaaaaataatttacccaaaaaaataatgttcggaggtttacaaacaatgtgggtgatagttttatttgatttgccgacagatgatgttgagatgaaaagagactatcgttattttcgtaaattcttactcaatgggggttttactatgatgcaatattcagtatacatgcgtcattccagcagtgaagaaaatgcacaagtgcatattaaccgtgtgaaaattcatcttccagcagacggcgaagtgcgaatcatcaaaataactgataaacaatttggtcggattgaagttttttatggaaaaaaacgtcaacctattgaaaaagcaccggaacaattatcatttttttgactagaaaaaatgataaaaccccagtattaaagcattttagacaaggtaaattgtaaccgactatcgcctaaatgcaaatcacaacattgtggcgaatatggcgacaaaactcgtattgtaaccgactatcgcctaaatgcaaatcacaactaatgttgtcatgaatgaacaaaatcctatattgtaaccgactatcgcctaaatgcaaatcacaactgggaagttacgcagtgctgtctctggtagattgtaaccgactatcgcctaaatgcaaatcacaaccagcaattacagtgaagtgttcgctaataaattgtaaccgactatcgcctaaatgcaaatcacaacagggagaaatcttcttacgcagacgcttcaattgtaaccgactatcgcctaaatgcaaatcacaactgttgttggtgactctggttataattcttaattgtaaccgactatcgcctaaatgcaaatcacaaccgaactcgaagaaaccacttttaaatcaaattgtaaccgactatcgcctaaatgcaaatcacaactgggaagttgcgttctgctgtttccggtagattgtaaccgactatcgcctaaatgcaaatcacaactctcattcaatcggccctcattccttggctattgtaaccgactatcgcctaaatgcaaatcacaacttctctttggtgcttggtttcaacttatcgattgtaaccgactatcgcctaaatgcaaatcacaactggctctgttgctggtatgcctactgttgcattgtaaccgactatcgcctaaatgcaaatcacaactgaattgacgcaattgcttccagtatttaaattgtaaccgactatcgcctaaatgcaaatcacaactggaaatgttcaataaagtatgtgaagccattgtaaccgactatcgcctaaatgcaaatcacaacttaatataccataagcctttttcattttatattgtaaccgactatcgcctaaatgcaaatcacaactccgggcttcaggataacggcacggcaactattgtaaccgactatcgcctaaatgcaaatcacaactttttcctgttgttcttcctgttgattttattgtaaccgactatcgcctaaatgcaaatcacaaccggtgctaaacgtaagattgtaaatcttgtattgtaaccgactatcgcctaaatgcaaatcacaaccgttggctggttgcagtatgcggccgcggcattgtaaccgactatcgcctaaatgcaaatcacaacttggaaaactcactagacgcttcagcaaaaattgtaaccgactatcgcctaaatgcaaatcacaactggacaatacacattcaaacgaatatctccattgtaaccgactatcgcctaaatgcaaatcacaacttccggtactcgtactcatcgtcgtaatcaattgtaaccgactatcgcctaaatgcaaatcacaactatataatcgtcctacttcctttgccaagcattgtaaccgactatcgcctaaatgcaaatcacaacctggttgtcttccttggccccaaaagggcaattgtaaccgactatcgcctaaatgcaaatcacaacttggttggtggcaatatgcggccatggccgattgtaaccgactatcgcctaaatgcaaatcacaacgtcctaagtctactaagtctactaaatttaattgtaaccgactatcgcctaaatgcaaatcacaacccactaaggagttatgttatgtctaaagtattgtaaccgactatcgcctaaatgcaaatcacaacactctctctaaatcgctctctttcacacctattgtaaccgactatcgcctaaatgcaaatcacaactagtgagcctacctttatctttgactgctaattgtaaccgactatcgcctaaatgcaaatcacaacctttgaggattgatatattttctttgtaaaattgtaaccgactatcgcctaaatgcaaatcacaacctcaataacatcggtaaatagatctataaattgtaaccgactatcgcctaaatgcaaatcacaactcaatgatgttggtaatttaggtgttcaatattgtaaccgactatcgcctaaatgcaaatcacaaccgtcttggtttctttaatgctgattcaaagattgtaaccgactatcgcctaaatgcaaatcacaactgaaggataaaccttctcattctgaggctcattgtaaccgactatcgcctaaatgcaaatcacaactcctccccatgctggcttatctgaccgtgcattgtaaccgactatcgcctaaatgcaaatcacaactattaggtgttgccactacattggcactaaattgtaaccgactatcgcctaaatgcaaatcacaactcagatacctgctgttagacatgagcgttcattgtaaccgactatcgcctaaatgtaaatcacaacttccaagaacaattttgctttttccctcgtattgtaaccgactatcgcctaaatgcaaatcacaactacagattctgttcatactactgttaatgattgtaaccgactatcgcctaaatgcaaatcacaacggtgccaacaacggcataacacaacaacaaattgtaaccgactatcgcctaaatgcaaatcacaacctcgtgacgctctccccgagtatgatattgattgtaaccgactatcgcctaaatgcaaatcacaaccggccgcttcggcttatggtgcaaacaagcattgtaaccgactatcgcctaaatgcaaatcacaactgaccgtcctacttcctttgccaagcatgaattgtaaccgactatcgcctaaatgcaaatcacaacttcccgcaatgatgctattgccacacgtgaattgtaaccgactatcgcctaaatgcaaatcacaacgcgtataaaggtgttcgtcgttatttcaaaattgtaaccgactatcgcctaaatgcaaatcacaactcttgtcttgcgctgagagataaaggggatgctacccttttattttttattttaatttctgttaaaataaactcatgccaagacatgctagaatcgtattgtggctttgcttatgttgaaaataatccagttaaggcaaaaatggtagagaatgcaactgattataaatattcaagtgcaatgtgtcacgctgggcttgttaacaatagtcttgtaacggattatgatattggagttttgccaagcgagtatcaggattatttaaaatctatggttggtgttcagcatgataaaactttaaaaataaatacacacaaaggtttgccatgtggcaatgagggttttattcgaaaactaagcgacaaggtgggcagggatttgagttttaaaaaaaggggagagacctaaaaaagggcagcgcccccttttacccagcatatttttttaaacaaaacgactaagaaataggggttattttagtggaagttggttgatttgcctatggttattgttagttttattgttttaaatcaagtggttgtatagtttttaaggggtgactaaataaagcgcgccgctttttggcgtcgcctttgatttttttgttaggcacttttgcccaatgaaaatttgattactgcaccgagaataccaaccaaccaaactaagaacttgttattttgataaaactgttcaaatcttgatttggggcggtaagttttaagctcggcagaaacactgccctttatgaactcaatcataggtgtttcatacctatcggtcttctggatattaacgctcttgggatatcccttgccacgcaatctttgatcaatttcagccatacgctgatatgtttttctcgtgtaggaaaccaataaaccctcggcttcggttagtgtttcttttaagtcttgtgatttttcttgggttaaggtcacgacttcatctataacttttacagtaatatcttcgataaatggttcaatgctatgccaataaatttgacgaatgcttcctgaaaactcaaatccttcgcttgtaatttttgaaccatcaaattttttcacttgaaaaggcttgtctaaattaaagaatgcccaaggggtaatattattcttctcgagagtaccaaaagtatcccttattttcttttccgttcttagataaatggcagattttgacactttatggatttccattaatgttgttcctttgtgttgtattgtgcatattttaacaacttttccatctttccactcttcctttaaataaacacaagatgaatgccatcttgcagacggattgtatatattatcaccgtcaatttgttttatttttttatctttaattatagtttaatacattaccccaaaacctttgacaactttttaaaatttcttatatagagcatcctaagaagccttcgctttttcttgatttaattttatactttcttggtacacatccattggttttttatatgccagtgtttcgtggaatcttctatggttataaaactcaatataatcatctacatcagtgattaactcactaatagattgatattcgttcaaataaattctctcgcattttgcgcttcgccagaagcgctcaatgcaactattatctgtggctctgcctttgccatccatagatattgtaatacccaaatcttttagacgcttagtgt

SEQ ID NO: 684 - DNA, 9966 bp, synthetic construct
  misc_feature 1..9966: note = Synthetic
  source 1..9966: mol_type = other DNA
ttcagaggcacgtatgcgttcttcaaggtgcgattgacataaggtactgctgcaacatggttgaagggatcatttgcgaaagctcgcttttgagaactgttccagccctgcccgcctgatagataggcatcttttaatgccacgacatgatcaacgtcggtggcgctaccacctatccccgtataccaacctaaaacagagcttgatactggtgatgctgatgagtggaacttccagttgtcgcggttgtagcctgtggatacagttgctcctgagccattacattctgttgatttactatctaagtcgcacctaaggcgattaccaaccatctcagtctgcgctctatgacagtggtaaggcttgcttcctgcgtggcatcctgctgaattaagccctcctgaatgacttagtacttgttgtgaagcaataagtgctgcaatcaaaagcacaaaccgagaaaacaaggcaaaacttataagcacttgcgcctctccaaaaaaagtaatacataaatatagccatgtgcaaatcaaacaaaagtactgcctaaggattaataacgacatcaactccgcttaggctgagtgcaactgaatgaacacacaatgaagactaatgcccatctattatcaagcttattgaagctccggaattatagtaatgctgccttgagggagtcccgcatgctcaaagtaatctatccaccatgtttcagccgatctatctactcgcccatcaacatttaagtaataggcaactacaacgtcagcactagaaagagctggctttgccttaacaaggtaattggagaatcgagaattatccttaacagcgtctgctagcgttgggcatgttaacggccgactatgcagaatatctttccgcttacacattctaaagaaggatattattttagaatgttggtaaaagtcagtaatgagtattaacttcctcctagcgccatctttgaaattgtatctggcattcctataaacctctgtaacagcctctaccagcagtgtttggtcagagtttcctgtattttcagaagccattttcttaaccgtttcggctgcagcttctttaaaccatatattttctgccttaatttttgcgataggatctaaaacggtgtcaattttatgctcgggctttggggtacagaaactggtaacaggcataagtgcaaccggtttgttaccaagagccactacagtgtacgattcaccttcagtcgaccacttaaagtcagcaataaaattatcgagcacaaattgcacttgctctgggcgcaaggaatcagtcgtgtcgagaaggacaagagtagacccggatgcacttttatcgcatttggtgccaaaataggccaccttcttttcatgtgatggcgcagcggaattagcaaatgaagctagcaacaaagataccactagcaaactattgggcaatatttttcctaaatatatcattcgatgattcctaagctaagctatgactatgcactaaaaaatatccgccagatctgtcttcggcaacagagccaataggcagcgcaatcttggcagaaagcgttttaactttaaggtcaacgtctgcaattttatctgcaaacacagtattaacttgctcgaattcacgatcaagttctgcaactaactcatctctctttgcgagtctttctttatctgtaagaaagtactgggccacatccaacaacagtatcctgacgtccatctctctctcattaaatagatccggatccaaattgaaaggtttctcgctaatagaagcagatgtgtaattttccaaatagatgtcacatgcctgtttaaactcaacattcattgactcaagtaagttggttaaatcgacatgaattttttccatttcattaattgatgtgctccaaccgtcaattccatccaacgcccagcgacgaactctttttgagcccaaactatactcctgacaggctgatttccattctttgagaacagatgcaatcgttcctgtaaagaccaagcgtgaagtctttgcactgcgatagcggctaccataaccaggatgaggatcatctgaataataccccttgaggtatgccaagacggccaacaccaaacctaccgcagctactaaggcagacgtcatttcgtacaaatctaaatgtgaaaaaggagccagcgctatccgcagagtttcgggggacatggccattgccatagggtcctctagattaattgccctccataatcctaatgctagattcagccacaaaatgaacactacatgagatgcgatgagtaaccacgacataagcctcattagttttgatttagcataaatggctgcaccaatcacttttgagccaatcaagaagcaagaggctatatttacaaaagattgagcaatcgatagcgtatacgcaacgattaagccaccaatctctttaaacattgcggcattcattgaggcttcaataatgaatattaataccaaaacgccatagatagaccagaattttttgttagcattaacaggcattaacgctataccatgatattttttgtacttaataagactgtggttataacctatatagtcttcacccgctgaatctatagtggccagccttgagttataatcaaattctgcaaaattcttagattgagtaatgatttcgctttccaagaccgaggcattaaccctgcctcgaccttcgtcagcaataacttgaagttcatgcagccttgcctgagctttgtctaattgcttatctctaaactgttttcgcttgttacgaataagagcaagtacattgggaagtgcgtgggaatttgtggtttcagcttggtgttgctcaacgagcccatctttagatgcttcttcagccacttgtgctaaatcaatcggtttgtttacatcgaaactaaacataggtacatccttgtgtggcagtaacatgctgttaacacataatgtcaattttgttattgatccgcttgagcatcagaagcgttgtttcaatagcgcatttaattaaggtcccgcaggaactatatatcacaattcgtaggaattattcctaatccaccctcaacactccaacaaagtggagcttgccagtgtgcggcggtgcgttgtctttattgtgacagtgtatagatcaggatttttcatgtatcaatgacggcctcaaattagtagtgtttatagtaagcaccacaaagctttaaggacgtatacatgactattaaaaggataatcattgggttacctataatatttttgtataaagcaagtaacattagatcagtcgtgccatgccttttaatgacttattcatctctgctaccagcttacgcattgcgatcacttctttagttcttagcccatgaacatagcggtggtgatcccttccaaaggcctggttcgtcgcccctgtagaggcccctccatggcgcttgcatcggccgttacgaaggttgcctttatgcttacacaagccccctgagcgcgttttagccccgcaaacgggcaaggtgctgaggtcaaaccgattggccacaatgtccaatattcaatttttcaacaaaacaatccgtcgttagtgtctggaatcagggcaactagccatgcatgacaattttaggaaaaattcctatacgttaggaagtatgctgttaaatgaagcctgaatggcattgggctgtttgaaaagcctttaagagcgtctctaggccgcatctcaaaatttagacattaaaaagcccccgctgggagggcttgggtcgcttagaagcggagcctacgaaaaaacaatttcattggtatgaaaagctatcaatagaccttagtcggttacactaatttagattatacagaagatttaaatatgagcaagaaagttttgggtttggatttaggtagcaattctctaggttgggcattgcttgaggagactgatggctcagtcaacagcattgtcgacattggtagccgtatatttactaaagctgttgaagacaaggtgccaacaccaaaaaatgtaaagcgtagggatatgcgtctaggcaggcgtgtcatacaacgacgttcccgccgaaagcagagaatgctcaactatcttgtttcattaaagctactccccaaagaactacaaggacatactcagcctgaaattattcttaatgagcttggtgatccatacgagttaagggtaaaagcattagacactccgttaaccccacatgaatttggaagaattttattgcactttgttgctaggcgggggttcttaagcacgaaaaaacaagctgcaggggatctaattgatgatccagatactattatatttcttaatgaacttgacaatgagtccgtgggcagcaaagaagagggggcctttaaagcagacataaaagaggtccacgcatcaattgatgcatctggatccagaacattgggcgaatatttgcataaattagcgcagggacagtgcaaaagaaaccgtcaacatgaaggtggacacttacggacagagagaaaaatgtatcaagatgaactggcactcatttggatagaacaggaacaatactttagccacttgcccacagatttcatgtccaaggaccagggggtcctccagattgttttttaccaaagacccttaaagcttaaaaaggatagagttggaacctgttctctagaacctaaaaactatagggcggcaatggctcggcttgaaacccaaaggtttcgttatctacaagatgtcaataatctacagtattttgaacggcataccgatcaatggttaagtattactcatgaagacaaacaaaccctgataaattactttgaacataaccctaaaataacgataaccgcactaaaaaaacaacttggttttgataagttaactaaaataaaccttgaggctaagaatttaaaaggcaatatcacagcatgtgaaataaggtcagtactagatgagcaatgggatcattatacagaggaaaaacaggctgctttagttgaggatttgttatcaatcaagaagaagtcagccttaaaaacaaggcttatatcccattgggggatcgataaatcaatagcaattaagctgtgcctactggagtttgaacccgggcatggaagtctgtcacttaaggccataagaaagttattgccatttttacaacagggccttatttacagcaagaaagattatgccacaggtgaattaggggcacttcaagctgcagggtatcttgatgttgaagaagaacaggcgaattttgataaactaggcccacctgctgaaaccagcaaccccattgttaacaaaggcctgaatgaactgagacgggttgtaaatgcaatcatcaaacaatacggcaagcctgatattattcgtattgaaatggctcgcgatctagagatgaacacaaagcgctacaaggagaatgaggctaggcaacaaaaaaataggaaagaaaatgaaaaagctgttgctgcatacaaaaaattagctctgggtaagtatccaagccatgacgacaaaataaaataccgcctatgggaagatcaaggccattcctgtgcatacagcaataaaaccatcatgctaagccaagtgtttaccgcccaagtagaaatagaccatatcctgccctttaaaaaatcactagacgattcttatatgaataaagtcctgtgttttgtttcggaaaatagagctaaaggagatagaacacccaaagacgtatggggtggtgatgaaaataagtggttacaaattactcaggccattagccgctggaaaggccttgactctaaagtaaagcgtttctatcagacagaagtagaccttcaaaagcgtgattttatagcatcacaattaaatgatactcgctatattgccaaattggccttagattatgttcagcaattaggttgtgacgtgtctgttaccaagggctatgttgtgtctcaaatgcgccaccaatggggctttaacgatttaattggagaaactgataaaaaggaacgcacagatcaccgccaccatgccattgacgctgtagtgattgcagcaacttctaggcagatgtataaaaaagcggtggcccaaattgagcgaaataaactcaacatcgaacgaccttatgaaagcatcaaagatgaattagcagaacaattaaaccaaaccattatttcacatgccagccaaaagaaactatcaggcggactgcatgaagaaacgggtgcagggtttattgaaaagcatggggggttagtctaccggaaaaacttggcgcctgattttactgttaagaatgcaaacagcattgttgatgaaacagtaagggagctggttcttgctcacctactgaagcatgataacgagccaaagaaggcttttgctgatgggttcattgtttaccataaggatgataaaacccctattaagcgagtacgagtgctccagtctaagacgaccaaagagaagcttgagcaaagcaaatttggcatccgcgataggtcaggcaaaatattcaagtatatggcctatggcaacatgcatcatgtcgaggttgtgcagcacaatgaaacggggaagtataaaggcgcatttgtcaccatgatggaagctagccaccgagccaaaggtatccgcagcaaactaaaccccgaaggggaggcacaggctattgtaaaaagggaccatggcagtgagtggaaatttgtaatggcgctccatatcaatgatatagtcagtatcgataatggcgaaggccagttgttttaccgtgtacaaaaacttgactctgcgaacaatcgattttatttaagggcacatcaagcctctactttaaataataaagaagacgcacttgctgttacgattaaccaagaaaactttgggcgccactctttaaaggtacatcagattaatgctattggtatttttgctgatgattaagcgcattattgatattagtgacggggcttatgttcacttaaaacatcaacaattggtcattgaaaaacagggcgagattgttggtcaagtgcctatagaagatctgggggttttgattttacagcacccagccattgttatgacccagcaattgatagtggcctgtcagaagaataaagttgtgattattttttgtgatgaaaagcacctaccatactccgtaatactaccgattggggaaggccacaccctgcataataaaatcctcaaacaacaaatggctataagtgaacccacccgaaagcgcctatggcagcaaatagtgcaacataaaatcaaacaacaagagcaaaccttggtgatgctaaataaagaatccactcggttaaactatctatctgctcaggtaaaaacaggtgattctggcaactgtgaggccattgcggcacaagcctactggaagcttttatttggcaaggcgtttaaacgtgatgtagatttagatggcattaatagtatattaaactatggctatgcaattattagagctgtggtggcccgcagcatttgtggtgcaggattgcatcctacattaggactattccatacgaaccaatataatgcgctgtgtctggccgatgacctaatggagccgtttaggccttgggtagattatgtggtttataaaatggcgtccactagcagtgacgttataatcaatcagcaaagtaagcagacgcttttggggctgatgagtgagactgttttatataaaaaaaaggcaatgtcttttatggtagcgttacattaccttatggcagatttaaaacgctgttatagcaatgggataaaaacattacactaccctttacttctagcacgagtacctaggtgaaatttggtggtcttcaggtaatgtggttaattgtaatgtttgacttgcccacggacacaaaaaaagcacggaaagaatatacacattttagaaagtttttgttaaacgatggttttaccatgatgcagtattcgatctacatgcgccacagtagcagcagcgagaatgccgtggttcacgcaaaacgagtaaaagttcacttgcctgatgatggtgaagtgcgaatcattaggattacagaccagcaatttgggaaaatagaagttttttatggaaaaaaacgtcaaaagccaacagaagcaccccttcaactccagtttttctagagctaaagaagaaaaaacctctatttttcattacgttatgtgcaggcaagtgtaaccgactaaggtctatctgcaaatcacaactaatcgaggtcgatgatagatcacgaaatgagtgtaaccgactaaggtctatctgcaaatcacaactgcatgaacaacgactacgcgcgcaaattcagtgtaaccgactaaggtctatctgcaaatcacaactaggtgtcatcagttaaaccttgatttgctagtgtaaccgactaaggtctatctgcaaatcacaactaggctggtgctgtgagtccgattcgtgaaagtgtaaccgactaaggtctatctgcaaatcacaacaaaggcgaggcaatgtgggttccctgcctaagtgtaaccgactaaggtctatctgcaaatcacaactgtctggtgcaatatctggcagcgcagcaaagtgtaaccgactaaggtctatctgcaaatcacaacatgacctcaccctatccaaacaacaagtcaagtgtaaccgactaaggtctatctgcaaatcacaacatagcagtattcctaggttggtttgtgttaagtgtaaccgactaaggtctatctgcaaatcacaacgaaagacttcatggccaaccatggcgaggagttgccagtgtaaccgactaaggtctatctgcaaatcacaacagacgagctgcaacgccgagggcaaaaactagtgtaaccgactaaggtctatctgcaaatcacaacataagctcgcgcttcaagatgtggttcggcagtgtaaccgactaaggtctatctgcaaatcacaacgtacagatcatcgtctagcgcagtggtgacagtgtaaccgactaaggtctatctgcaaatcacaacgttaatcaaggtgttggcaattcgctgggtagtgtaaccgactaaggtctatctgcaaatcacaactgtgcagattggacaggctatccacgaccaagtgtaaccgactaaggtctatctgcaaatcacaacacttcagacttggtgtagtgatcagcaaccagtgtaaccgactaaggtctatctgcaaatcacaacggcggcagcagaaaagtgagcgaagaaaacagtgtaaccgactaaggtctatctgcaaatcacaactaagttcatcacgtacatagtcacggcagcagtgtaaccgactaaggtctagctattgattcagtgctccattcatagagttgccaaaagttttgggagtttgagtcaggttgcttatgtaacattgatgaagtagaaaatagttggtattccgaagccccaaaatactcagattgttaaaggctcattattagatcagctctatacgatctttcaatgatttattcatctctgctaccagcttacgcattgcgattatttcttgagtcctaaggccgtgaacatacctatgatggtccttcccaaaggccaggttcttcggccctgtagatgccccaccgtggcgcttacaccgaccattacgaaggttgcctttatgcttacacaagccccctgagcgcgttctagccccacaggcgggcaaagtgtttaggtcaaaccgattggccgctacatgggctttatagtcctttttaagcattaacacccaccccctcatacacaccaatggcagcctggccaccggcttcaatattgactttttcaacaatgattttttgttggcctttgcctttcatccgttcaagtgtattgatttggtctatgcctaa

SEQ ID NO: 685 - DNA, 9239 bp, synthetic construct
  misc_feature 1..9239: note = Synthetic
  source 1..9239: mol_type = other DNA
gaagccgtgctactgtctccagcttgcgccagttttgatatgtttgatgattttgagcatcgggggcgggtgtttaaagattgtgtaactgagataatttagacaataaaaaacccccgcaaggagggttttggtcgctttagaaagcggagcctacgaaaaataaatttcattggtatgaaaagcaaatttaataagcgatagtcggttacaatcagtttacattataacttgaaaaaaatataaaattatatttttttcaaaaaaaatcaagtaagattattcagagtttttgagtggttttacatttattcaactattgttaatgcaaatcacaactactatataaatatagttaaatttaaaatttaattgtatttatatagtagttttaattagcaggcaatgcttcatagtatgaaaaatgttatgatataattttctatcaaaatttggaaattttaaagaatttattgtaatcaatcaaaaatttagacactaaactaaggcagagtaatttttatttataacacttatgcgtgtgttgaagcaatttaattaatttgaaataaggggagagaggtgaagaaaatattaggattagatttgggatcaaactcaattggctgggctttgatgaatgaaacggatggcagagttaatcaaattatagacttaggttcgcgtatttttaataaggcagtggaagagaaggtgcctacacccaaaaatcaaaaacgccgagatatgagattagggcgacgagttctacagcgccgagcaagacgcaagcaaagaatggctaattatttaatttcacttgatttattacctcaagaattaagtaataattttgggcaagaaaaattacttaatgagttgggtgacccttatgaactccgcaccaagggtttggatgagcaattaacatcccatcaacttggtagagtgttattgcactttgtagcaagacgaggatttttatccagtaaaaaacaaatagcaggtgatttagtagatgaccctgatacacaaacttatttatcaacacttgacaacaagaaagctaaagatgaggaggggcaatttaaagcggatattgccgaagtttatcaagcaattaaagataataatgccagaactttaggtgaatacttgtttaatcttgaggttggaaaagttaagcgcaatcgttcgcatgatggcgggcatttgcgtactgatagagcgatgtataaagatgaattatataaaatttgggaaaagcaacaatcgtattttgatttgccagatgagtttattaacgaagtggaaaagattattttttatcaacgccctttgaaactcaaaaaagatagggtgggcaaatgctcgctagaaacaaaacattatcgagctaatacggcaagattagaggtgcaaagatttagatatatgcaagatgtgaataatttggaatattttgaacgccatagcgagcaagatcttaaattgagtgacaaacaaaaagaaaaattaagaaactattttgagcatcattctaaaattacaataactgaattaaaaaaagaattaggtctagataagcccactaaaatcaacttagaggctaaaaacttgaagggtaatattacggcatgtgaaatccgtactgtaattggcaatatttgggacgaatattcagatgaaaagcaatctcaattatttgaagatttatttactattaagaaaaaatcttcacttaaggctcgcttaattactcattgggattttgataaacaaacagcggttaaactttgtttattagaatttgaaccttcacactctaatctttcattgaaggctattaaacgcttgttacctcatttagaaaaagggttgacttatgacaaagcaagggttgagtgtggctatgattatgaggttaaagaaattgtggcattagataaattgccagcaccacctgagacctctaatccaattgtaaataaaggtttacacgagttacgccgtgtggttaacgcccttattaaacaatacggcaagcctgatattgtgcgcattgaaatggcacgcgatttggaaatgaatactaagcgttacaaagacaatgaaatacgacaaagaaaaaatcagaaggctaacgaagaagcgactgaagtctttaggcaagaaacaagtagaaaatatccatcacatgatgaaaaaacccgttatcgtttatggaaagatcaaagtgaacgctgtgcgtatagcggcaaagccattgcgcgttgtcaggttttttcagcagagtgtgagattgatcatattttgccatttaaaaaatcgcttgatgatagttacatgaataaagttttatgcttcgaaaaagaaaaccgcaataagggtgataaaacaccagttgatgcttttggtggtgacaatgaacaatggaatcaaattacacatgccattgccaattgggataaatctttaaagtcaaaaatagcaagattctataccaaagaggaagatttaggaaagcgagattttatctctaatcagttgaatgacactcgctacatttctcgcttagcacaggattatatgcgtgaattaggttgtgatgtgagtgttaccaaaggtttggtggtaagtaaaatccgtcaccaatggggttttaataatttgattggtgagaccgataaaaaagaacgaactgatcatcggcatcatgccattgatgcagttgtgattgctagcacttctaggggcttatatcagcaagctgctatgcaaattgaatgcgacaagctgaaaatttcccagccgtatgataatattttgcaagaattaggtgaaaaattaaaacatatgattgtatcgcacatgccacaatgcaaactatcaagtagtttgcatgaagaaactggtgctgggtatatagcaaagcatggtggtttggtttatcgaaaaacactcaatccagaatttactatcaaaaatgcaatgagtattgtggatgagcaagttaaaaatattgttttagagcatattgaaaatcatgataacagcaaagaagcgtttagtgagaaaaacttacaaaccttaaaattaggtaaaaatcctattaagcgtgtaagagttttgcaatccaaaataaaagccactaaaaagcaaaccgcagaagatattttgcaacaaaccaagtttggcgttaaagacaaatcgggcaaaatttttaagtatatgtcgtatggcaatactcatcatgttgagatcattaaaaatcttaaaacaaataaaattaaagctgaatttgtaactatgatggaggcatcaaatagggcgaaaggtattaatatatcaaagcaaccgattatcaaaaccaaccatggtgatgaatgggaatttttaatggctttgcatattaatgatacggttagtatagaaaaaaacgatggtgattttttttatagagtgcaacaactagacatacaaaataaaaaatttgttttaaggttgggtatagcatcaacgctccaaaataaaaacgaagaactgtctgttggcattaataaagaaaattttgataaatataaaataaatttacacaaggtcaatgctattggcagattaattgatgattaagcgtattattgagatatcaaatcctagttatttacatctcaaaaacaagcaactatttattgagcaaaatcatgaaatagtggcacaggtgccaatagaagatatgggtgtgctgattttagagcatagcgctattagcattacgcagcctttgattattgaatgtcaaaaaaataatacggccattattttttgtaatgaaaagcatttgccatattccactattttgccaattgctgagggcaacaatttgcatcaaaaaatccttaaacagcagattaacattagtgaccctgtgcgtaaaagattgtggaagcaaatcgttcagcaaaaaattaaaaaccaagctagtacacttgagcaatttgacaagaaatattcctatttagaacaattagcaagtaaagtgaaatcaggtgatgtgggtaatcttgaaggtttagccgcacaatattattggaaagcgttatttggtaaaaaatttattcgcaatcaaaatgccaacgatattaatgcagttttgaattatggctattcaattattcgtgcaatgattgccagaagtattgtggcaagtggtttacaccctgctattggcttatttcaccataatcaatacaatggactatgtttggcagatgatttaatggagccatttcgcccttgggtagacagtattgcttatcaattgcatcaggagaatgcagatgttagcattaccaaagaaattaaaattccttttttggatttaatcagcaaaagcgttgaatttaaaaataaaaaaatgccactaatggtgtcgttgcattatttaatggcagatttaaagcgaaattttgtcaaggaaagtaaaaaaatagtttacccatctttgtaatgtttggcggactttatgccatgtggataatcgtaatgtttgatttgcctactgaggatgaaagagctaaacgagattatcgtttctttcgtaaaatgttgcttgaagatggttttagcatgatgcaatactcggtgtatatgcgtcattctagtagcgaagaaaatgcacaagttcatgtcaatcgagtaaaaatgcatttaccagcagacggcgaggtacgcattatcaaaataacagataaacagtttggacgaattgaggttttttacggaaaaaaacgtcgacccatcgaaaaagcaccagatcaattatcatttttttgactagaaaaaaatgataaaagactgatattaaggcattttaggtaaggcgattgtaaccgactatcgcctaaatgcaaatcacaactttggcggggttgccctgctattcgtggttattgtaaccgactatcgcctaaatgcaaatcacaacctcgttcaggttctcgtggtggtatccgtcattgtaaccgactatcgcctaaatgcaaatcacaacacaaacaacttgacactttatttactaaaaattgtaaccgactatcgcctaaatgcaaatcacaactttttatttgttcttgcaggtgattcgttaattgtaaccgactatcgcctaaatgcaaatcacaacagtcgaagggtcgggtttttcaaacatcgcattgtaaccgactatcgcctaaatgcaaatcacaactaaagttgatcaactttctaaagtctctcaattgtaaccgactatcgcctaaatgcaaatcacaacccaaatattcgatttaagcaataattatttattgtaaccgactatcgcctaaatgcaaatcacaacaagggtttttaactggtgctggtacttcggattgtaaccgactatcgcctaaatgcaaatcacaactagacacacaaatatatcacaaatgcgaagattgtaaccgactatcgcctaaatgcaaatcacaacttccttctcggagcaatgtattacgcctcatattgtaaccgactatcgcctaaatgcaaatcacaacttaattattctttgatatgtcaatgtttcgattgtaaccgactatcgcctaaatgcaaatcacaactgcaaggcattaagtatccctttttttatattgtaaccgactatcgcctaaatgcaaatcacaacattgagtttttaatcaagacagaaaacaaaattgtaaccgactatcgcctaaatgcaaatcacaactaggcgttctggtggtgctcctggtaatctattgtaaccgactatcgcctaaatgcaaatcacaactgggtgttgggtgtgggtgttaatgtgccaattgtaaccgactatcgcctaaatgcaaatcacaacgtggcgccagcggttgcgatagcgggtaaaattgtaaccgactatcgcctaaatgcaaatcacaacaagtctaagtacgctatagataacgaaggtattgtaaccgactatcgcctaaatgcaaatcacaacctgaccattgcttacattccagttctttaaattgtaaccgactatcgcctaaatgcaaatcacaacctatctttatcaaccctcttagcattatcaattgtaaccgactatcgcctaaatgcaaatcacaacttgtttgttgttcttggtttgattgcgtccattgtaaccgactatcgcctaaatgcaaatcacaacttaatgattccgcttctgccgtttctgccgattgtaaccgactatcgcctaaatgcaaatcacaactaaagtttttaattttggtttatttttttattgtaaccgactatcgcctaaatgcaaatcacaacttcaatacatttatgacgactgcgagacatattgtaaccgactatcgcctaaatgcaaatcacaacgtaagaaatataatatactgccaaagttgtattgtaaccgactatcgcctaaatgcaaatcacaaccgatgatggctgttcaccattgtgacttacattgtaaccgactatcgcctaaatgcaaatcacaaccatcgataactattgataaggcgcgtgataattgtaaccgactatcgcctaaatgcaaatcacaactctagacatcattctaaaagggatttcgctattgtaaccgactatcgcctaaatgcaaatcacaactaaagaggcgttgaatgataagattgaattattgtaaccgactatcgcctaaatgcaaatcacaactttgtcattgttttaccctcattatttggtattgtaaccgactatcgcctaaatgcaaatcacaacatacgcctcatcgccaaggtcttctctgtcattgtaaccgactatcgcctaaatgcaaatcacaactgtctaatgtatatggttctgttcttggtaattgtaaccgactatcgcctaaatgcaaatcacaactatattggtggtgccaatgatatttctggattgtaaccgactatcgcctaaatgcaaatcacaacccgccggcaggtgaactaaattgttctgaattgtaaccgactatcgcctaaatgcaaatcacaactatgcacgcataattgagtacattattcttattgtaaccgactatcgcctaaatgcaaatcacaacacgctagaatcagaccccttgtcaaggcatattgtaaccgactatcgcctaaatgcaaatcacaacgcatcaaagagaagagcggcaaaaaatagaattgtaaccgactatcgcctaaatgcaaatcacaacaaacaagccagcactagaaatgccaccataattgtaaccgactatcgcctaaatgcaaatcacaacattattaatctttgatatgtcaatgtttcgattgtaaccgactatcgcctaaatgcaaatcacaaccaaaaccaaattttgcaaaatattaaaaatattgtaaccgactatcgcctaaatgcaaatcacaaccgcattatacacacataataagaattgtattgtaaccgactatcgcctaaatgcaaatcacaaccatagcagtcaccgcctttatttcacttggattgtaaccgactatcgcctaaatgcaaatcacaactatgatagtgctagcaagactcagccaactattgtaaccgactatcgcctaaatgcaaatcacaacggcgtttatattctataaaaattcgttattattgtaaccgactatcgcctaaatgcaaatcacaaccgcaagtctcatcaacattcttttaaagaaattgtaaccgactatcgcctaaatgcaaatcacaacacatgacaatgcaacaactaaaagcacaaattgtaaccgactatcgcctaaatgcaaatcacaactggggaaatcttcgctcgtataagtattcattgtaaccgactatcgcctaaatgcaaatcacaacgatgacacagaagccattgatgttgacacaattgtaaccgactatcgcctaaatgcaaatcacaaccggaagtaacaatggtgaacagccatcatattgtaaccgactatcgcctaaatgcaaatcacaacgccgcctcgtcaatataaatcataatctttattgtaaccgactatcgcctaaatgcaaatcacaactcctccttaggtttaagccagtttgaccacattgtaacgactatcgcctaaatgcaaatcacaactactctatttttatcagacatataatacccattgtaaccgactatcgcctaaatgcaaatcacaacgtaacaaagttattataattatgtaatgtaattgcaaccgactatcacctaaaggttaaagattggtcggttagtttttcgctaccatttaaaaatttatcagaacagtaaggattaatgggtggttgttaaaccactctttaacaatcacaaacaagatataaaaaatagatatctatctgtagaaatgcaaataatttaccaaaaggaatgtcaataaaatgaacttaactgttattatccccaaccaaagaaaggcactatttcttgctaaaaagcaactgagtgagttggtttatgatgctgtgaatttagagggtataaaatatactttgccagaagtgcaaactttattagatggggtaacagtgggcgggcataggcaaatagatgcgttaataacacagaatcagattgaagcatggaggtttttgtttaaggtaattgaagataagagttttgatttatctgctgaatttgtgtgccaattgcaagaaaaagttgtcaagcgtgagacgcttacttggggtgaatttagagagagtggtgttagtattgcaggtacaaattatctaccgcctaatcataaagagttgcccaatttgtggcaaaaactaaaacaaaaatctatgccaaatgatattgacggtatttatcaatatgccatcagtttattcttacaaatggcacgaattcaatttttctatgatagtaacaagcgtacaggtaggctaataatgaatggcatattgcttaaaaatggtttgcctgttattaatttgccagttagtaagcagttggaatttaatcaattaatgctagatttttattcaagtaataacgaggtgccaatgcaagcgctaatggtgtcttgtcttggtgccaagtatttaaagataatggctgaaacaaatgcacgctcatttaacacttagtgaagacgggcaatttattggcacag

SEQ ID NO: 686 - DNA, 8508 bp, synthetic construct
  source 1..8508: mol_type = other DNA
  misc_feature 1..8508: note = Synthetic
caccggaaaaactcactgttttacaagacggagcatggcgcttacatcggggacttattcatgagtttgattcacacctgcaatctgatgcatgttaaccctctggattatttggttacacttcaaaaatattctgccagggtatttaaagatccttcccagtggatgccctggaattatggggctgctgtggctgaggcactgcaaactacctgagtttttttactcctcccatttattaatagacgaaaggcatgatcctttgccgccatgctccatccgtgctaattgcaatacaatctggaaccaataataacacaccagagaaaaaattcatgcatgcttgccgaagggacacggaagttctggttggatgaaatcaaagaccggagacaagccgttaaagatggacgtgcaaaattaatcgattttgatagctcttaccatgaagattagaattcatgaattggcagcaaaaaaatttgatgacgcaattgaatggtacgatcagcagtctgaaggtttagggaaacggtttaaaaaaattgttgcaaaccgtattgaaaaaataagaaataatcccggatgatatctaaaagaatcggtcatatttcctcgaagaatcaatggaaggataaaaatatgaaattgtctaaggaatacaaaattaaaatagagcaggaatttgattttgtaataaaaaaaatgctcgaaagtgaaaatccagatcaaatgatgtattatttttcaggtatatatggattactccagaggattttaaattttgaatattcggatgagttattattcacatattttattattgaaagatcttgcaaggatatagccaatcaattaagtgccttacgtcagggaagcccagttccaacatttcataaaaattttgggtccaaactaatagaagtaacaaaagaattgagagatagttttttcaattcaaaacatcgagttgaaagtctaaaaaaattgatcgttttagcatatacctgcactggaaacggattttatttaacagaaaaaaatacaattgaaatatttgcagttacaaaaaaacttgaggggaaagattaaactttaaaaatcatgtttcccaacaaagtattattatcctctgctcagactatccaagggacagaattctttaagatacaaaaaatattggaaacgataactcgaacaaaaatcaagccaggtgcatgcaagtaaacttgactttttgatcagtgcaaataccatcctcagttatatcttgtcctaattttcatttaccgatatagttgaaaagaataatgcttttggctgtgacaagttaaggaatagatacgttggctaaaaaaaagttgaaatgctatattatcgctgggccaaacggggctgggaaaacaacattcgctgaaaattttcttccggttgaagcagagtgcctgaattttataaacgccgacctaattgcaaaagggatcgcaccttttaatccagagagagtcgctttggaagccggaaaattttttttgaaaagaatgaatagtattgtttcaaatcgagagtcttttgcgtttgagacgacattaagcggtttaaattatattaaaagcattaaagaatggaaaaaaactggttatgaagtaattttatattttcttagcctccctaatgaagagatggccatagaacgtgttcaattacgagttgcccagggtggacataatgtccctgtggatgtcattaaaagaagatataagcggggtggggaaaatttccaaaagcattataaggacctggtcgatgcctgggttatttttgataattcaggaaatattcctttggtattagaggaaaaagaatgaaaaaagaatcatattcaaaattagctttaaatgctatgcacagggcatcaaaagaggcaattgaaaaagctgcaaatttagatttaaaaattcccgaatggaaagatggcaaaatagtttttgtagatgctaaagaaaaattgaaaaaactaagctattcttgagtattgaaaggtgatccagtgctctgccactcaaagttaccaaacgaattcttgattgctctttgaaataaaccgggcacaggaatttaagaagctggcccggtcatccttcgagttatccatgcaggtgatcaatccattgtattgcctctgaatcacttatttttccaagatatttttgtgtagtggctaaatttgaatggcgtaaaagaattttgctgacaatttcaagtggagtgcctgaacgagatgcatatgtagcagcatgccgtcgaagatcatgtggacggacctggatatccagtatttcatcggcttttttaacaaccagtcgtgccccggcataagttattggaaaaattttgcaatcatatctaatgcccttatcccggatatattttttcatacggtctattactttctgaggcaagaatacagcttctgacggcctgccgattttgggtgattggacaataaccttgcgatcttcaatatccataggcgttaaattcagaacttcaccgatcctcatacaaccacgggccattagttcaagcattattctgtttctctgattctccgttctgaaaatgatttcatcaactacatccttttcaagaattttaaactggatatttttcccggctctgaaaagtctttttagtgcttggttatcacatggattcttgaaatccgggtcaatggaatttttaatgtaattgaaaaaaacggcgaggagtgtaaatcttaattttttggtgttctgtttggtgttaccggaaactttggtcataaattccaaaatatcgtcagaagttatagataatagattaacatctccgaaatgtttttgaaacctgctgagaatgaattcataattccggatagtatttttttttaacgttcaatttctgataattgaaaaactggtttatagtttttgaaattttcatagtgcccctccgtttttaatggttttgatgaattacagtgatagaaaaaatgccatgaactgttatcaaggatatcaaaaatataatgaagccacaaattgtagaaaaaatattctggtggatgcaagtagtcataactatattgagtaagcccccggctttgccggggagactcccaaagtttgacatttccgggaatatacgaaagcctcctataatgtgaaccgctcaaagatcacaagaaaaggaggctttcgatgaacaattataataagctaaaccatacaacatatgattgcaagtatcatctcatttggattccaaaatatcggaaaaaggttatttacggtaatctaagaagatatcttggagaggttttgagagaactggcattgcaaaaggaattaaatataatagaagggcatcttatgggagaccatgtccacctgttgatatcaattcctccgaaatatgcagtgtctcaagtcgtcggttatataaaaggtaaaagtgcaatacatattgatagaacgtattcagggcgacggcataattttacaggccaaaatttttgggccagagggtattttgtatcaaccgttggcagagatgaagagacagtaaaaaaatacatcaagaaacaagaagaggccgatcgaaaaatagatcaactgaaattgttttgaccacctttaggtggttcacgcttttatgaccgctttaagcggttcacaatacaagcctccggctttgccggaggtatggtgacttttcggtttgatacagaacaaagctaaatcctatgaatataaagagatcatatttctgtattcttgacttcattccgtcattttaatagaagtaattattataatattaaacaaactgaacggttagtataaaaaaagcccccgctgggagggcttgggtcgcgtaaaagcgttgcctacgaaataacaatttcattggtatgaaaagttagataggccttggtcgattacactgtacattgattagcatgggggattaaaatgttcaagcaaaaaattctaggattggatatgggcagcaattccattgggtgggcattgcttgaaggagaagatggtgtgccgactggcgttattgatgcaggttgccggatattcaataaatccgtggaagaaaaaacgcctactcccaaaaatgtaaagcggcgtgataaacgtctttcccgacgagttattcaacgcaggtcccgacgaaaaaaacggatgcaaaattatcttataaaattaaaattactgcctgaaacgctcttaaaaaatcctcaacctgaaattattttaaacagtcttggcaatccctatcttcttaggacgaaagccctggatcataaattatcaccatatgaacttggcagggtgtttctacacttggtccagcgccgcggatttttaagcagtaaaaaaacattacttggagacatgattgatgatcctgatgttttatcggtgctggctgaagaagacgatacactctctgattcgcagagaaaagacaaagaggaaactgcatttaaacaggatatttctgaattcagaaatactataaaaaaagcagattgcagaacattgggagaatttttagcaggccttgatcaccatgactgtaaacgaaacagaagcagagaagggaggcatcttcggacagaccgacagatgtataaagatgaattgaacctgatctggaaagagcaattaaagtatcatgatattcttgataaaaatgtaagagcggaaattgaacagattattttttttcaacggcctttaagactgaaatccggacgacagggaaactgttccctggaaccattaaaaaagcgtgcccgcatgggaaggttggaagtccaaaaattcaggtatcttcaggatatcaataatcttcaataccgactgcacggtgaatataaatggatttctctggaaaaagatcaaagaaaaagcttggttgatctttttgaacatgtccagtcctccagttttagaaaaattagaactgcactcaaactcaaaggtgcccaatttaatttggaaacagatgttaaaaaactcaatgggaacacaactgccgttaaaatcagaaacatactgcccgattgggatgaatggcctggtgataggcagtctgctctcgtagaagatttaattacaataatgaaaaaatcggttttaaataaaagattaacaggtcactggggtttttcattaaaaactgctgtacagctttgcctggttgaacttgagccaggtcataacaacctgtcctcaaaggcgattaaaaagctcttgccttttcttgagcagggacaaatttattctgaagccaggatcagtgctggatatggatatgaaattaaaaaaactgatgagcgggatcgtttaggtcccccacctgagattcccaatcccattgtcagtaaagggttgcatgaacttcggcgtatcgtcaatgcgataattgcccatcatgggaaaccagatataatccgtattgaaatggcccgtgatttggaaatgaacactcaaaaatataaaaagtttaaaaaacagcagaaagcaaataccaaagccaacgatgaggcagtgaataaatacagggaaatgcgggatcaaaatccgcatcttcatctttctgcatatcccagtcgggatgaaaaactgcgttaccggttatggaaagaacaggatggacgatgtgcgtacagtaatatttctataatgcttccaaccctcttcagttctgaggcagaaatcgaccatattatcccctacagcctgtcacttaatgattcatatatgaacaaggttgtctgtttgtcaacggagaatcggtataaagggcaacgaaccccgattgacgcatttggcggcaataagaaaaaatggaaccagatcaccgaggcagttgaaaattggccaaagaatttaaggtcaaaaaaagaccggtttcattttacagccgaagatatagtggaacgtgattttatatcgagtcagctcaatgatacccgctatatatgcaaagaggcattgacatacctgaatcagctgggaaatgaggtcaccaccacaaaaggttttcttgtctcctggatgcggcacatgtggggattgaacagtcttattgggaaaaccgaccataaagaacgcacggatcatcggcatcatacacttgatgcagtggtgattgcctgcattgaccgaaaatttcatacaacactggtaaaggcagcaaaaattatagaacagaatcaacttgaattaaaaacaagaaagcttcccattcctctgccttgggaaacaatccgcaccgatacggatcttgttcttaaaaaattaatagtttcccatgctccccaaaaaaaagtgtcaggggagttgcacgaggaaacaggggcaggcttcataaaaggacttgggaatgtttaccgtaaagaccttgatgggaaattcacagtgggcaaagcaaaggacatcattgatcccgaagtaaaagagatcgtggttaagcatctttccaaatttgataataaacccaaggatgcatttgcccaaggggaaaccgtttatcataaggatgggaaaacccctattaaaagggttcgtataattcagtcaaaaactaacttgaaaaaattggaaaaacgaaagttcggcgtcagaaataaacagggcgatatttttaaatggatgccatatggcaatctgcatcatgtagaaattataaagaataaagatacagagacttattcaggcgtatttgtcactatgatggaagcccgacgaagggctatgacaaatacaaaacgagcacataaaaagaggataaatccagaatcaataatcaaaatcaaccatggtcctgaaacgcaatttatcacagcattgtgcaaaaaggacctggttagtattacatataaaaaaggagaacgtcgaatatacagggtgcagaaattggatggccctcctaacaaccgtataagattacgtttgcacacagcagcaactgataagaataacgcagagacattgccagatcgagaatcaaccattccggctttaataaaaaaaaaaatgaaacgaatcaatgttaatgttttagggaaactattggatgattaaacggaccattgacatagaaaatccatcatacttgcggattaaatttaatcagctgatcattgaacaaaaaaaacagattgttgcgcaaattccggtagaagatatcggtatcttaatactacagcatccggctatcactatgacacaggcagtagtgatctcgtgccaggagaataacactgttcttgtattttgtgacagtcgccgactcccgatttcagtttcattacctattaccagtgccaacagccttcacagcacgattcttcagaaacagctgaccgtaacccctgtcaggaaaaaacaaatctggaaacaggttgttcaacaaaagatcatacagcaaagtgagaccttgaaacgttttggcaaagaacatgaaaaagtggcattaatagccaggagagtccaatccggcgataaaagcaattgtgagtcccaagcagcacaaagatactggcgtttattatttggtgactcttttaggcgagataccactttagaaggcgtgaatgttcttctcaattatgggtatgcaattgtaagggccatggttgcacgggcaattgttgggtccggccttcatccagctttagggatttatcatcataatcagtacaatggtttaaatttggcagatgacctgatggaacctttcaggccatgggtggatcaactggtatttcagttgtcatcccaagataagtttgaaataaataaagatacaaagcaagtattactacaggttccggcacaaaaggtgaactacaatggtaaaattatgccttttatggtgtcctgtcattatcttattgcagaccttaaacggatctaccatgataaatcgttaaaacttaaataccctgaactggataaaccaatatcatgttaacttttggcgggcttaattccatgtggataattgtcttatttgatttgccgacaaaaacaaaaattgaaaggaaacggtatactctgttccggaaaagattaatgaaaggcggtttttcaatgatgcagtattctgtatatatgcgtcattgtgccagtgatgaaaatgcacgagtccatgttcatcgggtaaaaaataatttgcctccggatggagaagtacgtattataaagataacagacaagcagtttgccaggattgaagtgttttatggaaaaaaacaaaaaccaacggaaaaacctcctgctcagatggagcttttttaaattctaaaacccatctttacccaatgatttaaaatggttatttgcaagatagtgtaaccgaccaaggcctatctgcaaatcacaactaacagacaattcaaagaattaatagcaaaagtgtaaccgaccaaggcctatc

SEQ ID NO: 687 - DNA, 7082 bp, synthetic construct
  source 1..7082: mol_type = other DNA
  misc_feature 1..7082: note = Synthetic
taggtctaattattattgatgagcaacatcggtttggtgtcaatcaacgtatggctctgcgagataaaggtcaacaaggtaatatgcgaccccatcaattagtgatgaccgcgaccccgatacctagaactttagccatgttgcaatactctgatttggatgtgtctattattgatgagctaccacccggtagaaagcctattgttacgagtgttattcctgcagaacgccgagctgatgtgattgataggattaatagctgggtagaaaaaggtcggcaggtgtattgggtgtgcacgttgattgaagaatctgaagtattagagtgtgaagccgctgagaaaacagccgagttattaaccttggctttgcctaaagtacgcgttgctttaattcatggtcgcatgaagagcgcagataaagagttagtgatgcaggcctttaaatatcatcaagtagatttgttggtcgctacaacagtgatagaggtgggcgttgatgtgcctaatgctggcttaatggtgatagaaaatccagagcgcttgggattatcacaattgcatcagttacggggtcgggtggggcgaggtgacggtgatagttattgcttgttgatgtatcaaacgcccttgtctgatgtggctaggcaacgcttaggcattttacgtgatagtaatgatggctttgtcattgcagaaaaagatttagagttacgtgggccaggtgaggtgatgggtactcgtcaaacgggtgccatcagttttagaatagccgatttagcgagagatgcagatttgttagatacggttcataaaatcgcagaagaaatttttacaaactcgccgcaagttatacaacctttgtgtaatcgatggctgggggcatcaacggattatgcagaggtttagattagcttgacgacaaaaagtgttttatttaatgaagagccacagtggttagatagtcggcaagatcttcggcataaattaccagaggctatccagtcttgggtctatgagtcagactccttaactcaacgtttgcgaaattattatggttcaggtgtcggcgtaaaagttttactgcagtgttggagaacaccttatttaagtgaatatcgattacttaatatcccgagtcatgaacatgtcttaacccgagaagtgttgttgcatatcaagggtaagcctttaatcttagctagaacggttatccctagagatactgttaaaacggctaaaagtaatttatctaaattaggcagtcgccccttgggagaaattatattctcttacccaaaattagagcgtattgctatggatgtaacactcatcaagttaccgacctggaaaacgagtcttttagatcaaatagcgataaccgattctatttggggaagacgaactgtatatagtatcgctaataaacacatgttagtcagtgagttctttttacctgaagtattgcatgaatttaaataacaaaatgcggtataatttactcatattgggatgttagctcagttggtagagcagaagactcttaatctttgggtcccgagttcgagcctcggacgtcccaccaatattattaaaggtttagagtaaaatctaggccttttttattgcctgaaattcgttatggcgcacttcaaaataaacacccgcaataaacaataagatcaactcacaaaaaaagccggtattacccgaccctgcttactgatgcctgtttccaaattaaaccaaatttacccagcacccaaagctcgccccccatactcccgtttttggattgcattctgatgttgacattaaatgttatatctaaatatctctggaaatattattatgcttcaacttaagtattaattatgatattaatacagtgatataaagagacgtagggaagagtattgcaaaaccgataggcaataaaaagcccccttaagttttactttgcgagggctatggtcgcttgaaagcgttgcctacgaaaaacaatttcattggtatgaaaagcaaataggctatagttggttacactatgggtaatagaatatagataaggaagcaaatgagcaagaaaattttagggcttgatctaggaagtaattcaattggctgggcattacttaaagaaacagagggtaaaccgagtgaaattataaatgtcggcagtcggatttttactaaagccgttgaagaaaaaacacctaccccaaaaaatgttaagcgtagaaatgctcgtttaacccgtcgtgtattacagcggagagccagacgaaaattacgcatgctcaattatttaattcaactagagttactgcctaaagaattaaccaacaatcccacccctgaaataatcttaaatgagttaggcaatccctacacattaagagcccaagcacttgatcatccactgacaccatttgaactaggtcgcgtgttgttgcacttggtgcaacgacgcggctttttaagtaatcgtaaaaccttgttaggcgacatggcagatgatccggatttattggatatccttgcagagcttgaaggcgaagatgacaacagctcagatagagcgaaagaagaaaccgcgtttaaaaaggatattaatgagttaagacacgccattgcagaacagggctttcgtaccttaggggagtatctaggctctttagaacatcatgatagtaagcgtaataggtcgcgtgatggtgggcatttacgcactgatcggcaaatgtatcgagatgagctcaatatgatatgggcaaagcagagtcagcatcattcaatactaacggatgaagttaaaacccaaattgatgaaatcatctttaaacaacggcctttaaagttaaacgctgaccgtataggtaaatgttctttagagccgagtcgcaaaagggcaaaagttgctcgcttagagtgtcagcgctttcggtatttacaagacattaacaatcttcaatacattgacccttatacagataaatcggtttctctatcagagactgataaacaaaaattaataagcttatttgagaacactgctaatgtcagttttgcgggtattagaaaagctttgggttttggtaaaaattatgaatttaatctagagattggcgcaaagaagttaaaaggtaacattacagcctgtgaaatacgtaaacaattacctgagtgggatagtttcaatgatactgagcaactggctctcgttgaagacttactcaccattaataaaaaatcagttttaaaaaatagattagtgagccattggggctttaatattaatgtggctgtgcaactttgtttgttagagtttgaacctggccacagtagtttatccttaaaagccattaataaattattaccgcatttacaagcggggcaaatctattctgatgctagaaagaatgcgggttatggttacgaggtgacagagattgcagttatcgataaattaggtattccaccagaaaccaccaatcctatcgtcaataaagcgctgcatgaactaagacgcttagtgaatgccattattgctgaatacggcaaacctgatgccattcgtatagaaatggcgcgcgatttggaaatgaacaccaaacgctatcaggactttttaaagcaacaatccagaaataccaaagccaatgatgaagcaaccacccagtttcaagaaattgcgtccagaaatccacatctagctttgtcaaaatatcctagtaaaacggataaacttaaatatcgtttatggcaagatcaaaaacaatgctgtgcctatagtggtaaaactatcagtcaatctgagctatttagtagtgttatagagattgatcatatattgccgtatagcgaatctttggatgattcttacatgaataaagtagtgtgttataccgcagagaatcgctttaaaggccaaaaaacacccatcgatgcctttggtggtaacgcagaaaaatggaaccagataacccaagcgattaaccgttgggatagatcattaaagtcaaaaaaggcgcgcttttttactacctttgcagagttacagaaacgagattttattagtacccaattaaatgatacccgtcatattagcgtgctggccaaaaactacttggtgtcattgggtgctgatatttctgtgagtaaaggtatcactaccgcatggttaaggcatcaatggggcttaaatagtttaattggtgaaacagacaaaaaagaacgcaccgatcatcgtcatcatgctattgacgccgtggtggtggtctgtgtcgataggcgtttgtatcaagctttagttaatatctcaaaagatttggagcgttcacaatctgaactcaatatgaaagatatttatctggatccaccttggcatacgttgcgagaagatttacaacagactttagataaagtcattattgcccatgcgccacaacttaaattaaccggtgagttgcatgaaaccacaggggctggttttattgagggcttgggtaacgttaaccgtaaaaacttagatccaagttttacccaagttaagaaaatcattgatcctaccgtaaaggctttggtagaacagcatttggcgggttttggtaacgatcctaaaaaagcctttgccgagggtgttaccttattacataaagatggcaaaacaccgatcaagcgggtgcgggtgttacaatctaaaactaccttagaaaaattgcaaaagtctaaatttggcgccaaaaataagctgggtaaggttttcaaatggttagcatatggcaatatgcatcatgtggaaattgttcgggacagtaaaacgggtaaatataccggacattttgttacgacgatggaagccacaaaacgagctaaaggtatattaattcctaaacagtccataatcaaaacggatcatggtgcagacactatgtttgtgatggcgctacatatcaatgatacagtaagcgtaatccataataatcaaaaggtattttatagaattcaagtcttagactctgctaacaaaagaattagcttacgtttacatactgcttcaacattaaaaaatgataacgaaacattattagatagagattctactattgaatctttgatgagtgctgggttagaaaagcatttactcaatatcatagggaaaatattggcatgataaaacgcactattgatatcagcgagccagcctatttgcatcttaaaaatcagcaattctgtattgataagcaaggtgaattggtcgcgcagatacccatagaagatttgggcgtggttattttacaaaaccccgctattgttatgactcaagcattaatggtggcctgtcaaaaaaataatgtggcagtggttttttgtgatgaacgacatataccgtattcagtgttgttaccgcttagcgagggcaatactctgcacagtaaaatattgcaacagcaaattaacataacgctacctactaaaaaacgcctgtggcaacgcattgtgcaacacaaaatcaatgcgcaagcacaaactttaaaaaatataaatcagtcggctgttttacttgagcgcttagcgactcaagtaaaaccgggtgatccggataatcttgaagcccaagccgcacaagcttattggaagttactctttgggcaaaactttaaacgagatagtgacttagccggcattaatagcattttaaattatggttattctattatgcgggcaatggtcgcaagagccattgttagtggtgggcttcacccgactattggtttaaatcatcataatcaatataacggtttatgtttagccgatgatttaatggagccatttaggccgtgggttgatttcgaggtatatcaaatggcagagaacacagcagatttgcaagtgaataaagacactaaagttgtgctacttaatttgttgtccaaaaatgtcctgtgggaacagcaagaaatgcccttaatggtagcaacgcattatttggtggccagtcttaagcgggtctatgaagataagactttcgtgttgagttatcccaaacagcttaagcttagttaagcatgagttttggtggtttaaattctgtgtgggttatcgtgatgtttgatttaccaaccgatacaccagaagcgcgtaagcaatatacaaattttagaggttatttgctagatgatggctttattatgatgcaatattcggtctatatgcgccactgtgccagtgatgagaatgcgcaagtacatgccaagcgtatcaaatctaatttaccagcagacggggaagtgcgaattataaaaataaccgataagcaattcggcagaatagaagtgtattatggaaaaaagactagaaatatcgaacaagcacccgaacagttatcacttttttaaacaaaaagtgataacttaaatcatataaaacaggagattatcaaaaggctagtgtaaccaactatagcctatctgcaaatcacaacgaaggttgtatctttttggcttcttttgcagtgtaaccaactatagcctatctgcaaatcacaacaaagggtatttatatgtataaaggcatttagtgtaaccaactatagcctatctgcaaatcacaacggtttttgtgatatagcccactaaaggtaaagtgtaaccaactatagcctatctgcaaatcacaactaagtctatcaggatatcagcgttatttttagtgtaaccaactatagcctatctgcaaatcacaactagctgattatcctgataggcttacaatgagtgtaaccaactatagcctatctgcaaatcacaacctatagagcactgataccaaggattccatcagtgtaaccaactatagcctatctgcaaatcacaacttgaatcacattttgaagctgtgaaagaacagtgtaaccaactatagcctatctgcaaatcacaacatactgaaggcatgaaaaaggccaagcaagagtgtaaccaactatagcctatctgcaaatcacaaccgttagtggttaaacccgcatcatctgcagagtgtaaccaactatagcctatctgcaaatcacaacaaatt

SEQ ID NO: 688 - DNA, 5800 bp, synthetic construct
  misc_feature 1..5800: note = Synthetic
  source 1..5800: mol_type = other DNA
tacccttaaagactggttaaatgccgcagaggatgttatgccttcaaaacccaagccacagaacaaaactagcccagatttaaaaacctcagcagaaccctctaaatttccattttttggggtcatcatcactctttctttattactaaccatactaggggttgtctatattgcctatattagtattcagaatgagttaaaacaagtcatgagcgtaaaggaaatctcggtcacagagatgaaaatgttgcaagaatctattaacaagctagaacaagccgtggcatcaaaaggtcaaggcgagctatttagtaagttacaagcaaaggttgactctttggcaatagaagttaatttactaaaagaaaatcaagcaaaacttatcgcagataaaagttcaatttcagctaaccaggaaacggttactcccgcggttttagagcaaaagttaagagaatttagcgaaggaattgatgcaaagctagaaaaaattatacagcgtttaaatcaaacttcccagccgagtaaacaaagtaagcaagttgtagaagagcctaaaatgctcgaacctcttcagccaattcaacctagcgttaaacaagttaagccattgaatcaaccagttattaggttaattaaacgagtagaaacgcctaaagaacccgaggttgcatccgctccgatagtaaactacacagcagatgtaaaatggttaataaaacagccagcccttaactacaccttacaattggccagtatgccgaataaatcagatattcagaacatgataaaaacaaaatcgctagaaggggctaaaattataccacaacaaagatcaaaccgaaccaactatgtattaatatcaggttcataccccagtcgaaaagcggcgaatgaagcgagtaaaaaatataaagaaaattttgggattactccttgggtgcgtaaagttaaagacctaagtgaaagagtgaaataagattaaatagagttgggcaaaacaagaaaaaagtaaaccccccgttgagaggggtaaggtcgcttaaaagcgttgcctacgaaaaataaatttcattggtatgaaaagcaaatcatagaccttagtcggttactttatgggctaataataacaggtaaaaacaaaatgagcaaattaattttagggctagatttaggaagcaattcactaggttgggcattgtatagcgaagatgaacagcaacaaaaaaatcttgttgatattggcagccgtatcttttcaaaagccgtagaagaaaaagtgccaacgccgaaaaatgttaaacgtcgtaatatgcgactaggcagaagagtcttacaacgcagggcaaggcgtaaacaacggatgatgaattatcttatctcattaaatttattgccaaccaatcttaaagatagtcaacaacctgaaataattttaaatgaactgggcgacccttaccaattaagagccaaagcacttgaccaacagctaaccgcttatgaatttggcagaatactgttacattttgttgcccgaagaggttttttaagctccaaaaaacaagtagcgggggatttaattgatgacccagataccattgcatatttacagctaaatgatgaaagtgaatcagcagacaaagaagaagggcagtttaaaaccgacattgccgaagtaaagaaagcgattagcgaagcaggttcaagaacattaggcgaatacttatataacttggaacgaggaaaatgcaaaagaaatcgttcccacgaaggtggacacttacgaaccgaccgacaaatgtatcgtgaagaattagcgttaatctggcaacagcaacaagcattttttacagacctaccaactgatttcatggaagataaaaaaggtgttaaaagaatcattttttatcaacgcccgttaaagttaaaagccgatagagtcggtaaatgttcgcttgaactagctaaaaacagaagtttggttgcacgattagaagttcaacaatttcgctatttacaagatattaacaacctaacttattttgaacgccattcagaaaaagatattcctgcatcagcagagcaaaaggctttattaattgctcactttgaaaataacaccaaaataacatcaacaaaactcaggaaaatattaggggtagataaatcaaccaaactaaatttagaagccaaaagctttaaaggaaaccttactggttgtgccattaaaaaaataattagtgatatttggcaaaactattcagcagaacaacaaattaatttagttgaagatttattaacgattaaaaagaaatcggttttaaaaaacagattaatgaatcactggaactttaccagtcaacaagcaattgaactttgtttattagagtttgaaccagggcatagcaaccattcattaaaagctattaacaaaatgttaccgcatttaaaaaatggcttaatttattctgatgcaagaatacaagcaggttatcaatacgaaaccaaagcggatttaacaacgttcaacgaactgttagacaaaccaccagaaaccgccaaccctatcgtaaataaaggtatgcacgaaataaaaagagtagtcaatgccattattaaagaacatggtaagttgtttgccattcgtatcgaaatggcgcgtgatttagaaatgaataccaaacgctacaaagaaaacgaagcacagcaaaaacgtaatcaaaaagccaatgagatagcagaaaaagcttatcaaagtttaggcttagggcaataccccaagcataccgataaactaaagtatcgattatggaaagaccaatacaaacgatgtgcttatagcaataaatcaatcactttaaaccaagtttttagtgcgtctgttgaaatagaccatattattccttataaaaaatcactagatgattcttacatgaataaagtggtttgttttactgcagaaaatcgctataaaggcgacagaacacctaaagatacctggggagaacaagaagataaatggaatcaaataacccaatccattgctaaatggaaaggcttagataataaaaaagcaaggttttataaaacagaaaaagacctgcaagatagagacttcatttctaatcaactcaatgacacacgctacatttctaaactagccattagctatcttaaaacattaggttgtgatgtcagcaccagtaaaggcgtaaccaccgcatggttaaggcatcaatgggggttaaatagcctaattggcgaaaccgacaaaaaagaacgcaccgaccatcgccatcatgccatagatgcggcagtcgtggcttgtgttgatagaagcttatataaaaaaattctgcactggacgcaaaccaatgaaaaaaaattaaaaataacaccaccaacttcacattttagagaacagttagcagaacaccttaaacacatgatagtttcacacgatgtccaacgaaaattatcaggcggtttgcatgaagaaacgggggctggttatatagaaaagcatggtgggctagtttatcgaaaaactttaacgggtgattttaccgttaaaaatgcgaatagcattgtcgataaaaccataaaaaatcaagttttagcacacttaaaaagttttgataatgactctaaaaaagccttttcacccgaggtaacggtttatcaccaagatggcaaaactcctattaagcgagtaagagttttacaatcaaaaacgagtcttaaaaaattagaacaaaataaattacccgtaaaagacaccaatggcaaaatatttaaatggatggcatttggcaataaccatcatgtagaaattataaaaaataccgaaacagataaaataaaaggtgtttttattaatatgtttgaagctcataggcgagcaatgacaggcaccaagtcggctaaaaaaagagggattgttcaagagccaattatacaaactaaacatgatggcaatgaatttatcatggctttgcatattaatgatttggtaagtgttgagatagaaaatggggagcgtgttttttatcgagttcagaaattaggcggaggatatgatttaacgcttagattgcatactgtcacgactacaaaacgagaaaaagaatttatagaaaataaaacgatgcttgaaaattccttttcaaattttattaaaattaataacatgaaacttcataaaattaattgtattggtactttgttagatgattaaaagaatcatcgatatcagcgaacaagcctatttacatgttaaatatgaacaattactgattgataaaaataaagaaacggtggctaaaatacccatcgaagatttaggggtgttaatactacaacatcccgccatagtcataactcagcaaaccatcataacttgtcaaaaaaataaagtggttattatattttgtgacaataaacggctaccctactcaatcattctacccatcgccgaaagccatactctacacaataaaatactaaaacaacaaatcgccataaccgaacctactcgtaaaaaattatggaaacaaatagtcgaacaaaaaataagccaacaggcaacaaccttaatcttattaaataaagacagcacaagattatcttatttagcaaagcaagtaaaaagtggtgatgttggcaattccgaagccgtcgccgcccaagcctattggaaaatactgtttggtaaacaatttaaacgagatgtagaactagaaggaatcaatgcattattaaattatggctactcaattatacgagccatgattgctagaggcatttgtggggcagggctacacccaacgctaggcattttccataaaaatcaatacaacgccctttgcttagctgatgatttaatggaaccatttcgtccctgggtagattcaattgtttataaattaagcattgaaaatagattagaaataaataaacaaaataaacaattatttttagaattgttgtcagaaaatgtaatttatagccaaaagtcaatgcctctcatggtatctattccattattaatggcagatttaaagcgctgttatagcaaggaaatgaagcaattaatttaccctgttttagaaaaaagattaatatgatttttggagggctaaaaacaatgtggataattgtcatgtttgacttgccaacagatactaaaatagcccgtaaagaatacacaaactttagaaaatttttattaaaagacggctacaccatgatgcagtattctgtttatataagacattgtagtagcgatgaaaacgcagaagtacacgcaaaaagagtaaaatattcactacctgatgatggtgaagtaagaataatgaaaataaccgataaacagtttggaaatatagaggtgttttttggtaaaaaaagaaaggagacagagactgcccccattcaactacagtttttctaacgaaaaaccaataataaccctaactaaaacaaagtgttatttgcaagttattgtaaccgactaaggtctaaccgcaaatcacaactgacgacaaactcaccatcctcaagcaaagattgtaaccgactaaggtctaaccgcaaatcacaaccaaacagcagggttaataaaatgagaggtattgtaaccgactaaggtctaaccgcaaatcacaacccagctcagcatcagaataaatatctgcatattgtaaccgactaaggtctaaccgcaaatcacaaccaaatgacagatgtttggcgactacctgctattgtaaccgactaaggtctaaccgcatatcacaac

SEQ ID NO: 689 - DNA, 5655 bp, synthetic construct
  misc_feature 1..5655: note = Synthetic
  source 1..5655: mol_type = other DNA
tgcgggcgtagttcaactggatagagcgtcagacttcgaatctgaatgttgggagttcgagtctctccgcccgcaccagcaatagtaacagatcacttaaatttcattcccttcaaattactaaatttcgccacttttgtgccattgagttaaaatttggctgctacttgttgccaactaaggtctatgcgcaagtcactactgtgacgttgatgaataaccgctgttaagagattcattcaccttcaatccatttgcagaggttttgtttcaaccggataaatcgtgcatcatctatccttcccaattctcccaacaaaagttttccatccaacacagccagcctgctcaccctgacaatgcttggtagttttaaaccggatttaagaaaatcatgatcttcataagaaattttttcgtcaattcccggaagatattgatgcaactgtgaagaaatcatgcaaacaagccaatcattgaatatcccaggcaatttccgtaaaacaagtgcagggcgtagtttgacttctttctggtcagtctgtggaaatttaaacagaaccacctgtcctgctgaaatcattggaaggttttatgaagatcattttccgaataaggagagttctcatcttccatgccgcgcattgcggaagtcaaagaaaattcagaccactgactgtcttcatcattgttcaccacaggatttaaattttccataaattcgtatactgccttcagttgcctttccggtaaagtgtgaactttattaataatcatctcaaagagattcttcatatcctctttagtttcagtatttacagatccagtttaatgacacctttttttcatcatcctgacattttaacaaaatctacgtctaacttataccaccaatccacacggttcgcaaggcttccggaaaaagccaccaaacttgatcaaaactccgtttttgggcattttactacgacatcaaaattgtcttttctttgttgatgtaattccttattatccgcaaatgagtggaatatctttagaatgaaaagaggtgggtcagcccccactgggagggctggggtcgcttgaaagcgttgcctacgaaaaatctgtttcattggtatgaaaagcgatcatagaccttagtcggatacaattactattattctacacaggagattaagatgagcaacacaaaaattaaaaaagttttgggtttagatttaggcagcaattccatcggctgggcattattggaaacaaatgacggaaggccacataaaattattgatctgggcagcaggattttcaacaaggctgttgaggacaaaacaccaacgccaaaaaatgttacccgcagggcggccaggctgacccgacgtgttcttcagcgtcgttccagacgaaagatacgcatgctgaattatttaatttcactggatttactcccaaaatctttgcgggataatcctgcaccagaaattattctcaacacattgggcgatccctacgaactccgtgccgaggctctggataagccacttgagaaacatcaacttggaagagtatttctccattttgtgcagaggcgaggttttctcagtaaccgtaaaacaattcttggagatttagtggatgatcctgatgttactgcagtactggcagaagcagagtctgaagaagacacatctactgagcaggcaaaagaggaaactgtctttaaaaaacaaatatccgtattacgccaaaccatttcagaaacacctgctccacaagattcagaaagtgagaacaagaaatgtcgtacactcggtgaatacctttttacaattaaagccccgctaacgcgcagaaaccgtacacacagtggaggtgagcttagaacggatcgacaaatgtaccgtgatgaactagagctgatatggaaaaaacaagccacacatcacacagtattgaacgaagacgtaaaggaacaaatcgaggatattatttttgctcagagaccaatcaaattgcgctccgaccgaatcggaaaatgttccctggaaccaacgaaaaaccggatcagcatcgctcgtttggaatatcagtgttttcgatatttacaggatgtcaacaatctagaatacatgctgccctgtgacaatcattggacaaaattgaatgaagatcaaagacaaaagctaattttactctttgaatcaaaaagttcggttagctttacggaagttaaaaaaactctggatttgaaaagaaatgttaaaatcaatcttgaagaaggtggaaccaagaaattcaaagctaatgttactgcttcagctattcgaacagttattccggaatgggatcaatttgacagttctcaacaattatcttttgttgaggacatgttgagtatccggaagaaatctacgctcaaaaaacgtttgactggtcactggaatctgaatccggaaactgcggtgcagctttgcatgctggaatttgaaccaggacacggtaatctttcgctcaaagcaatcaataaattattaccgtttttggagcagggaatgctttttaatgaagccagagttgaggctggatatggttatgaaaaagagaatacagaaattaatgaacgtttaggaatgccaccgggaacctcgaaccctattgtcaacaaaggcttacacgaactgcggagactcgtcaatgccattattgctgaatacggtaaacctgatattattcgcattgaaatggcgcgtgatttagaaatgaatactaagcgttacaaagccaatgaagcacagcaaactgctaacactaaagccaatgaaaaagcaactgaagcatttcaggaaattggttcgcagaacccgcagcttggtttgcgccattatcccagtcatacagacaagcttaaatatcgactctggtttgatcaagaaaaacgctgtgcttacagcaaccaaagtatcaaccttacctctttatttacagggcaagttgagattgatcatatcctgccctacagtcaatctttagatgattcctacatgaacaaagtcgtatgttttgcaaatgaaaatcgaaacaaaggtcagagaacgcctgttgatgcctttaaaacaaatcctgaaaaatgggaacaaatcaaacaatccgtttttaggtggggtaaaaaactaaaaagtaaacagaatcgttttttcatgtcagaggctgatgtacagaaacgtgattttattagttctcagctaaatgatacacgctacatgacaaaagttgcacttgattatctaaaacaacttggagctgacatcaccacctgtaaaggcattaccacatcacatgttcgtcattggtggggattagacagtttactgggtgagaaaaacacagagaaagaccgtacagaccatcggcatcatgcagtagatgcggctgtgattgccactattgaccgaggtttttataacaaaatagtttcgaccgcaaaacagctggagcgaggcaactcgtctctgaaaatgaatgatctgaaagtagctccgccatgggtggattttcggaatgacttggacaaaaaactaaaatccatgatagtcgcccattcacctagccgcaaaatttcaggttctctgcttgaagaaactggagttggattcattaaagggcaaggtactgtatataggaaattattaggcccggagatgaaagtcaaacaggcagagaaaattattgatccgcaagtgaaggccattgttttagatcatttggaacagtatggggatgatcctaaaaaagcctttgctgaaggaattgctgttttgcacaatgacggtaaaacaccaattaaacgtgttagagttttgcaatccaaaactactctagacaaactggaaaaacacaaatttgctgtcagagaccggcagggcaaagcgtttaagtggctggcttatgggaacctgcatcatgtggaaatagtgcgtgataggcaaagtgagaaggtcagtggagtgtttgtaaccatgatggaggcagctaaccgtgccaaaggaattaggatacctaaacagacaccagtgcaaactaaccatgggccacaaacagagtttttgatggccctgcacatcaatgatctagtcagtatgatgcaggatggagaacgtaaattttatcgggtgcagaagttggactctggaatcaatatggttatgtttcgactgcacactgcgtctactcttgacgaccgtaaccaagagttgcatctcacaattaataaacagcttataagtcaatggaatttgcaaatagaaaaagttaatgccataggtaaattacaacctatccatgattaaacgaacgattgatgtcagccaagccagttatttgcatctaaaaaatctacagttgctgattgatcaggaaggtaagactgttggccgtattcctgtggaagatttgggaattctgatactggagcatcctgctattacgattactcaaggggtaattctagcctgtcagaaaaacaatgtagctgtagtattttgtgacgaacgacaccttccttattctacattgcttcctttaagtgagggaaaccagcttcacagcaaggtgcttcgccagcagatcaaaataagccagccatcaaaaaaacgtctgtggaaaatcattgttcaagaaaaaattcggcaacaggcacttactcttaagcactcaggtaaacctcatcaggagcttttaagtatttcctcaaaagtcaaaagtggggattcagggaacctggaagctgaagccgcccggaaatactggcccttgctgatggggaaggggtttgttcgagattttgaagctgagggagctaatgctcttctcaattacggttacagcattgtcagggccatgattgccagagctttggttgggacgggtttgcatccggctttgggattgtttcaccataatcagtataatggtttggccttagcagatgatcttatggagccgttccgcccttgggttgatcgaattgtttgcaagttattaatggaagattctgacgctcaaatcaacaaggaaagtaaacagaaattattgggattgcctgggaaacaagtcttgtgggggaaaaaagaaatgccgttgttggtggtttcacaccttttggcaactcgtctcaaacaggcttatgaagattcttccctgtcactaatatggccggaatggattgaatgatgttgcttagggaatgtggtttttggcggataaaatacaatgtggactatcgtaatgtttgacctaccgactgataccaaatcagcacgcaaacaatattcacaattccgaaaatttctgcttaatgacggctatgacatgatgcagtattccatctattcacgccaccatgccagtgaagaaaatgcgcaggttcacattcaaagggtcaaagagcgtttgcctcctgacggcgaagtccgaatcgtcaaaataacggataaacaatttggaagaatagaaattttcttcggaaaaattagccaacctgttcaagttccacccgaacaacttgagtttttttgaggaaaaatcaaataagttcttgcaattacagttgtttacttgctctctattgtacccgactaaggtctatccgcaagtcacaac

SEQ ID NO: 690 - DNA, 5341 bp, synthetic construct
  source 1..5341: mol_type = other DNA
  misc_feature 1..5341: note = Synthetic
aataatcaaaaaatcatcattttgacaacacagtagagaatgcataaagaagaaaatagtaaaacttaataagttcattgaaggcttgtaaaagtggattattcaatacttaatgcgttggattagatggactatatttttcaaatatggaatgacgtaatgtacaaaattaatacagagaaaaatagtatagaaaaaactagaagaacggttgtttgatattattacagcagagtttagtgaattttattattacaataaaattggtacaggcataaaaaatcccccactgggagggacttggtcgcatagaagcggagcctacgaaaaataaatttcattggtatgaaaagcaattttaataagcgatagtcggttacatttgaactacacattctacacaaggagattgagaagtgcaacaaaaagttttaggattagatttagggtcaaactctataggttgggcattgctaacagaagaatcagggcaatcatcagagattgttgacctaggttcacgcatctttagcaaggcagtagaggagaaggttccaacacctaaaaatcaaaaacgtcgtgatatgcgattaggacgaagagtattacaacgtcgtgcaagacgaaaacaacgtatgcttaattatttagtatcgctcaacttactgcctaaagagctacaaaataacactcaaccagaaattatattaaacgagataggtgacccttacgaattacgaacaaaagcactagatgaacagctaacgccttatgaatatggaagaatattattacacatcgtagctaggcgaggttttttatccactaaaaaacaagttgctggcgatttaatcgacgaccctgatacgttaaattacttaagcactcttgatgaaaaaccaacaaaagacaaagaagagggtcaatttaaggcagatatttctcaagtttatcaacaaattaaagactgtggagcgagaactttaggggaatatctacacggtctagaaattggcaatgttaagcgaaatcgcaatcatgatggtgggcatctacgcactgatcgaaaaatgtatctagatgagcttgggttaatttggaagcagcaagctccatattttgacaatttacctagtgatttcatgcaaaaaaataaaggtgtcatgaacattattttttaccagaggccactaaaattaaacaaagatagagtgggacgatgctcgctagagcccaagcattatcgagccaacatggctcgcatagaagtgcaaaaatttagatatttacaagacatcaataatttaaaattttttgatcgttggcaagagaaatggataagtattagcgatgaacaaaaatcaaaattaaaaaagatatttgaacataatgccaaaataactataacagcgctaaaaaaagaattaggcctagatagaccgacaaaaataaacctggatacaaaaaatcttaagggcaatataactgccatagaaatcagaagtgttattggtgatacttgggataaatatacggccaagcaacaacacgatttatttgaagatatatttactattaagaaaaaatcaacacttaaggctcggttaatcactcattgggactttgataagaagaccgctgtaaaactctgtttaattgattttgagccttctcattctagtcattctctaaaagctattaacaagcttctaccctacctagagcaaggaatgatttattcagatgcacgcaaagcggcaaattatgattatcaaattgaggaaatcaaggttacaggaacacttggaattccaccagaaacaactaatccaatcgttaataaaggcatgcatgagttaagacgtttaattaatgctgtcattaaacaatacggaaaacccgatatcattcgtatcgaaatggctcgcgatctagaaatgaacactaagcgctacaaagaaaatgaatctcgtcaaaagaaaaatcaaaaagccaacgaagcagcacaacatgcctttgaaggcttaaatttgggaaaaaaatatgcctctcatgatgacaaaattcgttatcgattatggcaagatcaagatgaaagatgcgcttatagtggcaatactattgcacttaaccaagtatttagctctgaatgtgaaattgatcatattttgccatttaaaaaatcacttgatgattcctacatgaataaggtattgtgctttacatcagaaaatagaaataaatctgaccagactccagttgacgcctggggtggtgacaatgaaaagtggaatcaaataacacaagcaattggacactgggataaatccttagataacaaagcacagcgtttttataccaaagaagctgacttgcaaaaacgagattttatctcctcccaacttaatgacactcgctacatatccaaactcgcacaagactatgtgcgccaattaggttgtgatgtaaatatcaccaaaggctttgttgttagtcaaattcggcatcagtggggctttaatagtctaattggtgaagttaataaaaaagaacgcaccgatcatcgccatcattctattgatgcagtggtaattgctgccacttcacgcaacttgtatcaaaatgctgttagacaaatcaagcagaatagactcaacattgctccgccgtattcgcacattcgtgaagaattggcagaaaggcttgagcacactattgtatcgcatgcaccacggcgtaaaatctcaggcgcactacatgaagaaacaggcgcaggctatattgaaaaacatggcggtttggtttatcgtaaaacccttaatcaagaatttaccattaaaaatgccatgagtattgttgatgaacaagttaaaacaacagtgctagagcatattgaaaatcatggcactagcaagcaagcctttaatgaggctaatttaaaaactcttaaactaggtaaaaacccaatcaagcgtgtacgtgttttacaatctaaaaccaacgagaaaaaactcgcccaaagcaagtttggcgtgcgtgatcaaactggaaaaatttttaagtacatgagctacggtaacacccaccatgtagaaattataaaaaacaccaaatcaggaaaaatcaaaggggagtttgttacaaccatgcttgcctcacatcgcgccaaaggtattaacatacccaaacaatcgatcatcaaaactgaccatggagaagattgggaatttatcatggttcttcatattaacgataccgtgagtatcgaactggaaaatggcgagcgtgtattttatcgggtgcaaaaatttatgattgcacaaggttttttagtcttacgacttaatacagcatcaacgctcaagaataaagacgaggaaattcaaatgtcaatacacagattatttacagagatgaagttaagaaatcatcaaatgaacaccataggtcattttattgatcatgattaaacgtattgttgaaattagcaacccgagttacctacacctcaagcacaaacaactactcattgatcaagatcatgaattagtggcacaaattccgattgaggatattggtgcgctagttttagagcatagtgctattagtatcacccaaccgctgattattgaatgccaaaaatacaatgtggcaattattttttgtgatgaaaaacatctaccctattctactattttgccaattgctgaaggaaatactctacatcaaaaaatcctcaaaactcaaatcaacatcactgagccgactcgcaagaggttatggaaacaaatcatcattcaaaagattaacaatcaagctggcacacttaaacgatttaacaaaccccatgcgcgtttggataaattagccaccgaagtgaaatcgggcgacagtacgaattgcgaaggtttggcggcacaatattattggaaatccttgttcggttcggattttattcgtgatcaaaatgccgatggaattaatgcagtgcttaattacggctatacaattatccgtgccatggtggcgcgcaatatttgtgcaagtggtttgcacccatctattgggctgtttcatcataaccaatataatgctttatgcttagcagatgatctaatggagccgtttcgcccttggatagatagtattgcttatgaactgcaccaagccaaccccaatatcaatatcacaatcgagagcaaaaccccatttttaaatctcattagcaacattgtgcagtatgagcataagaaaatgccaatgatggtgtcgatgcattatctgatggcaagtctaaagcgtaattttattaaagaagtttcaacattgacatacccaatattgttggcgtaatatagagtttttaaacattggctttacttatgtttggaggtttgcaaactatgtgggtaattgtgatgttcgacctgccaacggaaaataaattgatgcgtaaagattacgcgcactttcgcaagtttttgcttgaggatggctttaggatgatgcaatactcagtttatatgcgccattcgagtagtaaagaaaacgcccaggtacatgcgcgcagaattaaactccacttaccgccagacggcgaggtaagaattatcaaaattaccgacaagcaatttggacgtatcgaggttttttacgggaaaaaacgcttaccagtcgaaatagcacctgaacaactctcatttttttgactagaaaaaacagaattaccctggcattaaagcatatgtagcaggcagattgtaaccgactatcgcctaaacgcaaatcacaactattaacgccgtgcagtcgtgtatttctaaattgtaaccgactatcgcctaaacgcaaatcacaacttcagggcgttcgcccataaatgcatggatattgtaaccgactatcgcctaaacgcaaatcacaaccacgtagagcatcaagaaaactatcaccatattgtaaccgactatcgcctaaacgcaaatcacaacctcgaacagcagcacccgttgaattatcaattgtaaccgactatcgcctaaacgcaaatcacaacctgacgcactgcgagccttagaatctgaggattgtaaccgactatcgactaaacgcaaatcacaacgggcggtgtgactatcccatcgagcgtaatattgtaaccgactatcgcctaaacgcaaatcacaactaactgggatgtatctaaggtggagtagatattgtaaccgactatcgactaaacgcaaataaaacaatgtttataataggttatgactttttataaaaggtgaatttggtggagagtgtggaattcgaatccacggttccgtgaggaacacta

SEQ ID NO: 691 - DNA, 5327 bp, synthetic construct
  source 1..5327: mol_type = other DNA
  misc_feature 1..5327: note = Synthetic
cctcattttggcctgttcggctctatcttcttcaacaattggacatgctcatcgtaaagccggtcggcaatcggcacattttgctcataccactcatcattcccggttttatcgccgcccaacaataaaatggccatgcggcgcggatcaaaggcatataacacacggtaaggtctaccctcatgctgaacacgcagttcacgcatgtgactatgctttgaaccgttgataccggaactatatggaaaaggtaactgaggacccgcttgctcaagcaactcaacgacagcagcaatatctacctgctcagactccgtgagtttcacccaccaaagttcgaattcatccgtgtattcgacttcccattccatataaggaatataactgataaggaatgtttttcaagctatttctaataaaaataaggtaaacactcattccgtacctaatgcttacagtaatagctgtacactaaactgccatatatttatctaactgattgattggtaatactatctttaatatctagacatagtagcacgcgctatttcctatgggtttgcaagtttaaataaaggttagttcgatataataggaatagtatggatatttggcaaaatcttacgggaaactggttattggtagcttgggatggcagtaactaaaaagcccccgctgggagggcttgggtcgcttgaaagcgttgcctacgaaataactatttcattggtatgaaaagcaaatcaatagaccttagtcggttacactggtttcaagtatacaaggaatacaataatgggcaagaaaatattggggttggatctagggacaaattccatcggctgggctttattagaagaaactaataataaaccatcaaaaattattggccttggcagtcggatatttcaaaaagcggtagaggaaaaaacgccaaccccaaaaaatgttaagcggcgtgatgcacgattagcaagacgagtaatacaacgtcgtgctcgacgtaaacaacgtatgttgaattatctggtgaaactggatttgttacccaaagaaatacaaggacatacccaaccagaaattattctaaatagtttaggtgatccctatcagttaagagctaaagcactggatcatcaactgggaaaacatgaattaggccgtgtatttttacatctagtacaacgccgaggttttttaagtaaccgtaaaactttattgggtgatatggttgatgatcctgatgtaaaagcggtgttagatgaaattgaagatcgggaagatacatcatccgaacgtgccaaagaagaaaccgcatttaaaaaagacattagtgaattacgtagcaccattaaagaaaaaggctacagaaccttgggggagtacttggcctcgctagaacatcacgactgcaaacgaaatcgaagccgcgagggtggacatatacgaaccgaccgtcaaatgtatcgtgacgaactaaatctgatatgggaaaaacaatcaaattttcatgatgtattaaccaaaaatgtcaaagaacaaatagaaaaaattattttctatcaacgactactcaaattactcagtgatcgaatagggaaatgttcactggaaccttcccgaaaacgtgccaatattgctcgattggaaagtcaacagtttcgttatctgcaagatataaataacctgcaataccttgactattacactgacacatggaaagaactcacccaagaaaatagagaaaaacttattgaattattcgaacataaagcacaccccacgttcaaaacagatgtaagaaatgcacttggccttgataaaggcacagaatttaacctagatactgacaataaaaaactcaaaggcaatatcacggcttgtgaaatcagaaaagtgcttcctaaatgggacgagtttcctgacgaaaaacaacatgccttagtcgaagaccttcttaccattaataaaaaatctgtattaaaaaaacgtttaataaaccaatgggtttttgataaagaaatagccatcaacttatgttttttggaatttgagccaggccatgccaatgtgtcaataaaagtcatgaaagctttactgccacatctaagaaaaggccaaatctactcagatgcccgtgtctcagctggatacggttatgaaactgaggaaattaaaattgtcgataacctaggtaaacctccagaaattgctaacccgattgtcaataaagctttacatgaagtgcgccgactggttaataccgtaatcaaggaatatggaaaacccgatgctatacgagttgaaatggcacgcgatttagaaatgaataccaaacgatacaaagcatttttaaaacaacaggcagcaaataccaaagcaaataatgaggcagtagaagaatatcaaacaatgggcactaaaagtcctcatttaaaattatctaaataccccaatcggtctgacaaaataaaatatcgattgtggaaagatcaagatgagagatgcgcttatagtggcaaggttatcaactcagcaacgttatttagtcctgagatagaaatcgaccatattcttccctatagccaatcacttgatgattcctatacgaataaggtggtatgttttgctggtgaaaaccgttacaaggggcaacgcactcccattgatgcctatggaggagatgaggaaaaatggaatcagattagccagtcaattagtcgcttggggaaaaaactaaaatcaaagaaaaaccgattttacaccacggatggtgaattacaaaaacgtgattttatcaataaccagctcaatgacacccgctatatcagcaaagtcacacttgactatgttaaacaattgggtgctaatgtctctgccagtaaaggtattactactgcatggttacgtcaccaatgggacttgaacagccttattggagagaccgataaaaaagaacgaaccgatcaccggcatcacgctattgacgccgttgtgattgcttgtgtagacagacaattttataaagacctggtcggtttagccaaagatctggaaaaaagacaacctgaactgaacatgcgagacatacacatagatccgtattggccaaacttgcggagcgatctcgatgagaaactacagaatattattatttctcatgcaacacaaagaaaacttagcggtgctttacatgaagaaaccggcgccggttttatagagggtaaaggtacagtttatcgggctaatttaaatggtgactttaaattaacacaagttaagaaaattattgacaaagaagttcgtcaaattgttgaacagcacataaaaaaatatgataacaaccctaaaacagcctttgcgaaaggggtaaccgtatatcataaagatggaaaaacacctatcaagcgcgtaaggatactgcaagctaaaaccacaaaagataaattagagaagagtaaatttggtgttcgcaacaaggaaggagaggttttcaaatgggtgccgtacggaaacatgcaccatgttgaaataatcaagcataatcaaaccggaaaatactctggtgtatttattacaactatggaagccagtcacagaacacgcggaatcagtcgtgataagtgcccaataatcaatactgaccatggtgatggttatgagttcgtcatggcgttacatattaatgatatcgttagcgtaaaagttgacgatattgatacatattaccgaattcaaatgttagatagtccgaacaaaaggataaaattaagattgcatacagcatcagtcctaaataatgatgccgatacatttccagaccgagagcttacgatacctgcattaatagcaaaaaaattaactccattcacaattaattccttaggcaaaaaactaaaatgataaagaggataattgatattagcgaacccgcctatcttcacttaaaaaataggcaactacaaatcgataaaaataatgaaactgttggcactatcccaatcgaagatataggtgtggtaattctggaaaattctcaaattataattacacaatctgtcattattgcctgccaaaaaaataatgttgcagttgttttttgtgatgaaaaacatctcccctactctttactcttgccagttagtgatgccaatactttacataacaaggtattgcgtcaacaaattgaaatgaccaaccccactaagaaacgactctggcaacaaattgtaatacataaaattaaacaacaatccaaaacacttgaacgagcaaataaaaatacagtacaacttgatcaactcgtcaaaaaggtcaaatcgggtgatcctgaaaatattgaggcacaagcggcaagaaaatattggaacttgttatttggtaaggaatttcggcgaaatactgatgagccaggtattaatggactgttaaattatggttatgccattgtccgagcaatgattgcacgtgccgtggttggcagcggcctacacccagctttgggtatttttcaccaaaaccagtataacggtctctgtttagcagatgatctgatggaaccttttcgcccatggatagactggttggttttcgattgggtaattagaaaggaaaatgctgatgttcaagttgaccagaaaaccaagacaatatttcttaatctactgggagaccccgtagcatataaggataaaaaaatgcccttaatgattgcctgccattatatattagctgattttaaaaaagccttcgatgaaagtcgtttcaagttggtttatcctgaatggccaaatcagatggcattactgtgacattcggtgggctaaataccatgtgggtcattgttttatttgatttaccgaccgataaccccaaggccagaaagcaatatacccatttccgaaaacatttattggaagacggcttcagtatgatgcaatattctgtatatatccggcacagtgccagtgacgaaaatgctcaggtacatacaaaacgcataaaatcttggcttccagccgacggagaagtgcgtataatcaggattactgacaaacaatttggcaatatcgaagtattctatggaaaaaaacgtgtccgcaccgagcaagcacccttgcaactacagtttttctaacatccttgttagagaatattcttttatatcaaatacttatttaacgaatagtgtaaccgactaaggtctatctgcaaatcacaaccatgtttactatcgcatcttgtctaacgtagtgtaaccgactaaggtctatctgcaaatcacaacgggggcattaatgcccccttaagctcagtgagtgtaaccg

SEQ ID NO: 692 - DNA, 5280 bp, synthetic construct
  source 1..5280: mol_type = other DNA
  misc_feature 1..5280: note = Synthetic
gaactcgcagagacatatgatctggagaatcccgtaattgagcatacagaaaccaagaacttctttgaccacaccggtcttttccataagggtcttaatcgaggcttgacggaacacgaacttgacgacgcccttattcctgacgattggtggaagccatttattgatgccaaacaccatgcctatacaggcaaatggttggttggatctaagggttatcgctgctgggacggagagggtaatcctcccggagtgactgatgatgatgtcatcaacagaaacgcgggggtcgttagtacttttgggtatcggaaggttaaatagtctaaagggctgttgaagatgaatttataaaccgtcgagttaattgcagaaacttgccgggcggccaataaatgctgctaaagcgttgctgactccttaccgccccagagtttatctgtttgttaaaaggagtgaaacaaggagaaccaagatgattttttctgaaaggtattgtgactacggcagcagggcttattctgctttcgtggatagttcagaagagcgttatattgacggggaaggccctccttttagttacccaagacacactttattctgtgaactggggtggagagggagagtatctattgcatttgggctccccattcacaagcttgatacgcatattacttgggaagagtttattgaacgttatacttatgcagaatctatacaggaatgctttgaaggtgatgacccggttgatattcccaagcgcgaagatctggttggtaaggtggctgaatattgggagggagtatcggtggacaaggcgggacaataaaaaagcccccactgggagggctttggtcgcttagaagcgtagcctacgaaaaaacaatttcattggtatgaaaagcaattaatagaccttagtcggttacactaacaatttgtagtatacacaaggatttaatatgagcaagaaagttttgggtttagatttgggtagtaactcactaggctgggccttacttgaagagacagatggaaaagctaatagtattattgatattggtagtcgcatatttactaaagcagtagaagagaaagttcctacgccaaaaaatgtaaaacgacgggatagtaggcttggcagacgcgttatacaacggcgttcacgccgtaagcagcgcatgttaaattaccttgtgtcgattgatttgttgcctcgtgagttacagggccacactcagcctgaaattattcttaacgaactaggcgacccttatgagttgagggcaaaaggtttagatacacaattaacagcacacgagtttgggcgaatattactccactttgttgcaaggcgtggcttcctgagtacaaagaaacaagtggcaggcgacgatacgccaacagaagataaagaagaaaccgcgtttaaagcggatattagcgaagtaaagaaagctatagatagcgcgggggcaagaacattaggtgagtacttacacaaattagtacgaggtgagtgtaaacgaaaccgtagtcatgaaggcgggcatttgcgaacagatagaaaaatgtatcaagatgagctggcgcttatttggcaacaacaaagtcagtactttagtcacttgcccaatgactttatggaaaaagaccaaggcatcaagcaaatcatcttttatcaacgaccactaaagctgaaaaaagacagaataggtaaatgttcgttagagcctaaaaataaccgcgccccaatggcacgacttgaagtgcaacgatttcgatatttacaagatgtaaacaatttacaatactttgaacgccatacagatcaatggctgagcattagtaatgatgataaacaaaaactgattgagtattttgaacaccatcctaaaatcaccataacagagctaaaaaaacaattcggttttgacaaattgactaagatcaatttagaagctaaaaacctaaagggcaatatcacagcctgtgatatacgttcagtgctcaatgagcaatgggataactattcaggtgtgagccaatatgctttagtagaagacctgctgtcaattaagaaaaaatcagcattaaaaacaagacttattaaacactggggtttagatgcatccaaagccattgagctctgtttgcttgaatttgagcctagtcacagtagcctatcgctcaaagccataaacaagctactcccttttcttaaccaagggcttatttatagcaaaaaagacaaaggaacaggtgagctaggcgcattacaggcggctggctacgatgatgaacttaaagaacaagaagtgcttgataaattagttcaacctattgcaaccagcaacccaatcgttaataaaggattgcatgaacttaaacgcgtagtaaacgccataattaaacaatatggaaaaccagatgtaattcggattgaaatggcgcgcgacttggaaatgaataccaagcgctacaaagaaaatgaagccaggcaagccaaaaacaaaaaggaaaatgaaaaagcagttgttgcttataaagatttaaagctaggtaaataccctagtcataatgacaaaataaaatatcggctatgggaagaacaaaattactgctgtgcttatagtaacaactcaatcccattaagcgctgtttttactgcacaagtagaaattgaccatatcttaccctacaaaaaatcacttgatgattcctacatgaataaagtgctgtgttttacagcagaaaatcgaaataaaggggatagaacacctagagatgcctggagtggagatgctgaaaagtggacgcaaattactcaagccattagccgctggaaaggtgtagattcaaaagtaaaacggttttatcaaactgaagatgacttacaaaaacgtgattttatttcatcacagcttaatgatacacgttacatcgcaaaactagcgttagattatgtaaagcaattaggttgtgatgtatcggtaacaaagggctttgtggtgtcacaaattcgtcatcaatgggggtttaatgacttgcttggtgaaaccaataaaaaagagaggacagaccatcgtcatcatgccatagatgctgtagtcattgctgcaacctcgcgtcaactgtacgcaaaagcggttaatcaaatagagcgaaataaacttaaaattgaaatgccttaccctcatattcatgatgagttaaaggaacgactagaacacaccattgtttcacatgccagccaacgcaaaatatcagggggcttgcatgaagaaacaggggcgggctatattgagaaacatggaggattggtctatcgtaagaatatatctcctgattttacagttaaaaatgctcagagtattgtggatgagaccgtgcaagcactcgtcctatctcatttagagagctatgacaatgtccctaaaaaagcctttgctgacgatgtaacgctctaccacaaggatggtaagacgccaattaaacgtgttcgcgtattacaatcaaaaaccactaggaaaaaactagaacaaaacaaatttggtattaaagacaaatcaggaaaggtttttaaatatatggcgtatggcaatatgcaccatgttgaaatactaaaacacaaagaaacaggtaaatataaaggtgagtttgtcactatgatgcaagccagtcatcgtgccaggggcatacaaagtaaattgaacccagaaggactaagacaggttatcaccaaaatagatcatggtgataaatggcattttgtaatggcattacatattaatgatttagttagcattgagggagagaactttgagcgcatctattatcgagtccagaagcttgaatctccaacagggttaacattaaggcttagcacagcatctacactagataataaggaggaagagattagagtctctatttcgaccttgatgaataaaggagtaactatgcacgtagttaactctatcggcataatttctgatgattaaacgcattattgatattagtgatgccgcttatattcatttaaagcatcaacaattattaatagataagcaaggtgaaacggttggtcaggtaccgattgaagatttgggggtgctgattttgcagcacccagcgattgttttaacccagcaagttattattgcctgccaaaagaataaagtagttattgtgttttgtgacaataaacacctgccttactcggtaattttaccgataggtgaaagtcatacactacacaataaaattcttaaacaacaaattgcaataacggaacctacacgtaaacgtctttggcaacaaattgtgcagcataaaataaaacaacaagctaaaacgttagtgaggttggataagagtgctgtgcgattagatcgactggcaacacaagtgaaaacaggcgatagcggaaactgtgaggcccttgccgcgcaggcctattggaagcttttatttggccaaggttttaagcgtgatgttgatttagatggcatcaatagccttttaaattatggttattccatagttcgggcaatggttgcacggagtatttgtggggcgggactgcaccctgcattaggcttgtttcataaaaaccaatataactcgctgtgtttggcggatgacattatggagccatttagaccttgggttgacttcattgtgtatcaaatagccgcaaatggagcagtagagattaatcagaaaagcaagcaagagatgttaggtttattacacgaaaccgtagaatatgaccataaaaaaatgccttttatgattgctatgcattatttaatggctgatttaaaacgttgttacaaccactggaaactaggctgcttgagtgacttttggcggcatacagaccatgtggctcattgtattatttgatctaccaacagacacaaaagaagcgagaaaagaatatacccagtttagaaaattcttgttaaacgatggttataccatgatgcaatattcagtttatatgcgtcacagtagcagtgatgaaaatgcaatcgtccatgcaaaacgagtaaaagcctgcctacctgatgatggtgaggtgagaattattaaaatcactgacaaacaattttcaaaaatagaagtctattatgggaaaaagcgcaagccagcagaaaaagcaccacttcaacttgattttttttaaagtcaaagtggtgttaattgatacaaaatcaataggttatgataagtatagtgtaaccgactaaggtctatctgcaaatcacaact

SEQ ID NO: 693 - DNA, 5268 bp, synthetic construct
  source 1..5268: mol_type = other DNA
  misc_feature 1..5268: note = Synthetic
cagattattttcgtcagcttggtatttgtcctaatttaatattaacgcaaaaaacgtctcgcacatcttggcgcgttctgagtgcttatttgaatcttagctggatatgtataatgacaacaaaaagcaattgttatcattacgattagtctgccctcacccttccaacaaatcactcatccgttcaccacaattcaaaacagttcgccccgtatttataatctcagcccgatcaagaatgtttccatacgaaaaaataaagtagttttttccaaacccgaaaaacggtaattagctccgccagtaaaattttctcggcaggtatttttgtatttgaaattttttcttcaggtttttggcgcgaataccaaaaaataacattcaagatgaggcgcaagtagtgacggatgatgggataacgatgtgaagttagtttgaggtggggatgtaaattttttaaataatgtcggccagacaattcacatactttaattgtagtattatctatagcaaacccataaaaatggtattcttatccatgtgttcatgaaaaagatttggaactgtataagtataggaaaaactgaatgaatgatgatctattcgtaaatatttagagcaataaaaagcccccttaagttttactttgcgagggctatggtcgcttgaaagcgttgcctacgaaaaacaatttcattggtatgaaaagcaagtaggctatagttggttacactatgatttgcatgatatacaaaaggatgaatatgagcaaggtaattttaggtcttgatttaggcagcaattcaattggatgggcacttttaaaggagcaaaatggcaaacccaatgaaatcatcaacattggtagtcgtattttcactaaagcagtcgaagaaaaaacacccacgccaaaaaatgtaaaacgtagaaatgccagattatcaagacgagtaactcagcgcagagcaagacgtaagttaagaatgctcaattatttagtcaaacttaacctattacctcaagaactaactggcaatccaacaccagaaatattactaaatgagctaggtagtccttatttattacgtgctaaagcacttgatagccctctaacaaaatttgaaatgggtcgcgtattgctccatcttgtgcaaagacgaggctttctgagcaatagaaaaacattgcttggtgatatggcagatgatcctgatgtactagatgtattatcagaacttgaaggagaagatgataatagttcagaccgtgctaaagaagaaactgcatttaaagcagatattagtcaattaaaaaaagccattaatgaaaatggatttcgcacggtaggtgagtatctggcctcattagatcatcacgattgcaagcggaatcgatctcgcgatggcggacatttacggacagatcgccaaatgtatcgtgatgaacttgatctaatttgggagcaacaaaaaacacatcatgaagaattaactgatgcagtcaaagaccaaatagaagatattatatttaaacaacgtccattaaaatttaatgctgatcgcattggtaagtgctcattagaaccctctcgaaaaagagcaaaaattgcacgattagaatgccagagattccgctatcttcaggatatcaataacctgcaatactttgattattatacagagaaatcaatttcccttgatggcttggctaaacaaaagctggtgcagttatttgaaacaacagcgaatgtaagttttgcaggtataagaaaagctttaggttttgataaaacaatagagtttaatctggaaaatggcaataaaaaactaaaaggaaatataactgcttgtgaaattcgtaagcaactgcctgagtgggattcttatgaagatggtaagcaacatgctttagttgaagacttgctcaccattaataagaaatcagtcctaaaaaatagacttacagggcattggggattttgtccaaatacagcagttcaactttgtttgctagagtttgaacctggacatagtaaccattcgactaaagccataagtaaaatgctacctttcttaaagcagggacaaatttattctgatgcccgagtaaacgctgattacggctatgaaataacaaaattagagtttactgataaattaggcgcaccaccagaaacatccaatccaattgttaacaaagctctgcacgaattaagacgactaataaatgccatcatagctgaatatggcaagccagatgctattagaattgaaatggctcgtgatttggaaatgaatacaaagcgttatcaagattttatcaagcagcaatctaaaaatactaaagcaaacgatgaagccgttaattcatatcaagaaatggggcagaagaatcctcatcttgcgttatcaaaatacccaagcaaaacagataaacttaagtaccgtttgtggcaagatcaaaaacagagttgtgcatacagcgggaaactaatcagtaaatctgaattatttagttcggctatagaaattgatcatatcttaccttatagcgaatcacttgatgattcatacatgaataaagtgatttgttataccagtgaaaatcgttttaaaggacaaaaaaccccgatagatgcttttggcggtaatactgacaaatggagtcaaattactcatgccattaataaatgggataggtcactaaaatctaagaaagcgaggttttttactactttttctgagttacagaaacgtgactttattagcactcagttaaatgatacccgttatataggtcaagtagcacaagggtatcttgctgaattaggcgcggatatatcggttagcaaagggataacgactgcttggttaaggcatcagtggggattgaatagtctgattggagagactgataaaaaagaacgaactgatcatcgtcaccatgcaattgatgcggtagttgtcgcatgtgttgacaggcgtttatatcaagccttagttaatacagcaaaagaattagaacgttctcagacagaactcaatatgaaggatatttatattgatccaccttgggataatttacgtgacgatttagaaaaatcactcgccaaagttattattgctcatgttccccagttaaaattaacaggagaattgcacgaaactacaggtgcaggatttatcgaaggtattggtaatgttaatcgcaagaacttagatgggagtttcacccaagttgataaaatcattgatccgattgttagagagttagttgagcagcatttagaaaatcatggcgataaccctaaaaatgcttttgcagaaggagtaacggtataccataaagatggcaaaaccgcgataaaacgtgtgcgtgtattacaatctaagactacattagaaaagcttggaaaatccaagtttggtgcaaaagacaaacaaggcaaagtatttaaatggttagcgtttggtaacatgcatcatgttgaaattattaaacacaaagcaacaggtaagtgctctggtcagtttgtaaccacgatggaagcaacccatagagcaaaaggtatcaatatgcctaagcaatcaattattaagactaatcatggaaaggatcatgagttcattctagcattgcatattaacgatttggtaagtatggaaaaagatggtcaatgtttcttttaccgcgtacaaaatatggaagctggtgataacagaataatgtttcgtttacataacacttcggtattgggaaataaaagtgaagggcttcgtttaagtgttaataatggtttatttgatatctggcaattgcaaaaacattcagttaacgcgattgggaagctaattgggtgattaaacgcaccattgatattagtgaacctgcttatctgcatttaaagcatcagcaattgttgatagataagcaaggtgaaacgattgcacaaataccgattgaagatttaggtgtagtcatcttgcaaaactctgccattgtaattactcaagcagttattattgcctgtcagaaaaacaatgtggtcgtggtgttttgtgacgagcgacatttaccttactcagttttgttacccatcagtgaaggtaataatctgcatagtaaaatattacaacagcaactaagcttaacattacctactaaaaagcgtttatggcaacaaattgttaagcagaaaattgtggggcaagttaatacgttaaaagtattggggaaaatttatgctccactcgaacgattatctgagaatgttaaggctggggatccaaataatattgaagcacaagcggctcaagtttattggaagttgctttttggtagtaaattcaagcgagacgcagaattagacggcattaatagtcttttgaattacggttattcaattatgagggctatggttgcacgagcaattgttggcagtggtttacatccaaccataggcctaaatcaccataatcaatataacagcctttgtcttgccgatgatttgatggagccatttagaccttgggtcgattttaaggtatatcaaatgattaaaaataatgcagagcttcaagttactaaagaatcaaaaataccactgttaaatttattatcagaaacagtggcatgggagcatcaagatatgccactaatggttgcttgccattatttaattgcaaatctaaaacgtgcttatcttgatagttctgttgtattaatctatccgaaaacattaactcagcatcaggcatgagctttggcggtttaaacactgtgtgggtaattgtaatgtttgatttaccaacagatacaccacaagcaagaaaacaatatactatttttagaaaacatctactgaatgatggttttgtaatgatgcaatactcggtttatatgcgtcatagtgccagcgatgaaaacgcacaagtccatgcgaagcggataaaatgtcacttaccacctgatggtgaggttcgaattattaagataactgataagcaatttggcaggatagaggttttttatggtgaaaaacacaagaaaatcgaacaagcaccagaacaattatcactcttttaaatgcaagagtgataatttgtgccatataaatcaatttattaacgaaaggctagtgtaaccaactatagcctaactgcaaatcacaacatcaacttaacaggtgctactagctttagcagtgtaaccaactatagcctaactgcaaatcacaacaagtaaagtagcaaaagacggccttttaaa

SEQ ID NO: 694 - DNA, 5238 bp, synthetic construct
  source 1..5238: mol_type = other DNA
  misc_feature 1..5238: note = Synthetic
aaacggttaattttgcttgcttgtcattggcatattctagaatttttgtaattctaccagttctatcataattgattctttttgataactttccatcaattcgctctctaacttgctcaacctcaccagttggaaaatatgttttagtgctatccgctaaagtttgaaatgaaactcccagtgcaaccaatccgattaatactgtttttttaattgtttttctcatttttttactttattgttgatagtgattattaggcgttaaatttagactgtcaatccataactgtggatattgtaacgcacctatatctaaattgtaaaccccaaattaaagagctcactccaccccttttaaaagtgagatagacatagggtgagtgagcgttacattgacgttaaaagtaatattaatttgtataatgcaaacttacttatatatttagttctttttgatctattaacctgatttataataatcaaaaaatcatcattttgacaacacagtagagaatgcataaagaagaaaatagtaaaacttaataagttcattgaaggcttgtaaaagtggattattcaatacttaatgcgttggattagatggactatatttttcaaatatggaatgacgtaatgtacaaaattaatacagagaaaaatagtatagaaaaactagaagaacggttgtttgatattattacagcagagtttagtgaattttattattacaataaaattggtacaggcataaaaaatcccccactgggagggacttggtcgcatagaagcggagcctacgaaaaataaatttcattggtatgaaaagcaattttaataagcgatagtcggttacatttgaactacacattctacacaaggagattgagaagtgcaacaaaaagttttaggattagatttagggtcaaactctataggttgggcattgctaacagaagaatcagggcaatcatcagagattgttgacctaggttcacgcatctttagcaaggcagtagaggagaaggttccaacacctaaaaatcaaaaacgtcgtgatatgcgattaggacgaagagtattacaacgtcgtgcaagacgaaaacaacgtatgcttaattatttagtatcgctcaacttactgcctaaagagctacaaaataacactcaaccagaaattatattaaacgagataggtgacccttacgaattacgaacaaaagcactagatgaacagctaacgccttatgaatatggaagaatattattacacatcgtagctaggcgaggttttttatccactaaaaaacaagttgctggcgatttaatcgacgaccctgatacgttaaattacttaagcactcttgatgaaaaaccaacaaaagacaaagaagagggtcaatttaaggcagatatttctcaagtttatcaacaaattaaagactgtggagcgagaactttaggggaatatctacacggtctagaaattggcaatgttaagcgaaatcgcaatcatgatggtgggcatctacgcactgatcgaaaaatgtatctagatgagcttgggttaatttggaagcagcaagctccatattttgacaatttacctagtgatttcatgcaaaaaaataaaggtgtcatgaacattattttttaccagaggccactaaaattaaacaaagatagagtgggacgatgctcgctagagcccaagcattatcgagccaacatggctcgcatagaagtgcaaaaatttagatatttacaagacatcaataatttaaaattttttgatcgttggcaagagaaatggataagtattagcgatgaacaaaaatcaaaattaaaaaagatatttgaacataatgccaaaataactataacagcgctaaaaaaagaattaggcctagatagaccgacaaaaataaacctggatacaaaaaatcttaagggcaatataactgccatagaaatcagaagtgttattggtgatacttgggataaatatacggccaagcaacaacacgatttatttgaagatatatttactattaagaaaaaatcaacacttaaggctcggttaatcactcattgggactttgataagaagaccgctgtaaaactctgtttaattgattttgagccttctcattctagtcattctctaaaagctattaacaagcttctaccctacctagagcaaggaatgatttattcagatgcacgtaaagcagcaaattatgattacaaagtagaagaaattgaggctgtaaatacactgggaatgccgccagaaacttctaacccaatcgttaataaaggcatgcatgagttaagacgtttgattaatgccgtcattaaacaatacggaaaacccgatatcattcgtatcgaaatggctcgcgatctagaaatgaacactaagcgctacaaagaaaatgaatctcgtcaaaagaaaaatcaaaaagccaacgaagcagcacaacatgcctttgaaggcttaaatttgggaaaaaaatatgcctctcatgatgacaaaattcgttatcgattatggcaagatcaagatgaaagatgcgcttatagtggcaatactattgcacttaaccaagtatttagctctgaatgtgaaattgatcatattttgccatttaaaaaatcacttgatgattcctacatgaataaggtattgtgctttacatcagaaaatagaaataaatctgaccagactccagttgacgcctggggtggtgacaatgaaaagtggaatcaaataacacaagcaattggacactgggataaatccttagataacaaagcacagcgtttttataccaaagaagctgacttgcaaaaacgagattttatctcctcccaacttaatgacactcgctacatatccaaactcgcacaagactatgtgcgccaattaggttgtgatgtaaatatcaccaaaggctttgttgttagtcaaattcggcatcagtggggctttaatagtctaattggtgaagttaataaaaaagaacgcaccgatcatcgccatcattctattgatgcagtggtaattgctgccacttcacgcaacttgtatcaaaatgctgttagacaaatcaagcagaatagactcaacattgctccgccgtattcgcacattcgtgaagaattggcagaaaggcttgagcacactattgtatcgcatgcaccacggcgtaaaatctcaggcgcactacatgaagaaacaggcgcaggctatattgaaaaacatggcggtttggtttatcgtaaaacccttaatcaagaatttaccattaaaaatgccatgagtattgttgatgaacaagttaaaacaacagtgctagagcatattgaaaatcatggaatttaaaaactcttaaactaggtaaaaacccaatcaagcgtgtacgtgttttacaatctaaaaccaacgagaaaaaactcgcccaaagcaagtttggcgtgcgtgatcaaactggaaaaatttttaagtacatgagctacggtaacacccaccatgtagaaattataaaaaacaccaaatcaggaaaaatcaaaggggagtttgttacaaccatgcttgcctcacatcgcgccaaaggtattaacatacccaaacaatcgatcatcaaaactgaccatggagaagattgggaatttatcatggttcttcatattaacgataccgtgagtatcgaactggaaaatggcgagcgtgtattttatcgggtgcaaaaatttatgattgcacaaggttttttagtcttacgacttaatacagcatcaacgctcaagaataaagacgaggaaattcaaatgtcaatacacagattatttacagagatgaagttaagaaatcatcaaatgaacaccataggtcattttattgatcatgattaaacgtattgttgaaattagcaacccgagttacctacacctcaagcacaaacaactactcattgatcaagatcatgaattagtggcacaaattccgattgaggatattggtgcgctagttttagagcatagtgctattagtatcacccaaccgctgattattgaatgccaaaaatacaatgtggcaattattttttgtgatgaaaaacatctaccctattctactattttgccaattgctgaaggaaatactctacatcaaaaaatcctcaaaactcaaatcaacatcactgagccgactcgcaagaggttatggaaacaaatcatcattcaaaagattaacaatcaagctggcacacttaaacgatttaacaaaccccatgcgcgtttggataaattagccaccgaagtgaaatcgggcgacagtacgaattgcgaaggtttggcggcacaatattattggaaatccttgttcggttcggattttattcgtgatcaaaatgccgatggaattaatgcagtgcttaattacggctatacaattatccgtgccatggtggcgcgcaatatttgtgcaagtggtttgcacccatctattgggctgtttcatcataaccaatataatgctttatgcttagcagatgatctaatggagccgtttcgcccttggatagatagtattgcttatgaactgcaccaagccaaccccaatatcaatatcacaatcgagagcaaaaccccatttttaaatctcattagcaacattgtgcagtatgagcataagaaaatgccaatgatggtgtcgatgcattatctgatggcaagtctaaagcgtaattttattaaagaagtttcaacattgacatacccaatattgttggcgtaatatagagtttttaaacattggctttacttatgtttggaggtttgcaaactatgtgggtaattgtgatgttcgacctgccaacggaaaataaattgatgcgtaaagattacgcgcactttcgcaagtttttgcttgaggatggctttaggatgatgcaatactcagtttatatgcgccattcgagtagtaaagaaaacgcccaggtacatgcgcgcagaattaaactccacttaccgccagacggcgaggtaagaattatcaaaattaccgacaagcaatttggacgtatcgaggttttttacgggaaaaaacgcttaccagtcgaaatagcacctgaacaactctcatttttttgactagaaaaaacagaattaccctggcattaaagcatatgtagcaggcagattgtaaccgactatcgcctaaacgcaaatcacaac

SEQ ID NO: 695 - DNA, 4819 bp, synthetic construct
  source 1..4819: mol_type = other DNA
  misc_feature 1..4819: note = Synthetic
gacaaaaacgaccgacgccgctataacgtcgaattgacggcagaggggagaaaactggttaaaaaaatcttgcccgagcagaccaagtggataaaaaaggtgatgggaatgatttcagagaaagacttggaacaactgaaaaagatatacgaaatttttggctgagggaacaagaaaagcgaacaacaattgcatcgaattgaggtcatattttcacgggaacatggtaattgaattcctttaaaccgcacttgaattgatttttttagaaataaccgccgggttagtcaaataaactgtctttattttttttcaaaaaaaaaagcccccgaatgcgagggctttggtcgcgtaaaagcgttgcctacgaaacatcagtttcattggtatgaaaagttcataggccttggtcggttatactgcatgtaattatatccgggagagaaaaatgttcaagaaaattttgggattggacttagggacaaattccatcggatgggccttgcttgaggaggataatggcaaaccgttcaggatcattgatcttggctgtcggatttttaccaaggccgtggaggaaaaaacgccaaccccaaaaaacatgaaacgccgaaacgcacgtttggcaaggcgtgtaatccagcgccgggcgagaagaaaaaaacggatgctgaattatctcgttaagctggagcttctgccaaaagagttgcaagagcatagtcagcctgaagtgatcttgaatgatataggcgatccgtatgttttgcgttctcggggcttgaataaagatcttaccaagcatgaactggggagggtgattttgcatctggttcagcggcgtgggtttttgagcagccggaaaacactacttggtgatatggtcgacgaccccgacgtgcaagccgaattggccgaacttgaggccagcggagatgaaactatatcttctgaacaggcaaaagaggaaaacgccttcaaaaaagatatctcagaactcagagacaggataaaaaacgcaggatgcagaactcttggtgaatacctggcgtcattcggacctcatggagccaaacgaaatcgtcagagactcggaggtcatctccgcacagacagacagatgtacaaagaggaacttgatctgatttgggccaggcaaagccaatgccacccatttttgacagatgagataaaagaacaggtcgagaaaataatattcttccagcgtcctctcaggctccgttcggacagagtgggcaaatgttcccttgagccccgctgtcagcgtgcgcagttggcaaaacttgaatgccagcgttttcgatatctgcaagacataaataatcttcaatattttgatcttggtactgatacctggcaaccccttaatgatggtgaaaggggcaagctgatctatttctttgaaaaccacgcctcaataaccttccctggaattaggaaagtccttgagctggaccgcaaaacagaattcaaccttgaaagcgacaccaaaaaactcaagggcaatatcactgcctgtgaaatcagaaaagcgttgcctgcttttgactcattgtccattgatcagcagcatgccttagtggaggatctcctcaccataaggaaaaaatccgttttaaaaaatcgtttgttgaatcattggagattttcgacaaccgaatcggttaaactgtgcctgttggaacttgagcctgggcacgggagccattccctgaaggcaatcagaaaaatgctgccgttccttgaacagggccagatttattccgatgccaggcaaagcgcagattatagttataacccggataaagttaaccctgctgaccgactcggcgctccacctgaaattccgaacccgattgtcctaaaagccctgcatgagttgcggcgacttgtcaacgcgatcattgccgaatacggcaaaccggatactatccgcatagaaatggcccgggatctggaaatgaacacaaagcgtttcaaggaattcatgaaacagcaggcggccaacaccagggcaaacgatgaggctgccgaaaaatacaaggagatggctggtaaaaatccccatctcaaactttcaagttatcccacgcgtgacgacaaaatcaagtatcgcctctggaaggaccaggaagaacgctgcatctatagtggcaggcaaattagcttgagcaacttgtttagccctgaaatagatgtggaccatatccttccctacagcaagtcccttgatgattcgtacatgaataaagttgtctgctatgcggctgaaaatcgctacaaagggcagcgctcgcctgttgaggcttttgggggcagcgacaaatggacgcagatcatccagtctgttaggcgttggcccaaacaattgcggtcaaagacaaatcgatttttcgtgactgaggaagaactgcagcagcgagatttcatcaacagccagttgaatgatactcgctacatcagccgtctggcgcgagaatatctgctccaactggggactgacatcacagtaagcaagggtataacaacctcatggctgcgcaatatgtggaatctgaacagtttgcttggaaacagccaggtcaaagaaagaactgaccatcgtcaccacgccatagacgctgtggtaatcgcttgcatagaccgttctttttataaaacattagtggatatgtcaaaatgggcagagcgaaggaatcctgaatttagaatgagggacattcattttgacccgccctggcagaaccttcgaggagacctcgctcaaatcctgggaaggactatcattgcccattccccgcaacggaagctgagcggtgctttgcacgaagaaactggagttgggtttattcccggtattggtaatgttaaccgcgtgaaccttgatcgtgattttaagatgaccaaggtcaaaagaattgtcgacgagaatgtgcgtaaactgattgaagagcatctgtccaggtatggcaacaacccaaaagaggcctttgccgaaggaataacactttatcacaaggatggcaaaacgccgataaggcgtgttcgcatcgttcagtcaaaaacaacccttaataaacttgaagtcagtaaacacggagtcaaagactcaaggggcaacatttttaaatggcttgcctatggcaatattcatcacgtcgaaatcctgagagacagaggtaatgatacatatcacggggtatttgtaacggccatggaagcttcttgtcgcgttcgtggcatcaatatgcccaagcagcccattatccgtacagaccatggagatgggcttgagttcattatggcacttcatatcaatgacttggtgcgtttaaaaaacggcgggacaaatgatatttatcgaattcaaaaattggacagcgccaacaaacggttggagttacggcttcatgctgccgcgacaattaataatgaagttgaaacgctaccagatcgagaatcaacgattcctgctttgatgaatgcggaaatggtaaagcttcgtgtcaactgtttgggcaagattattcaatgataaaacgcatcattgacataagcgaaggagcgtatgtacatttaaaaaatcagcagatgctcgttgataaagccgggaaatgcgttggtcaaattccggttgaagaccttggagcagttattctcgaccatccagccatcattgttagccaagctgctgtaattgcctgccagaaaaataacgtagccattgtttattgtgatgaaaagcacctgccatattcagtcgtattgccaataagtgaaggtcactctctgcaccagaaggttcttcgtttgcaactgaatctgtcattacctcatcgtaaacgtatttggaggcaaatcatacagcagaagatttaccagcagtcatttaccctgaaattattaggcaaaagtagcgattatctggaaaaattggcaaaacaagttaaatccggtgaccgtgaaaatcatgaagcacaagccgcccaacgatattggaaactgctgatgggtgaaaattttaagcgagattgtaaaggagaaggtgttaattctatattaaactacggttatgcgataatcagggctatggtagcccgtgccttggttggcagtggtctccaccccgctctgggtctccatcatcataaccaatataacgggttatgtcttgctgacgatttgatggaacctttccgtccatgggtggaccggatcgttttccaattgtttcaaaaggatgagaactttaaagttgataaggaaacaaaaagagaacttcttgccctgttgagcaaaaccgtaagttggaatgagaaaaatttgcctatgatggtagcgtttcattacatggcagcggatctaaaaagagtctacgaattccccaggtgccagcttaattttccacagttgttggagaaaatcaaaaattgatttttggcggccttaataccatgtgggtgatagtattatttgacctgccaaccgacacgaaaaaggcaagaaggcaatatgtagaattcagaaaagaattgctcaacgatggatttacaatgatgcagtactcagtatataaacggcattgtgcaagcgaagaaaacgctcaagttcatataagtcgagttaaatcagtattgcctccggatggagaggtaaggatagtgaaaattaccgataagcaatttgggaaaatagaagttttttttggaaaaaaacgaaaacctattgaacacgcacctgttcaacttcagtttttttcagtaatttccggttaaggacttgcatgtatagaaaaatc

SEQ ID NO: 696 - DNA, 4742 bp, synthetic construct
  misc_feature 1..4742: note = Synthetic
  source 1..4742: mol_type = other DNA
aataagaaatagactgtcctattaattgtctttcctttattggattaatctactaatatccgcaaaaactagcttagtaaaagtaattcactggagaagagggtggggcgtagcccccgctgggagggctagggtcgcttgaaagcgttgcctacgaaaaatctttttcattggtatgaaaagcgtaataggccttagtcggatacaatagctacctattataaataggagaataaaatgagcaacacaaaaataaaaaaagttttaggattagatttaggtagcaattccatagggtgggctttgctggaagaagttgataaaagacctcagtcaattattgacttgggctgccgaattttcaacaaggcagttgaggatcaaactccaactccaaagaatgtatcacgcagaaatgcaaggttaaccagacgtgttctgcagaggcgttccaggcgtaaacagagaatgctgcactacttgatttctctaagcttacttccagaatcactgagaaatgatcattcacctgagataacactcaactcaataggtgatccatatgagctccgtgctaaggctcttgatgatccacttgaaaaatatgaacttggacgcatctttctgcactttgtgcaaagacgagggtttctgagtaatcgcaaaacaattctaggggatctggttgatgatcctgatgtaattgcggtattagcagaagcagaggaggaggaagacacctcttcagagcaggccaaagaggaaactctcttcaaaaaacaaatatcggttttacgccaaaccattgcagataaaaaatgccgtactctgggagaatatctgttttctataaaagctccactgactaaaagaaaccgtacccattcaggaggtcagctcagaacagatcggcaaatgtaccgtgaagaactcgatttaatatggaaagaacaagctaagtatctctctactctcacggatgaagttaaagaacaaattgaaaatatcatcttttttcagagaccgcttaagctacgttcggatcgcattggtaaatgctctctggaacctaaaaaaaacagagcaagtattgctcgcttggaatgccagcgctttcgctatttgcaagatattagcaatcttcaatacatgctgcccaaccaagaccaatatacaaagttgaatgaaaaggaaaaggggaccttagtaacgctttttgaatcaaaaggtgtagtaagctttactgatgtcaaaaaagcccttgatctaaagcgaaatgttaagattaacattgaagaaggaggcaataagaagctcaagggaaatgttacttctacaactattcgcaaggtatttccaagctgggataaattgaatagcactgagagagttgcgttggctgaagacatgcttactattcagaaaaaaacaacacttaagaaacgacttactggacattggggactatctcctgaaatagcagttgaactttgcatgcttgaatttgaaccaggacacatgaacctttccttgaatgccattaacaaactgctaccttttttggagaaaggtatgctctttaatgaggcaagagtaaaagcagggtatggttatgaagtagaggaaacagagttaaaagatcgcttgggtatgccacctgaaatcgcaaatcctattgtgcaaaaaggactacacgaactaagaagacttgttaatgccattatatctgaatacgggaaacctgatgtgattcgtatagaaatggctagagatttagaaatgaacaccaaaagatatcaggcttttaccaaacaacagaatgcaaacacaaaagccaacgatgaagcgactgaagcatttcaggatgtcagctcccaaaatcggcatcttgaactgggtcaattccccagccatactgacaaactaaaatatcgtctttggattgagcaggaaaaacgttgtgcttacagcaaccaaagtatcaaccttacctctttatttacagggcaagttgagattgatcatatcctgccctacagtcaatctttagatgattcatacatgaataaagttgtttgtttaacaagtgaaaatcgaaacaaaggtcagagaacgcctgttgatgcctttaaaacaaatcctgaaaaatgggaacaaatcaaacaatccgtttttaagtggggtaaaaatctgaaaagcaaacagaatcgattttttatgtttgatgcagacgttcaaaaacgagattttattagcactcagttaaacgatacacggtatataagcagagtagccttggattatttaaaacaactgggggcagacatcaccacctgcaaaggcattaccacctcgcatgtccgacattggtggggcttgaataatttactcggagatacagacaaaaaagaacggactgaccacaggcatcatgctatcgatgctgctgtaatcactataattgaccgtggtttctacaacaaaatagtttcgaccgcaaaacagctggagcgaggcaactcgtctctgaaaatgaatgatctgaaagtagctccgccatggggggattttcggaatgacttggacaaaaaactaaaaacaatgatagtcgcccattcacctagccgcaaaatttcaggttctctgcttgaagaaactggagttggattcattaaagggcaaggtactgtatataggaaattattaggcccggagatgaaagtcaaacaggcagagaaaattattgatccgcaagtgaaggccattgttttagatcatttggaacagtatggggatgatcctaaaaaagcctttgctgaaggaattgctgttttgcacaatgacggtaaaacaccaattaaacgtgttagagttttgcaatccaaaactactctagacaaactggaaaaacacaaatttgctgtcagagaccggcagggcaaagcgtttaagtggctggcttatgggaacctgcatcatgtggaaatagtgcgtgataggcaaagtgagaaggtcagtggagtgtttgtaaccatgatggaggcagctaaccgtgccaaaggaattaggatacctaaacagacaccagtgcaaactaaccatgggccccaaacagcgtttttgatggccctgcacatcaatgatctagtcagtatgatgcaggatggagaacgtaaattttatcgggtgcagaagttggactctggaatcaatatggttatgtttcgactgcacactgcgtctactcttgacgaccgtaaccaagagttgcatctcacaattaataaacagcttataagtcaatggaatttgcaaatagaaaaagttaatgccataggtaaattacaacctatccatgattaaacgaacgattgatgtcagccaagccagttatttgcatctaaaaaatctacagttgctgattgatcaggaaggtaagactgttggccgtattcctgtggaagatttgggaattctgatactggagcatcctgctattacgattactcaaggggtaattctagcctgtcagaaaaacaatgtagctgtagtattttgtgacgaacgacaccttccttattctacattgcttcctttaagtgagggaaaccagcttcacagcaaggtgcttctccagcagatcaaaataagccagccatcaaaaaaacgtctgtggaaaatcattgttcaagaaaaaattcggcaacaggcacttactcttaagcactcaggtaaacctcatcaggagcttttaagtatttcctcaaaagtcaaaagtggggattcagggaacctggaagctgaagccgcccggaaatactggcccttgctgatggggaaggggtttgttcgagattttgaagctgagggagctaatgctcttctcaattacggttacagcattgtcagggccatgattgccagagctttggttgggacgggtttgcatccggctttgggattgtttcaccataatcagtataatggtttggccttagcagatgatcttatggagccgttccgcccttgggttgatcgaattgtttgcaagttattaatggaagattctgacgctcaaatcaacaaggaaagtaaacagaaattattgggattgcccgggaaacaagtcttgtgggggaaaaaagaaatgccgttgttggtggtttcacaccttttggcaactcgtctcaaacaggcttatgaagattcttccctgtcactaatatggccggaatggattgaatgatgttgcttagggaatgtggtttttggcggatataatacaatgtggactatcgtaatgtttgacctaccgactgataccaaatcagcacgcaaacaatattcacaattccgaaaatttctgcttaatgacggctatgacatgatgcagtattccatctattcacgccaccatgccagtgaagaaaatgcgcaggttcacattcaaagggtcaaagagcgtttgcctcctgacggcgaagtccgaatcgtcaaaataacggataaacaatttggaagaatagaaattttcttcggaaaaattagccaacctgttcaagttccacccgaacaacttgagtttttttgaggaaaaatcaaataagttcttgcaattacagttgtttacttgctctctattgtacccgactaaggtctatccgcaagtcacaaccctgcagtggtccgcttattaatccctggtattgtacccgactaaggtctatccgcaagtcacaacc

SEQ ID NO: 697 - DNA, 4615 bp, synthetic construct
  misc_feature 1..4615: note = Synthetic
  source 1..4615: mol_type = other DNA
tgccgattctattaaaactgagtgtattgctgtggctaagaaaagcccgttagtgacgtaaagatataaccaccaggcctggtgctttattacgagcataaaaaaagcccccgctgggagggctttggtcgcttagaagcgttgcctacgaaatagatatttcttggtatgaaaagctaaatcttagaccttagtcggttacactatctagtgaatatactaacagggtgggcgactatgagcaagaaaatactaggtctagatttaggtactaattcagttggctgggctttgtttgaagcgaacgatgatttagcccctcataaattagtggacttaggggtacgaatttttcagcgagctgttgaagacaaaaccccaacccccaaaaaccaagcacgccgaaatgcaagaatggcacggcgtattttgcaacgtcgtgctagacgtaaacaacgtatgcaaaacttcttaattgcccacgacctgctcccctctatactgtcagatacaacccaacctgagatgattttaaccggcactcgcgacttgcctggattgggtgatccctacgaactgagagcgaaagcacttgactatgaattaaagccctatgaactaggtagagtattattgcacctagtccagcggcgtggttttcagagtaaccgtaaaacattgttaggtgatatggccgatgatccggatgttgtaagtattcttagcgaagaaaatgaagacttaacatctgaagaaacggccttcaaaaaagatatagctcagttgagagacgaaataaaaaaatccggtgcaaggacacttggcgaatatcttcatcaattaccgcaaggccaagttaagcgtaatcgctcaacagaaggcggcaatctaagaaccgatagaactatgtacaaagatgaattttggcaaattattgaagcgcaaaaagcatttcatccggtacttgaagaaattgatctagccttgttcgaaattatttttttccaacgaccattaaagctaaaaaaggatagagtaggtaaatgttcgcttgaaccaactaagcatcgcgcgaaaaaggcctggcaaacctatcaaaggtttagatatttacaagatataaacagcttaaaactgtttaatagctataccaccgaatggcgatctctaaacacggaagatcgtaccaagctaattgaactgtttgaacaagataaaagaccaacactcaccaaaattaaaaaagttttgggtttaagtaaaaatgatttacttaattttgaaactggaaataagaactttaagggcaatacgactggtattgcaattcgagaagtttatcccgggtgggatgatttaatccaagaccaacaaaataaactcgaagaagacttaatttcatttgtcagtaaaaaagccctaaaaaaacgtctagaaacccattggggtttagatactgaaaccgccattaatctttgtgtaacagagctagagcctgagcattcagatttatccttaaaagcgattaacaagcttttaccttaccttgaacaaggtcaggtttattccgatgccagagtaagtgctaattatggatatgaggtgacgaagcacgagccacaaaacaagctcagtgcgccgccagaaatccccaacccaatcgttatgaaaggcctacatgaagttaaacgagtcgtgaatgcaattattaagcaatacggtaagcccgatgcaattcggctagaaatggcgcgcgatttagaaatgaacacaaaacgctataaagcctttgtcagccagcaaaataaaaaccaatcagacaatcaagaggctcaagatcaatttgaatctatcgccgccgcgaatcgacacttaggcttatcaaaatatccgtcacacacggataagcttaaatatcgtttatggaaggagcaacaaaaactttgtgcctacagccataaacctattagcttgactgagctatttaccggtgcggtcgagatcgatcatatcttgccatactcgctcactttaaatgattcttacatgaacaaagtggtgtgttttgcaaaagaaaaccaagttaaaggtcagcgcacacctaaggaggcctttgaaagcgatactgcaaaatgggagcaaattgaacaaggcatcgctcgttggtatagcaaggggttaatgaccaagcgtgatgcattttataaaaccagtgacgacctggataaagactttattggcagtcagttgaccgacactcgatatatcagtcgcgaagcactgcattacctgcaaaccttaggtgtagatgtttcaaccattaaaggccaagttacctcgtggttgcgacatatatggggcatgaatagcctaattgatgatgcaaaaacggaaaaagaccgaggtgatcaccgacatcacgcgattgatgcggcggtggtggcctgtgcagatcgtaagctttacaacacgattgtgcgtgtcgcaaaagacctagaaaaacgaccgggtacattaaatataaaagacattcatattgatccagtatttgatgattttcgccatcaaattgaatccagattgcaagaaattgtgattgcacatgcccctgttaaaaaaataacaggcgcattgcatgaagatacgggtttaggttttatcgaaggcgtgggcgcggtatatcgcaaaaagctagatgaaagcttaaccgctaaaagtgcagaaaatattttagacccagtagtaaagtctttagtaaaagcccacctggaaaagcatggcaacaagccaaaagtcgcgttttcaaaagccaattcgctttaccacaaagatggaaaaacaccgattaagcgtgtacgaattttgcagtcaaaagcctcgctaaaagatttagagcaaaccaaattagggataaaaaataaaaacggtgacatatttaagtggatgacgttgggcaatacgcaccatgttgaaatttttcggcataaagaaactggaaagtttaaagctgaatttgtgaccgctttggaagccacccaaagagcggtgcaacacaagcaacccgtggtgaaaagttacttgaatgatcaacatgagttttgttttgctttgcataaaaatgatttagtaagggccaaaaacggtagtgagtatgagatatatcgagtgcagaagaccgattcaacttctaatagattaatgctaaggaagcataccgcatccaggttggacaataagactgatgagatttttaaatcgattaccgcgttaatgggagagtatgaaatgcagaaaattcaagtgaatgccatcggaattatggctcatgatcaaacgcacccttgaaattagccacccaagctacctaaaaagccatcaagcccagttggtgatcgagcaagatcatcagcaagtggggcaggtcgcgtttgaagaccttggcgttttaattctggcacacccgcaaatcacccttacgcaagcggttctagaagcctgtgcgcaggttaattgcgtaattgtccattgcgaccatcgtcatataccaatcagcttaaccctgcctttggcaagccatagcttgcacagcaaaataatccagcagcaaatacaaatcacaccagtaaggcgcaaacaactttggcaacaaattgttcgcgaaaaaataatccaacaagcgcaaaccctacaaaatttaaatataaatactcaagttttaacgcggttggttggtcaggtacaatccggcgataaaaccaatatagaagcgcaagccgcccaaaaatattggaagttattgcttggtcaagactttaggcgcgaccctgacctagacggtgtaaatagcctgttaaattatggttacgccattattcgagcaaccatagccagagccttggtgggaacgggttttcatccagcaattggtttaaatcatactaaccaatacaacgcctactgtttggccgatgatgtaatggagccttttcggccttgggttgatcaacaagttgtttgttttgagtctgaccaaattaaccagcaaagcaaagcggcactacttaatcaattaaaccaaacagtggtttttcaacagaagtctcagccttttttagttgctctaagtttatttgttgcgcaattaaaatccgcttataccgacaacgaagttgtattaacttttccacggaggggttagttatgatttttggagggcagaataccatgtggataattgtattatttgacttgccaacagacagtgaaaaggcgcgaaaagattacacaagatttagaaaacatctgttagaaaatggctttaccatgatgcaatacagcgtttatatgcgccattgcgcgagtgatgaaaatgcacaaatgcatgttcagcgtgtacgtgctattctgccaccagacggtgaggttagaattgttaaaataacggataaacaatttggacgaattgaagtattttatggaaaaaaacgcattgaaacagaaaaagccccagagcaacttgtgtttttctgaggcgaataggttaaaacttccttcaatatcaattgcttatcagtgcgctagtgtaaccgactaaggtctaagcgcaattcacaac

SEQ ID NO: 698 - DNA, 4500 bp, synthetic construct
  source 1..4500: mol_type = other DNA
  misc_feature 1..4500: note = Synthetic
aattgttcacacgccctgcatctaaaacaagatggaactttgcccccctttgaaaaaagggagcctaaatatttacgcgctaagcataacccatatttatttactgtaatccgtgggaaaataaccttttttcgctcgttcccaagctctttgcttgggaatgcagttcgagaagctccagcttctcgaaaccggtaagccggagcttaatgagaggtttcccaaaggctattttcgcgttaaatagtttaagttaatactaaaccagtttcgaaacttaatggctgtagggtacgctacgcgtaccacagtagttcaacccctagtttaacgcgcccacatgtctttccttgtgactacactaggtacgcgtagcgtactctactattctgagtggacatcgcctgcgaagaattcgctcggattatttatggatgatacttacgaaatttgtaaacgactaaaggcgagtaaaaaattacaacataaatcgcttggtcgatcgccgcgcataaaaaagcccccttaggtttaaaccttgcgagggctctggtcgcttaaaagcgttgcctacggaaaacattccattggtatgaaaagttaacgatagaccttagtcggttacactgtgcagagaagtatacacgaggaaacataatgggcaaaaaaatattgggtctggatttaggctcgaattcgatcggctgggccttattggaagaacaagacggccaaccgaataagattattgaccttggttgccgcatattcatcaaagcggtcgaagaaaaaacaccgacaccgaaaaacgtcaagcgccgcgaggctagattgacacggcgggttttgcaacgccgcgcccaacgcaaagagcgcatgctggaaacgttaattcaacaaggcttgttaccacaagagctgtcaacgcatcctcagccagaaattatattgaatgttttgggcgacccttacctactacgtgcgaaagcgctcgatgaaaaactcgaagcgcatgaactgggccgtgtgttacttcatctggtgcaacgacgcggctttttgagcaatcgcaaaacgctgttaggcgacatgctagatgatccggacgtgcaagctgtgctcgatgagctcgaacaagacgaagatttaagcaacgaacgcgctaaggaagaatcagcattcaaaaaagacatcgccgaactgaaacgggaaatcgccttgaccggatgccgaactctgggtgaatatctcgccggcttcgaccggcaccgatgccggcgcaacagagcccacgatggcggccatttacgcactgaccggcaaatgtaccaagaagaactggagctcatttggcaaacgcaacaagaatatcatccgcaattgaccgaaaccttcaaggaagctatcgaaagcatcatcttttatcagcggactttgaaactcaaagccgaccgcatcggcaaatgctcgctggaaccgaaatataatcgaatccgtatcgcccggctcgaataccaatgcttccgctacctgcaagacatcaatcatttggaatatttagaaagccaaaccgaacgatggctaaagctgaacgaagcgcaacgcaacaaactggtcgaattgttcgaacgcgaggccaacataaccctacccaaaatcagaaaaaccctgtgtttcgatcgaaccgtcgaaatcaatctcgagcgaggggacaaaaaactcaaaggcaacatcacggcttgcgagatccgcaagattttgcccgattgggataatttcgatgccgaacgccaacaggctctggtcgaagatctgctgactttccagaaaaaatcggcactgaaaaagcgtttaacgacgcactggcgattcagtccggacatcgccgtcaacctctgtttgctggaattcgagcccggtcacggcaacctttcgtgcaaagcaatcagtaaactactgccctttttggagcggggacaaattttttccgatgcccgcatcagcgccggttacgactacgagcccgaaacaatagcggtgattgacaaattgggtctgccgcccgatatcgccaatccgatcgtgcgaaaagggttgcatgaactcaggcgcttgatcaacgcgctgatcgccgaatacggcaaacccgacgcaatacggctggaaatggcccgcgatctggaaatgaacacacaacgttatgccgactacatcaagcaacaaaaagccaacaccaaagcgaacgacgaggccgccgaaaaattcggcgaaatgcgccggctcaatccgcatctgcaattgagccgttaccccagccgcgacgacaaactcaaataccggctctggcgggaccaaaaagaatgttgcgcctattcgggacaaacgatcagcctgtcaacgctattcggccccgaaatagaaatcgatcatatcgtgccctacagcgaatcgctggacgactcttatatgaataaagtcgtctgttacgcgaaagaaaaccgtaacaaaggccagcgtacgccgatcgacgcttttagcggcaatgaacaacaatggaatcaaatcgttcaggcgctcgaccgttggcctaaatcgctgcaagcgaaaaaaaggcgctttttcatgaccggcacggagagtcaacagcgcgacttcatcaataatcaactcaacgatacgcgctatatgagccgcgttgcattggactacttgaagcctcttggcgccgacatttcggtcagcaaaggtcaaacaaccgcctggatgcgtcatcaatgggggctgaataatctgctcggcgatggcaatgaaaaagaccgcggcgatcatcgtcatcatgcgatcgatgcgttggtcatcgcctgcatcggccgaagcttttaccggaatctggtcgaaaccgccaagcaattggagcggcagcgttcgcaactgacgatgcgcgatattcatctcgacccgccctggccgaacttgcggaacgacttgcagcaaaaactgacggaaatgatcgtgtcgcatgcgccgcaccgaaaattgagcggcgagctgcacgaagcgaccggcgcaggatttatcgaaggtatcggtaacgtcaatcgaaaagttttagacggtggttttacccaggtcgataaaatcatcgacccgacagtaaaacaattagtcacacgccatcttcaacgcttcgacggaaaacctaaagaagcctttgccaacggagtcaacgtttatcacaaggatggaaagacgccgatcaagcgtgtacgcgtagtgcaatcgaagacgacattagcgaaattgcaaaaaaccaaattcggtgcaaagaataagcaaggccaggtctttaaatggttgtcttacggtaacttacaccatgtcgaaattctcagggacaaagagacaggcaaattttatggggaatttgtcacgatgatggaagccagtcaccgtgctcggggtatcggcaaaccgaaacaagcgatagccaaaaccggccacggtgaacagtatgaatttatgatggccctgcacatcaatgagattgtaagcgtcgagcatgaacgcaagcgggtattttaccgagtccaaaagtttgaacgagaacaaaaacgaatcaaattaaggctacatacggctgcaacgctcaataatgatcaagaaacattagcggacaggtattcaacaattgaagcgttgatgacgtccggattaaaaaaacatcgtatcaacgctatcggaaagatcttgtcatgatcaaacgcatcgtcgatatcagcgaaccggcctatttgcatgcgcaacacagccaattgtgcatcgacaagaaccgacaaacgatcgcgcaaatcccgatcgaggacttaggcgtattgatactacagcatccggcgatcgtgctgacgcaagccgcattgatacaatgccagcacaacaatgtcgccgtcgtattctgcgatgagcggcatttgccctatgcattgatattgccgttgaccgacggtcataccttgcacagcaaagtgttgcaacaacaaatcaagctgactgtaccggtcaaaaaacggttatggcagcgcatcgtctcggaaaaaatcgccaatcaaattcacgtcttacagcagttggacaaaaatacaaaaccgttggaacgaatgctgggcaaagtcaaacctggcgacagcgctaatatcgaggcgcaagccgcgcaacaatattggcgtctattgttcggttccgattttcggcgcgataccgaagccggcggcatcaacggcttgctcaattacggctatgccgtgatgcgtgcgatggtcgcgcgtgccatcgtcggcggcggattgcatccgacgatcggcatcaagcattgcaaccaatacaatgacttgtgtttggccgatggtaaatattcggccaacccctaatcaagccaatcaatcggttagctgatcccggaagtgcctgttcaagggaaaaacccataagtctttgatcggaaca

SEQ ID NO: 699 - DNA, 3402 bp, synthetic construct
  source 1..3402: mol_type = other DNA
  misc_feature 1..3402: note = Synthetic
tccttaatgatcttggtgatccttactttctgcgtaaaaaagcgcttgatgaaccactggaaaaaaatgaattgggacgtgtttttctgcaccttgttcagcggcgcggctttctcagcaacaggaaaacactgcttggtgatttagttgatgagccggatgtacaagttgtactggcagaagtagaagctgaggaagacacttcttctgaaactgccaaagaggaaacggaattcaaaaaagatattgccgttttacgccaggccatcagccaatccggatgcagaactttgggagaatatctggcctctgtaaaccagccggaatgtaaaaggaaccgttcacattctggcgggcacctgcgcactgatcgtcaaatgtaccatgaagagcttaaccttatctggcagaaacaaagcaatcatcactcggtcctgaccacagatgtgaggaaacaaattgaggatattattttcctgcagcgccccataaaactgcgatctgaccgcattggaaaatgttcgctggaaccaaagaaaaaccgtatcgcagtcgcacggctggaatatcagcgttaccgctatctgcttgatgtaaataacttacaaattatgcaacccggggaactcagttggaaaaaattaagcccggaacagagtgaaaaacttactgtattttttgagtcaaatgctaatgtcagttttgggaagttataatcaaacgcagcagtatgccctggttgaagacctgctgaccatccataaaaagtctgttctgaaagaacgtttgcgcggacattggggcctatcatcagaacaggcaatacagctttgcatgcttgaatttgagcccggacacggcaatctgtcatgcaaggcaataaataaacttttgccctacctggagcagggcatgctgtttaatgaagccagggtcgctgcaggttatggttatgagataaaagagagttcagcggctgaacgattgggagttccgcctgaaacagcaaatccaatcgtcaacaagggtctgcatgaactgcggagactggtcaatgccatcatcgctgaatatggcaaaccggatgtaattcgtgttgagatggcacgcgatcttgaaatgaatacccgaagataccaggaaaatctcaaacagcagacagcaaatactaaagcaaatgaccaggcaactgaagccttccaggaagtaggcgaaaaaaatccacatttgggtctgcggcactatcccagtcacactgacaaactcaaatacaggttatggcttgatcagaacaaacgctgtgcctacagcaatcaaagcattaatcttacaagtcttttcactggagaagtggagattgaccatatactgccgttcagtgaatcgctggatgattcatacatgaacaaggttatctgccttgcggctgaaaaccgcagcaaaggccagcaaactccagtggatgctttcaacggcaatctggaaaaatgggaacaaatcaggcagtccttgaatgaatggtgtaaaggtccaaaactgaaaagcaaaagggatcgcttttttatgaccgcatctgatgtgcagaagcgtgattttctcagcagccagctgaatgatacgcgctacatcagcagactggcagtggcgtacctgaaattacttgggtccgatgtaaccacctgcaaaggcgtaattaccgctcaggtacgtcactggtggggactggacagccttcttggtgaaaaaaacagtgaaaaagaccgcacagatcatcggcatcatgcagtggatgctgctgtcatttctaccatcgaccgtggcttctatcaaaaaattgtccgtactgccagagagcttgagaatacaggttcgggtttgggtatgaatgaccttaaagttgatgccccctgggatgatttccgcgatgatctggctgcgaaactggaaacaatgattgtggctcacacaccaagccgtaaactttccggtgcattgcatgaagcatccggcacaggattcattgagggacagggtactgtttatcgcaaactgctcagtccggatatgacattaaaacaggtggggaaaataattgatccgcaggtcaggatcatggtgcttgagcatttggaaatatatgacaatgaccccaaaaaagcctttgcggaaaacattactgtctttcacattgacggcaaaacccccatcaggcgtgttcggctgctgcagtccaaaacaacttcaaaaaaacttgctgaaaataaacatcatgtggaaataattcacgacttgaacagcggtaacgtcaaaggagagtttgtaacaatgatggaagcctcacagcgtgccaaaggcatcggcatgcccagacagccgattgtcaaaacagaacatggtccggataaggaattcctgatggcgctgcacatcaatgatctggtcagtatagaacaggatgggattcgggactattttcgtgttcaacagttggatgcaccaaataaaagggtcaaattgaggctgcatacagcatcaacacttgacaattcacatgagactcttaaagaccaggactccaccatacatgctttgattgaaattaaactaagactacacaaggttaatccaatcgggaaattgatagaatgatcaagcgtaccatagacattagcaaatcgagttatctgcatttgaagaacagtcaactgctgattgaccaaaacggccaaaccgccggtaaaatccccattgaagacctgggaatattaatactggagcatcctgcaatcacaatcacacagggtgcactactggaatgccagaaaaacaaagtggctgtagtgttttgtgacgaacgccatcttccttattcaacaatgctgcctatagctgaaggaaatcaactccacagtaaagttcttcgccagcaggttcagctcagtcagcccaccaaaaaacggttgtggaaaaacattgtacgggaaaagattaagcagcaggctttaacacttgaaaatgttggcaagccgtacaatgaatttcggatgctggcggacaaagtcaaaagcggagattcagaaaacattgaagcagaggctgccaggaagtactggcccctgctgatgggccaggattttagaagagattatcaggcagaaggtgcaaatgctctattgaactacggttacagtattttgcgcgcaatcatcgccagggcactggtcggcactggacttcaccctgcgcttggtctgtttcatcataaccagtatgacggtcttgctctggctgatgacatgatggaaccttttcgtccatgggtggatagtatggtttacaatattttgcaggataatcctgaagcacaggtcaacagggcaagcaagcaggtattgcttgaac

SEQ ID NO: 700 - DNA, 23657 bp, synthetic construct
  source 1..23657: mol_type = other DNA
  misc_feature 1..23657: note = Synthetic
actgcctttgagcaggatgcggtagccttggagaggctcctgacgcaagtgctcgcaaagggcttctacgttctcaaagacagggtaaggagcggtcgtctcttggtactcattgccaacgagaagcaccttgtcggctttgcgttccaagagcatgttgacgatgttctgatgctccaaatgggagtattcgcccagttcgcgcatggcgccgaggatgtacgcatccttggtactttgtactttgtccctttgtcctttgtcaaacgcttctatcgctgcctgcatggaggttgggttggcgttataggcatctaccaccacggtgttgtgctcactctgcatcagttgcgagcggttgttggagggcacataagcgcggatggcagctaacgccgcctcttcgctcacaccgaaatagcgtcccacacagatagctgccgagacgttctcggcattgtaaccgcccaccaaatgggtgtcggaaggcatcgtacccgtgtggtacaagaccgctttgctgatagaagacagaccggctacgcctgacagaccgcttgcttcgcaagctgacagatacattttctccagatacgggttatcggcattgcggaagatagtgccgttatgggcaacgaggaaatcgtacaactcccgtttggtggcttgtacgccctcgaacgaaccgaaaccctgcagatgagcacgaccgacgttggtgatcagaccgcaggtcggttccgctatctccaccaactcttggatgtcccccgggtgcgaagcgcccatctccacaatcgccagctcgtgcgcgcgcgtcatacttaataaggtgagcggcactccgagttggttattgaggttgccttgggtatagtagatcttatacttggtactcagtaccgcagccgtcagctccttggtggtcgtcttgccgttcgtaccggtgatgccgataataggtatccctaattgacgccgccatgcgcgagccaagtcttgcaactccgccaaggcgttctcgcccgagatgacgtacgcggctccttgtgctttcgcttgctccacgaagtcgttgccgtcaaaatgctctcctttgagtgcaacaaagatgcagccggggcttactttccggctgtccgtggtgacgttcagggcgtctttattgtctatcaaaaaactccaattcatctgttcaaacctttgcgggtgcaaaggtactgctttttttgcatatatgcaagaaaaaagagaaaaatcgcccaaattgagcgatttttcttcctttgtacatccttcgtacatcgtacattcgtacatcttaccttttcttgacgccggtatattcctcgacggtcttcgtggtgatcgtcgttgcgttcttggtggagtccgcgacctgcgtatacgttgccgtggtagagatcgtgcgccaagccttgcagctcgtcattccaagcgctactgcgcagcacgtcagcaacgctaacacgatcgtctcaatgatcttgtaaatctgttgattagtcatgatttttaaacgttaaaatggtttttttacaaaaacgttaaagagttaaaatggttcactgcgtgaacgttaaaaggagtgtcgcttatgtcgtcattttcgtgtcgtaacgttcatttcataacgtttcgatgcaatcgaaaccattttaactatttaacgtcacgcagtgaccattttaacaatttaacgcttacccgttgtgctcggcatcgtaagcctctttctccagcttccagaggaaggatttcatggtctttttgccatccggctgatccttctgagctgcgaaagcggcttggtcagcggagatcttcatgaggtctttggaacgagccgctactgctgctgccaccgccgagaagcactcaacggagtggtgcgtttgtaacgctcggcgccaaacgcatagacgcgctgacaattggggttcgtggttgccgccttgcggtgcgttgccaccagataattaccgtggttgtgaccgtcctgtttcttcggtcgtttcaatgcgcccgagatcgtctcgattcccgcaacgcctactgtcattactgccattcttttttgtcctttcttgtttgtatccgccttctttgtgacggatgggtgaaaatttgtgtgtttttcttatcgcctcttgcgataaaccaaaatgttccatttcgaaccacggctcaatcacggactttcatcggactcaagtcggactaatcacctaatcggaaatgttccattttgtctcatggacgaaacgatcgtttttcaaaatccggtgcaaagatacgtcaaaagtgaacaatgtgttccttggcaggtggaaattttatcaaaaaatcgtatctgtttcgtcgaacggcttcttgatagtaccatctgaggcagtggttcacgcggatggttgagatttcgtgcttggtggcggttgcttttcgggctttgcgagcggaagcgccgtttgcccgcgagaggaaataatcatccaccacagcttggttcttcagttcgatccggtgacgtttggcggacatataggtattgttgggttcacgtaccaaccacgggacgtcatatagaagccctgcgggcatttgagattggatatttgacatttttttcattttagtttttaacgtaaattacttgattgccggtcgggttcgccatttgccagccgtcacgttcttcggtcgtgccgtatttggcgtagtagtcggcatagcttagcacttgctgtttgggctgcatgacccgaaaatcctgaatgaagaaatacgggttgcgtcctttgtatgcgccgtgtttgcggagccaagcgatgatagcttgttgtttgtccggcggacaggcatcccattcaattttggtaacgtctctgcggttctcaaactgcacgtccggcttaaacaacgcccaataggtttcaaagtctgtttttaagtccataataaagatttttaattgtctcgtcccattgcatgtctgtcctttcagtccatggggattataggggacagacatacaagaggactgaaacattttttatttttctttttggttctttttctttttactcgatgacttttacagtcaacttgatctcgtccggctctttgtcagggtacaactccacgaacgtcttcacataccctgccatcacagcggtgcgtgccttgacgaggttctgctctttggtcttttcctttgcgttctcgcgccatttgaccgcttgttcttgtgggtaccggcggtagtcactgaaatcaaaactctctgtccgttgaagttggaacttaccaacaccatccacctcaaactcacctttctccaaaccttttgccgccagtattgctactgcctcattggttgcctcggttgagatctcgtcaatacgtgctttgatagctttttcttggttgcgcaactcgcgcagttctttcaaattatctgcttgcataatttttactttgttttttgtttaattaaatctcgcaatgccgcgtcatttcctcctccatctgctcaccgggatcacccaccgtgaacttaggaccaaccagcagttggagcagttcctttctggacaattttgcgtacgatgattgggaatgttccgccttatacgcggccatgcgctcaaagtattccaataggactgcctgcgcgaacatcgtcgggtcaatcttcttgtgacgcaacttgcgtaagaagccgccgtcacgatgattgagccatgcaggaaggatacggaggttacggacagcagcatcgaacttgttgccgtcaatgtgatctacatgccatccctcggggataccgccaatccacgcacgcgctactatcacatgaatagtgatcgtcgtgttaccgcgccatataagcgggtactgcgagtggcggttgggtctgcgcacgataggtgtgcagccgcacggatgttgttgggtccagttgccgttggcatctttctggaaaatctgtccggtttcaaacgttgcccatagttgggatgcagcatcgtacgcgacgagtgtgccatccggtaggctatccacagtcggaacaaactccggattcggatagctcagataattttttaccattgtcgttacgttttgatgattaaacatgttaactatcaaatccgtaacattcctttcttggttagcgagactgagaatgttgtgccggacgccccgttaaccaattatcccggcgaggatttttaagcggatttagacccgactatgatcgaaatccgctgcaaagatatagcaaatttaggatatgtaaaagaatctctaataggtcttacactttcacttacagacttttttcattcttacatttttgcttactaatgactaacataacacttgcatttacacatacattgcgtttacatatagacacaaaaaaaacctacagccatttctgactataggttttcataaactactatgtgccttacatgtacagaatatcgtaggcaattcgtgcgatacttagtccttcgtccaacgttgcttgttttcctcctgacttaacacgccaatatggataacggctatcgcgctgtaactgattatacttgcgcgtaaatgtaaccggattcggcatatccgttttcgccactcctgcgttattcaaatcgttcaaaaataattggtatgaacgatcttcgtatatcttacaatcggccattagtttatagacatagaaccattgacttcctcccttgaaaactttacctaaatctttttgcaaagtcttatatatctctttcagtttagaaacacgtactttggtatctctgtaatcgggtatttccttgttttcttcacttataacaggcacgttttctgtctctggtttttcgacagtttgttcttcttttaatttaatctgctccagatattcatcggtacgtgcaaaatccaaataattcataccctcgcattgtgccaatatctctgttctcttttcttctccccacatgaaatacaactcataatgttccttcagataccccataatataatcgctcagtttcttataaagcggcttcaaacgttcatctttgtatgcatgatcgcgttctgtaagcaataaaacactaatcacaaataatgtttgcatcaatggaatttctggtttaggcaaccaacgttgttcttcaaaaaccaaacgattacgtacagaatctacaaaccactccatatagagccaatcggatatttcgccgtccaataactcttgctttgtttcattgatatccaacaataaatgatagtgcttgattataccgacactaattaccgtatcagcagggaaaggacggtaaccatcctcgaacgatgtgtaatatggtaaatgcttggctatcaattgacaaccttttccccatagtgaaatatcttccatatcgttatactgatgccaatagccgtattctattaccctcgctcttggtattctcatgtcatcgtgctggtctgcatacattttcatgatttcattcacttctttgcagcatgcacgctcaaaagcacgcactgcgctttcatcagcttcttgaccgagtatttcttgcggatggtcacggaagtacaccattactcgcagactttccatcggattattaagccagcctataatctttttgagatgccgactcgttacgccgaatttatgccactctatttctccataggcatggttcccgacccgttctggtgccaaataatcttcgcatagaatctccagctctgtcgcttctgcatacttatcgaagttaacgctaagatagtgcttcaaatcgtcgtgtattttagcgtacgaaaaataatattctttcttctcttccatatattattatttatttacaacaatggtgtcatatataccggcacaagtaacgtctcaccatccttccgcaaatctttggtataaaccaagtaccgattccctacacgcgccgaatacttatcacagaatgcatccaacgatgcgtgagatttataacccgaagatttgacctcgatggggcatactttattgcctcgtgacaacataaagtctatctcatagttgtgtttttcgtcttgcggaaaagtatagtaaaataactcattcccggcagcagtcaacatttgagcaactaaattctcatacacatagccaagattagcctgcaacttgtcgctgagcaatttatcatagatcacattctctatgtagtctttatcccagaagcagagcgtgacaaaaagtcctgtatctgctacgaacatcttgtatcggctcgtgtctttgttgagcgacatgcctacatttgggtcggtacaatgataactaaagagcgttgttttactctgttccagatcttgtagcagttcattcatttttgattccgtctgtcgaccaataaccgaaaatggttggtagcgcgattcgttattacttaattgcgcaggaatgttcttgaataaacgctcggcattgccggttgaatctatcttttggaagtcatccaagtacaactgaatgatctcacgcttggttacatcgacgagactaagattattagtatcaagataggtattcacggcttgtggcatgccgcctacgagcatatatagacgcaactcgcgcatttgtttgcgtgtaacgccatccccaatggatataagcgagtcatattgctgttttagaagcgggaatgttgcagtgtcgcctagtgcccaacggaactcttcatagtccatcggtaacatttggattcggttttcctcgctggggatagtgatattctgggtgttctttttgatgctaattagagaacctgtctcaatataatcatagcgaccgtctttgacaagatacttgatggcttgtcttgctcttggacagttctgtacttcgtcaaagatgatagcagatttgcgtgtatggagtgttacttgatagtgctgctgcaattcgagaaagattctatctaagtccattaagttgttccataaatccaatatcgtttgatctgcttcattaaaatcaatgaggatgtacgattcatattcgttcttcgcgaactcttcaacgatagtagatttaccgacacggcgtgcaccttccactaagatggcagtgcgtccttgcttggcttgcttccaattaagcattttctgataaatcttgcgtttaaacactctttccatgattgcaatattcaaaaatcgctgcaaagttactaaaaaaaatcctaacccgcaaatttttttagcaaaatcttgcactatcccgcaattttatgcagtattatgcatttccattcattttttgccccgaaatctttactataaattgttgtgaaatgggtctattttacactatcccgcaaattttttaggcaaaatcttgcactgtcccgcaaatttcccggatgtcatccggtttcgtccgttgattaggaattttatcccgttttctacgtcatttttctacaattttatgcagaattatgcaaaatttatgcgaaaaccctcatttttatagaaacaatgcaaataaatttgcatatctcagaatttttttgtatctttgcacgctgaatgcgtgcagtagacatgtgaaagaattatggctaagaaaaacgacataacaaaagcagaggcagccgccatccaatcggtggagcaaatagaaagtcttatccttaccatccgtggcaagcaagtgatgcttgatcgcgacttggcgcggctttatggtgtagagactaaacgtctcaatgagcaagtaagacgcaatattgagcgtttcccggaggacttcatgtttcaactgactaaagaggaattcgaaaattggaagtcacaatttgcaacttccaatgctgaagaaaatatgtcgccgcaaaatgcgaccacatatccccaaaatatgtcgccgcaaattgcgaccacatctcctcagagacgtcctgcatctgctctcccttatgctttcaccgaaaatggcatagctatgttgagtggtgtcctccgctcaccgatggcgatagctaccaatatccatatcatgcgcgcgttcaatgccatgcgtcattttatcggttcgcaggcgcaggtgttccaacgcttggaggtgttagagcgcacacaattaagtttagttgctttcaaagaagaaacaaaccgtaattttgaagaggtcttccgtcgcttggatgacaattcggagaagccggaaaagggtatcttctatgacggtcagatttttgatgcttatacctttatcaacgaacgtatccgtgaggcaaagaaacgcattgtgctgattgacaattatgtggacgatagcgtgctgacgatgttggataagcgcaacaaaggtgtggatgcggtcgtttataccaagaatatctcgcgtcagttgtcgcttgattttgagaaacacaacgcgcagtactcgcccattgaggttaagcagtttgaccgtgctcatgaccgtttcttgtgtatcgatgacaccgtctatctcatcggcgcaagtctcaaagatcttggcaagaagtggttcggcttcgtcaaactggagcaacccaccgatgaattattaagcaaaatgtaagatattaaactcaatggataaagcaaagtgtgaaatatacaaaagggaaataatccgatacatgtgtgttggggtactcttttttatcgcaattgcttttgcgctttgggtaagtattccggcaattcatataccatgcaatttttcggaaactggatgtaaggccattaatagtgttatattaacactctctttaagttatatcgcaggttttatctttttctttttatccgagtttatccctaccgctaaaagaaaatacgaagaagaacatcgtgtagtagcggttcttaaccatctaacgaaggaatttaatggacttttcaattttagctctgataaagacaactatcaaagaatgccatttgcagaattaagtcaatcactatttcaagaagatgtttcaaaatatagccaaagcattgatttgactgataaggatggagaatgcgacgttgatgtacactttaaaccgcaggttttattatgtttggaactaaatgcaaatagaattagagaggacttaaatgttttgcaactactctctcattgcctgtcatttcccgtgatatgtactattggctctataaaaagtagtcgcatcctatccgtgattgattcaaaaagtgcctaccgtgcaagttttgataaaaatgatataagaatccggttcgcattgtacaaggatatgatgaaggattattatgagttagaagatatattgatgaaggtaacaaatgattataacaagagataccccgaatttcagatgtggcaagttctaagtagcaatccaaagagtaaaactagcaaatagtatatacacatctagcaaattcaagacataagaatcaaggcagaaaggagaaacactatggagaataacatttatggcgtcgtttatagcccccttgataaggagccattaccggaagtaggcaaaacccgcttggctgaatacaatgccatcaagaagaaggttgacgctaaagcggagcgattgaccagaaaagaactaaacatgccaaaagatgaatggtggtttggttcgtgccacacgttctggaagcacaagaagaaaatcttgcgtgaggaataccacatgatctggcgcagcccgcaagacctcaaccccgaaacttgttttgattaagggcaaaaagaaggctcaaccgaagtcgagccataggttttacaaccttcggccttaatggccttattgtgacaagctatttgaagagaaacttgtttcacgatgcaaaagtactgcttttttgcgagatatgcaaataaatcacgaaaaatcgttcatttttatacaaaattatacggaaacacatggaaattgacacgaaacaacgcattttaggacttgacacgggaaccaactcgctcggttgggcggttgttgatcgtttgccggaaggatataaattggttgataagggcgtgcatatttttcaagaaggtgtcactatagagaatggcaaccaagaaaaatcgcgtgctgccgaacgaaccaagcaacgcagtttgcgcaagcaatactggcgtagaaaagtgcgcaaaattttcttgttgcaagagttgagcaatgcaggtttgtgtccgcctctatctttggaagaactgcaccgttggcgtgtggagggcatctatccgctcagtaacgagccatttatgcgttggcagcgtacggatgagaacaaaggcgtgaacccatacgcggcgcggtgtcaatgtattgagcgcgagttagatatggagaacaagaacgatcgctacttgcttggtcgtgctttgtaccatattgcgcagcgtcgtggcttcctcagcaaccgcaagaaccaaacggacaataaggaaacaggcgtagtaaaggaaggcataaaggaactcacgcagaagattaacgatgccggttgcgagtatctttgtcagtatttctaccaactctaccaacgcggtgaacgaatccgcagttgttacaccgaccgcaaggagcactacgaaaaagagtttgcggctatctgtgagaagcagcatctcaatggggctttagttgaaaaactctataaaataatctttgttccgcgcccaccgaaaaagcagaataacgcaattgctaaatgtccgttcgagccttccaaacattgtgcgcctatctcccatccgttgtttgaggaattccgcatgtggagtttcattcgcaatatcaaggtgcagactccggatgatacaaacttacgtgcgctatccgcagacgagataagcaagattcagcggttgtggtatagatataagaagggacaaaccaactacaatttccattttgaagagattgcgaaagcgttagcgggtaaaggcaaatattgttattacaagtccgctgaagacaagcctttccgttttaattactatctagatagtaacgtagccggtagtcctgtttcggcacaactcaaagacattttcggagagagcattctccaagaccgcgaagccctcgacaagatttggaacgcattggacttctatacagatgatgtaaaactcagtgaatggggtatcaaacattataatctgacggatgagcaagcggataaacttgcacaaatgcgtctgccggagggctatgcttctttgtcgctcaaagcgatagagaatatcatgcctcttatgcgtggtcatggcttgatgtattcaagtgccacactcattgccaaactccgcgacttgctcaaaggatatgatttcgatgaagaagtggatgcgtacctaattaacgacattgaggattacttgacgattcctacagacaaaaacggcaaaccgttaatgagccgtgaggaacgcaagcagatcttggatcgcaagtggcaaacgcactataacctttccgataaagatttgaagaagttatatcatccgtctatgattgaggcatatcccaaagtggaggataagacggacggtgtttaccaattgaaatcaccgcgtatatctgcgctcaagaacccgatggcgatgcgttcgctcttccgtataaaagcggtggttaatcaactactcaaagagggtacgattgacgagaataccatcgtacatatagagttcgcacgtagcctgaatgatgctaatcgtcgagccgctttgctacgctatcaaaccattttgcgcgatgaacgggaaagtgcccgggaggaaataaagaaatacgttccgaatccgactgatgatgacattcttaaatatttgttgtggaaagatcaaggcggtgtaagcgtttacacaggcaagcccattccacctgatttactctttaagggagaccaatacaatttcgaacatactgtgccgcgtagtatgggcggagaatggacgcgcgaaaatttaactatctgcgagcaatattttaacacagatatcaagggcagtcaactgccgtctcaactgtcggagcaatataaacagatcttcgaagaacaaatccaggcatggaaagacaaatatgaggatttggataagcagatacgtaaattgcaaaaacaatcctctggagcgactaccaaggaagccaaagatggtataatcaagaaaatacgcttattgcagttacaaagcaagttctggcataataaatacgaggcgttcattattgaagatgacaaagtaaaaggcttcacactcagacaaggaacagatatttctgtgattaacaaatacggtcgctcatttttgcagaccttgtttgagcgcgtggacgtggtaaaaggaacaatgaccgcagcgttccgtgaggtatgggatattcaagaaccctacgaaaagaaagaccgtacaaaccatgtacaccactgcattgatgccattacgattgcgtgcatgggtaaacgcgagtacgataaactatcagaatattgtcacgaggaagaagaaaaccgtcatcgccttcatggcgtaaggcttcctaaaccgtggccgactttcacggaagatatacaggagatagaaagggaaattcttgtttctcactatactccaaatccgatgggtaagcagaccaagaagaaactccgtgatagccgtggacatataatctgtgataaaggtaaacaaccgttatacgccgcaggagataccgcgcgtgtcgttttacataatgacaagatctatggtaagatattgaatagccatgacatagaccctaaacatccttcaggaaaagaatgtactgtcaagcgcattccgcttgcggaagtgaaagtgaatgaagttgttgatcctgtagtaaaacaagtcatcgcaaatgcaatcgccaaatacggtagtataaaagcggctattgaagcggaacaagaaaatcaggatggctctatttggttgaacaaagagaagaacgttcgcctaaagaaagtacgctgcttccaagactttgccagcggagctgagcctattcgcgctttaagggatatgtcagccaaagagtacaagcgattccactattcacgaccggacggaaactatgtagcggctatatacgaaggaaccgacaataaaggcaatagaaaaagaaaatctgtcatagttactaatctcgatgctgcaaaagccttcaacaagcatcagccgttagtgcctgaaacaaaagaaggatatgcattgctgtgtaccatcaaaaagggtgatttgatattgctctatgagaactcgccggaagaactccgcaataccacacaagccgagttaagcaaacgcttgtataagattgccaaaatgtccgattccggaggtttacaaataactatcagacaccatcaagaggcaagagaaacaaccaagttacaaaagttatacgggaatccgaaaacaggcaagtatagtagttcacaagaggtttatccacagagactattattgcctaatcagttcaatgcccttatacaaggacaagattttgaactgacagaaacaggaaaaataatatttaaatagcgttctctgtctcagcttgccacaatttctccttctttatgtcctgtaacacattggatattaatggaatataaacaatcagttgtggcttgctgacgaagagaagaaatatacagctgtgttctgtttctcccgtttcagggtcgcgttgtggcttgctgacgaagagaagaaatatacagcgcgctaccgtgaggacgggcaccgcgacaagttgtggcttgctgacgaagagaagaaatatacagcaaaagactacaagaaactcgtcaagcagtagttgtggcttgctgacgaagagaagaaatatacagctgcaagcagtgagggtgtgcaccgcgacaagttgtggcttgctgacgaagagaagaaatatacagccaactaaccccttaaaacgttttaacaatggttgtggcttgctaacgaagagaagaagtatacaactggcgttccgtgttatctctcccctgtgctggttgtggcttgctaacgaagagaatcaactacacgcaaacacacagaacggctcacagagttgtggcttactattgaggagaaaagacatactacatgacaaatcaagaaaatgccataagcgctattactgacggcacaattagtgctgtaacactatggtttagtacgaaatatccggacttagctcctgcaatgaatgcgctcaattgcgctgccacggtatatggtgttgcaaaattgcgaagtttatttacggctatttctgattccgtagacaacatgaaacgagataaagtttctatggaatatctttcctctcctgagtttattcatgaggtgagccaattgctttacgagaaaagtctggaagatattgagcaaaaaagacttcggtatgcaaactactttgaatcgtgctgtcgttgttctgatatcgaaaaaattaaatcgcaaaagttctttaatttactaaaggaactagacatcttggaattagcggtattaaaagtattgcctaccaaaggttcatatcccaaacacatcacaagcatttataatgaatgtgtaccgaagtttaatggcttaacgaaagaagatgtttctatgcaattggaaactttgatgtcaaatggacttgttgcgcaaattagtagtcaagaaatagcaaatcgtaggcagataggaggaaatagacgccctttaagagatcaaccattatattgtaaaactatattggggaataagtttcttcagttcattgacaaagagtaataaacaagtaaaacatgggagaatttgtaaataattcagacaatatagtagaggaattattaaaaatagttcctatttcatatttcgtaaccgaagactttcagcagaaatgtaaagaaaatggatttagtggtagatggagtatgtgtaatacaatggtcacttttaaagggactaacatacttgttcctacgaaagaaaggataaatttggtattggagaaattctgccaagagttgatcgaaaatagtaatcgcaccctatataatttcatatctattgttatcaaaggttattgtaactacgaacaaacgacagtggatttaagcagcttgagaattttactgcgttctcttggagtgataaaaatcacagaactagagcaatatgactcaaatgctccctttacccaaaacattattatagagattaataagtgggatgagataaaagatatagttgcaaaacttgaaagcgattgtgtcaaagctactgaggcggatgattttagcaacgtaggtaatacttgccgtcatttattgatacaattagcccaattagtatatgatccaaaaattcatggagatatctcagataaaggaacaaaaatagggaaagctcacgttctggaaatgttatcaaaatttattgcgtttaaactctcggggagcagcaatgaagaatttagggcttatgcgaactctactataaatatcgcaaacgccctcacccacaagacccatgcgacaaaaaaataaatgttattaactgcttctgctgtaataaatcttgtgtatgtcattgggattgttggagacaagtttaatgatgaaacatttgcttaattaaacattaaagtgaagaataatatctaataggcaacaatatgagactttccaaaattaggtttgaactttttatcaataactctttcgatagtattggccacggcgtttcttcttcacatttcgccgattgtcaatcggcatagttttgtccattgcgttggaatagtattccaacattccaccttcgttcatttcctgaaattgtattctgggtaaataaagcattgttcattgagttggatgtcatccaacaaagtgtcatgtgctcggcacttccaatgctgagaaatttcaataaggtcgtcgtttcactcaggtcttgattcttttttgcttttcccccataaatttttgacatgtgcaaataaaaacaaaaaatcgctcagagggagcgatttttgcttttagatatcacgcgtatgagcgcgggtgttcgttagttattgttagctacggtatagctccgattactttttgttcgggagttcgaggccgtagttcttgcgtttgtcttcgatcttgagtgcgaggcttaagaggaatgcaaggacgccgaaggacgcaaagacaatcatcggtacaaggtagccgttggtagccacacgcagtttaccgatgagcagcggcacaaggcacagaccgatgttttgcacccagaaaatgaggcaataagccgagccaagcactttctcgtcgatgatcttcggcacagacggccacatggatgccggcacgagtgagaagctgacaccaagcacgaggatcgtgatcagggcaagggtcttgctcgggtatgcaggcagcacgaaagcgaagacgctatggcacgcaatcataatgatagcgccaaggagcatcatcgacgcacctttacctttgtaatcgatgaacgcacctaggaaaggcgtcagaaccatagcgagtatcgggaaccatttgaagagtcctgctgcctcggcattggagatagaaagggtctcttcgaggaagttcgtagcgaaacgctggaaggggaagatagcggagtagtagagcacgcaaaggagcgctacgatccagaacatcttcgacttgaagatctgtccgaggtcggagatatggaactcatcctccggatctttctcggcagtcgtttctccgatagccacgagttggttgtcaaagcgtacatccatgatggtgaacacaaagaaattgagcagaccgaccacgaggagcagcgaagcgaagaggagcggagcagtcacggagttgacaccgttgactgcaaactgctcgctgaaaagcggtgcaagccacatagcagcgaagacaccgagacgagcaatcgccatctccagacccattgcgagcgccatctctttgcctttgaaccacttagcaaggatcttgctaacggtagtacccgccatctcgcatccacagccgaagatcataaaaccgaacatcgccagtttggcgctaccgggcatggaaggccaccaagagttaagccactccaccgtgttggcttcgggccacgagatgccccagtatttgatagctgctccgataaccatgaggctggcagagagcagaccggtgaaacggactcccatcttatcgaggatgatacctgcgaggatgaggaaaccgaagacgttgagcaggtactcgcctgctgcatatgtaccgaaatcaccgcgatcccagttgaggttttgctccaagagcgaagcgaggggcgagaggatgtccacgaacatataggcgaagaacatcatcgatgccaccagcactaataccgcccagcgtgctaccgcgttatcgcgaagtgtttgttgaattgcttttaccataaagtcatttacaatttggtcatttaccatttaatcatttattcggtcattgggcgatttggtcaattgacgatacgaccatttctttttctttttgagccactctgcctttttcttctcgtattcggcatagtgggactccagataaccgtcagccatgattatttaccatttggtcatttaccatttctttattcactttgttcatacgatctgcttcgccgtatgggtcattttatgccgagttctttcttgacagagggcgtaacatcgacagcatcggtgctaatgaacgccatggcagcggagtcgaagatataggtgtagccctcacgctcaccgactgctttgatcgctttgatcatgcgctcgtgaataggagccaacaagtcctgttgtttcttctggatgtcctgctcagcggtctgatagaagagttggatacgctgctgcatctcttgaagctcctgctgacgaatctgcttgatagcgtccgccatggtagcctcttgcgcttggtagtcttggtacttcttctggatctcctcgttcatggaagccaactgcgactcatactgtgcgttgatggtatccattttgagttttacttgtgccatctccggcatctgagcgaagaactcctgctggttgatgtaaccgaatttttgtgcgctggcgagcatcggcaaaaccagcatcattgcaataataatctttttcattgttgtatagtttttttatcgttatttcgtgattacgtgattttaatgttccacgagtccgtgtttagtccgtattgcctccgtgttaagtccgttatgcttccgaggcttttttgtggaacaatgggtctttattatttagcgccgagtttgcggagcacttggtcagagacgtccagtttggaggacatatagatgagtgcgggatcggcagagcggtctttgacgaggacaatacgtctctcgttggcgacctcttggatagcgttatatacctcatcctgaatgggtttgatgagcgcctcgcgtttcttatagagctcgccctcttgaccgaagtatttgcgtttgagttccagtacttcctgctctttcttgacgatctcctgctcgcgttgcgtacgcatgttttcagaaaggaagatctgttccgtctgatagttggtcgccatgacacgtgcttcctgctgcgcggcgtcgatctctttctgccagcgtttggagagcatcgtgagctgctcgtttgcctgctcgtactgcggcaggttcttgaggatgtactgcatatcgatatatgctatcggctgctcttttgctgcaaaagtcgtgccacaaagcagcagggctgcaatgaataatgaataatgaatactgaatatctttttcatatctggtcttttatcttttagcagcctatggctgcggtctttattctttacgcgaagcgggctttatagttcttgtccgaggacgaagtggaactgactaccgctatactgtttggagccgttgatctcgtcgaaaccccaaccccagtccacaccgaggagtccgaacatcgggaggaagatacgcacaccgacaccggctgaacgcttgaggttgaaggggttgtagtctcgtaagtccgcgaaacagttaccggcttcgatgtaaccgagtgcccagatggtagcgttctgctcaagcgtaatggggtaacggagctctaccgtaaatttgttatagacataaccgaggttacgtccgctggtgaggtcgtacggtgtaagcgaaccggcagagtaaccacgcatagcgatatactcggtcgatagaccggacgaataacccgccataccgtcaccacccatataataggtctcgaacggcgatttggcgtatttattgaaatagccgaggtaaccgaactccgcacgggtcatgagtaccagtttgctatccggcgtgaggggcgtgaagatcttgcccatgaatttccatttgtggtactcgatgaggtggtaacgctcgttgtcgggcagggtggagtagtctttcttgctgaagagcgaccaaggcggtgtgatcttcagacccagcacgaactgcgaaccacgacgggtgtagatggggttgtcgatagacgaacgactcaactggaggttcacagagaggttatgcgccgttccgttagtgattagcaagtaaggccagtctttcatccagaagagggtgtaacccaactcgacgtagaggttgaagtagtcatccggccatttgagacgcttaccataaccgatagcgagaccgaactgacggatgaacttatccttgtcggcttcggcttccgccagctgctggtagtagttggagttgccggagtagtaatagtagttcgagtatgtgttatagaggttttggtacgctttctggtaacggctggaccaaccggtctggttgtagaagaagaagctggcactcaactgattaggacgcttaccaccgagccacggctccaagaaagagagcgagaccgaagtggagtagataccgttggtacgcaggttgatagcaaaagtctgaccttcgccctgcggtactatatgccggtacgccttcttgttgaagaggttttggatagcgaagttggtgaatttcagaccgatagtaccggtgataccggtagcaccccaaccgagtgagaactcgatctggtcactggatttggtctccaagttataggtgatgtccaccgttccgtcttcgggattcggctggatgtccggcacaagtttctcttggtcgaagtgacccatctgcgccaactcacggagcgaacgcatgatatccgactgcgagtagagctgtccgggtttggtgtataactcacggcgtaccacatgctcatagacacgggtgttaccgacgatcttgatatcgttgatagtagccggtttaccctcgtacatgcgcatctcgaagtcgatggagtcgttctccacgttcacctctacgggctctacgttgaagaagaggtaaccacggtcggtatagagtttgctgacagcgtcatcatcggtctgcagacgctcgttgagggtcttgaggttatagacgtcaccgggtttgatacccaaggtagcgtccagatactcatagggatagatggtgttaccgacccatttgaccgagcggacgtagtacttatctccttcgctgatggtcatatagacatctacgcgatcggggttctcggggtttggaacgacgctgtccgcaacgatataggcgtcacgataaccgtattcgttgtatttctcgataaccgcctgtttgtctttctcgtactcggcggtaacgaatttcttggagcggaagaggttgacgatatcgttatcgttcgttttcttcatcgctttgttgatctgacgatgggtcagcgcgtggttgccggtgatgtatatcttaccgactttcgttttggctttcttgtccacagccacaaggacgcgcacgtagcccggatggtcggcgtcggctttctggatgacgtgtacctcggcgttgtggaagcctttgtcggcaaagtatttcttgatcaccgtcttggcatgatcctctacgttcggggtcatctgactgccctgacggataccggctttgatttctatatcctccctttcactctttttgagtccttcataacgcacctcgctgatacgcggacgttgtgccagctcgatgacgagccagatcttattgccctcgatcttcttggctttgatcttgacattggagaacagaccctgtttccagaaacgtttgatggctttggtgatctgtgcgccgggcacctctatcttatctcccacagcgagaccggagaagccgatgagcacaaagtcttcgtaactatctgcgccctctacttcgatccctgctatctcgtaagttttgctggagagtccgtactctatctcctgcgcatgtgtcgggaggggacgcacgagcagggcgcatagagcgaggactactatgtataaaattctcttcacggttatttgtttacttgttcggatgttttgccgaaacgtctctcacgtttctgatagtcaatgatggctttataaaactcttcttcggtgaattccggccagaggcagtcggtgaaatagagctcgctataagcgagttgccaaagaaggaaattgctgatacggtattcgccgcttgtacggatgagcaagtccggatccggcatgtcacgggtcgtcatgagggaagagacgaactgctcgttcacatcttccggacgaagcgatccgttgtgcgccagacgaacggcttcctgcattgcacgggtgatttcccaccgagcggagtagctgagggcgatgaccatggtcagacctgtgttacggcttgtctgctcgatgcagccgaggaacttcgccttggtcttctccggcagacggtcgatgtcaccgatggtttgcagacgtacattgttattcatgagcgtcggcgtctccttgacgatggtgtccacgagaagggtcatgagtgcatccacttcctctttgggacggttccagttctcggtggagaacgtgtacagcgtcaggtactccacaccgagcgccgtagcagcgactgtgatgttatgtaccgtctcgacaccttgcttgtgaccgaacatgcgtgcgagcccttgtttcttcgcccaacgaccattaccgtccatgatgatggcaatgtgtcgcggtaagcgctctttgtctatttgcgttttataatccattgtgtttaattttcacttttaacctctaacctctaacctctaacctttctgtcaccagttacagatgcggcattctttcttcgctcttgcgaattcaaaaactatgccagcggtgagcataccggtaaggtcgcagttcatccagttccatccgttgagctgatgtttgttgtcgagagctgctcttccctcgatattatccgccatgtagatattatgctgccaagcgatgttgagaccgacgaactcatggaatttccacttgaagccgatgcccagcggcacataagcggtagcgtggatcttctgatccttggcaaacccatatgtgccgacaccgagaccgatgaagatatacggggtgtagcaacggatacgtttgtcgtatttgttggtactaccgaaacggaagaaattgaactccgccatgacatcggcattgatcattcggttctcccatttggtgtccagcttctcgccgcggatagtatagtcgttggcggtgatccgttgtccggacactttcgcttggatagcccagcgcttggtgaacttatagcggaaatgaatgccgtaagcctcacgcggacgcaggaaaatatgatttgcggcatcgccgacatagtatccgcaacccgcctgaataccgagctcgcacaggaacggttgttgcgttcccacgctctgcgcataggcactcatactcgcacacgcgagcataataaaaaggcatatatttagacactttttgggcatgttcacaaaataagcgtgcaaaggtacacattttttctcacatatgcaagaaaaaaagtacttttttgctactttttagccttttatgagcagtctgaaggcgtctgtgaccttttttacgggtacaatctcgatagagtagtgtttggaatcgaccttttggtcggcgggaataagaatgcgtcggaagcctaatttctgggcttcggagatgcgctgttcgatgcggttaacgggacgaatctcgccagcaagaccgacctcaccgcagaggcatgtaccggcatcgagggcgatgtccatgttactgctgagaacggcagcgaggacggctaagtcgatagcggggtcttgcactttgagtcctccggcgatattgaggaagacatctttttggagcagtttgaagcccacacgtttctccaagacagcgaggagcatgttgagccgtctgccgtcaaagccggtagaggagcgttggggcgtgccataagcagcggaagagacgagcgcttgcacttc

SEQ ID NO: 701 - DNA, 14549 bp, synthetic construct
  source 1..14549: mol_type = other DNA
  misc_feature 1..14549: note = Synthetic
cagaccagcagaccggtaaagatttaagggggcttggtcagattattattgccaagcaccgtagcggtgctaacggctcaatctggctacgtttccgtagtaagtttgccaaattccaaaatgagaatgaggaatgggatgttaatgagctgcaatcaaaccaatatgaggaggaagtgccaccagacgctatggagtctcatccagttgtccattcggggatgaacaacatgaatagtttcgaagataatagtgaacccgccttttagtacttttagtaaataatagaacaagataatgaaaagaacagtaattattgatgctttggcatcgaaagagtatgacactcctattcgcgtctcaggctgggttaggtccagacgcggcaacaaacaggtcaattttatagcccttaacgacggctcgaccatcaaaaatatccagatagtagtggatctcagcaagttcaccgaagaggcgcttaaacccgtcacaaccggttcttgtattaatgtagaaggtattttggtaaagagtcaaggagccggacaagatgtggagattcagatgactgactttcaggtttatggttcagccgatcctgatcaatatccgttgcaaaagaaaggtctgagcatggaataccttagaacaattgcgcacttgcgcccgcgcacgaacacatttggtgcagtgttgcgtatcaggcacaatatggcaatggctattcatacctattttcatgagcatggatatttctatttccatactccgctaatcaccgccagcgatgcagaaggtgccggtcaaatgttccaggtaacgacattggatttagaccgtctcgcaaaaggtcaaccggctgaagtgccgtatgatagagatttcttcggcaaacctgccaatctgactgttagcggacagttagagggcgaactcggtgcgatggcattaggcaagatttatactttcggtcccactttccgtgcagagaacagcaatactcccagacatttggcggagttctggatgattgaaccggagattgcctttatggataaagaggagttgatggacttagaggaagacttcatcaagtactgtgttcgttgggcattagagcattgccaagacgacttacagttccttaaccaatttgtggataaggggctcattgagcgtctccaaagtgtagctcatacggaatttgtccgcctaccctacacagaaggtattgatattctgcagaatgccatcaagaacggtcataagtttgagttcccctgcaattggggtgatgacctcagcagcgagcatgaacgctacttggtagagcaacatttcaagaaacctgttatcatgaccgattatccgctggatatcaaagcgttctatatgaagcagaatcagccggacgaggcaggtcgcagaacggttcaaggaacagatgtgctcttcccgcagataggtgaaatcatcggtggctctgtccgcgaagagagctatgataagttattgatagagatggatcgtcgcaagatggatcccgctaagtataaatggtatcttgacacccgtcgtttcggtgcggctcctcatgccggctttggattaggatttgagaggcttatgctctttgtcaccggtatgcaaaatatccgtgatgtcatccccttcccgaggacaccgaaaagtgctgaattttaatagatacaaaataaataattactaactaaaaaaactaacatcatgaaaagagtgttactaccgttgttagtgctgataggttccctatcccttgaagcgcaaacaacgctgacaggaacaatccttgacgatgccggcaatccgttagttggcgctacggtgagtttggccaatcagggtttttcgaccacaacgaatgaatccggtgcatttacgttcctctatctcgaggcaggtgatgaggaagtgctgatagatgcagacgggtttgtgtcgggtatcgaattggttcagttgcaaagcaacgagacgcatcaaatggatgcagtgcgcatgcagcgcgacattgccaaagaagctcaagatgaggttatccttaatctgtcagaagccgatttgaacgatgacgaaggtaaatcccaagcgcaagcaagcaccagcagtgcttccacggatgtgttcaacaacactaccagtttcgcatggtccacagcccgttaccgcaaaagaggctatgagcagccttttgagacgtactacatcaatggacttaacttcaataccgccgaaagaggaaacttcaatttcggagctatgggtggtctgaacgatgccagtcgctaccgcgaagtagtcaacccctatgaagccaataacttcggtttcggagatatcagtacggcgacgaactacctgatgtacgcttccaattatgcgcaaggatggaaagtaagtgccgccggtacgaaccgcaactacaaggctgccgtacgtgcgacttatgcctcaggtcctatcaagaacggttggtcgtttgttgggcaagtagccttccggttcagcccttatattgacaataaaggcataatcggcgaaggtattcagtactatagtttaggttatttcctcgcagccgagaagaagtgggacaatggtaatcgtttcgctatcacgacttttggagctcccacccttcggggacaaagcggcgcggtaacccaagaggtatatgacctgaccggtaccatcaattataacccttattggggctaccaaaacggacaagtacgcaacagccgcaatgtcaagacctttgacccgacggcaatcctcaattatgacctcaagattgatgaagacaatatcatcaaatttgcgctcggttaccactataatttctatagcaacagcgccttgacgttctttaatgctccagatcctcgtccggactactaccgtaatctgccaagtttcttatgggacggacaactatctaacccttacacgcaggataagtccatgtacaaggagaaagatggcaatggcaatacctttaaccatcagttgtatgacatgcaccatcctacatccgaaggtagtacctctttctataaccacttcccatacggtaacttcattggtgccagtttgaataacgtttaccttggcgaaggatttaccggtgctgacggttacgtcatcggtccttctgttgaccaagcctcctataatgacctcgttcatcgctggcagactcgcgaccccaactcaactcaaatcaattgggataacctctatgctgccaactatgccaataatatcaccgaccctaccggttcagctaaatatatgattgagcgtaggcacaatgatcttcaagaagccgcagccaatatcctctaccaaaatacccaattcaagaacctcaagatgacattgggtctggaaggtaagtacagcaacggcattcactacaagagcgcagaagacctgctcggtggtaatcagtggattgatgttgatccctttgcagaccgtgatatcaaggacttaggtaccaatgtgggattgtcccaaacggagattgctctggtgcgtgaaaacgatattatgaacggcaacaaagctattcgcaccaacgataagttcggttatgactaccgcatgcacatgggaacagctaaattatggttccagaacgaatggacatggacagagtgggatctctattatgcagtacaagcgaccttcagttccatgcagcgcacaacaaatatgctcaatggtcgtgcatggtacttggcagaatttgtgaaccccgatgaagccggaaagtatgtcggctacaaacatgccaatgcacaaggtgttattctacctacaaatccatctaattacaccttagtcggtaatgcgcactacttcgtagatcccgctgctaaaatcggtgcaacctataaaatcaatggtcgtaaccatatcaagcttaacgccatggcaatgactaaggcaccgcttgcgcgcgatgcttatataagccagcgcgtacacgaccgcgttgctgataatatctatgtacacgataacgcccgcaacctggcagacttctatgctgccagccaaaaggttgttggtggcgacctgacctatgagttcaattatcccattgttagaggtcgtatcacagcttactatacgcagttctggaacggtacggagctgaacggctactacgatgatgaggctcggacctttgtaaatcaagccattacaggcatcaacaaacgccatatgggtattgaagcggctgccgccattaagttaggcaattacttcaccttaacaccggttgtagccgtaggtgactatcgttatgtatccaacgcctactctattacctctgctgaaaatggtatggctctcggcgaaaacaaactcaccggtgagaacatctatgaggttcgcgactccgtgctgatgagaggtctccgagtcagcaatggtccgcaagtcaatacttcattgaaactcagtttcttccatcccaagatgtggttcgctgatattactgtcagctattacgactggaattttctcgattttgcgccctcacgtcgcatgaaaggtctcttcaccggtacccgtgctgatggttcaaccgtcaatggctggtacggcgaaaacacctacaccaacgctattcaaacgaccgatggagctcccgctattcaatcggataacggaggttatcccaccaacgcggtcatggatgccaatggtgttcccgtgctaaaatatccgttcaatctgatgagtgaccaagaaagtttggtagccggcaatgtatggaacagattcattatcgacctcagtgtaggtaaactcatttacctcaagaacagacaatcattgagtatcaacctctctgtcaccaatgtgaccaataacacacagttcaagaccggcggataccaacaggcacgtctcccgcgcgcgacgctgcaaggaacaatctttaataccaaaaaaggtacacaacagtctgtcatcactgctaatccatggaagttcccctctaagtattactatgcttggggtgctaacttctacttgacaatcacctataagttctaaggaggctaaattatgaagacaactaaattatatgcagccttcgctgcaatggtaactctcgtgctggtatcctgcacccccaatcccgtagcggaggaggatttgtttaacaaaacgacagcggattatatccaagagggtgatacgctttggcacctcaatgactttgtggcgcgttttatgaccgagtatggtgatgctgaataccgaggcaaatatcgtacccgtaccgagattactgccaatggcaaactcatgtatctcttctctatcgacaaactgccggtagatggtcccggacattggattcaaggacgcgttattaccgatgactatggtggaaacttctataaatcgcttattattcaagagattgttaatggcgagcaacagaccttacgtctctcagtggatgtcggttctgcttcaggtctctaccaattaggacagatggtacttattcgcgtcaatggtttggccataggtcgttatgcgaaccaaccccaactttgtgtgccaagttacaacgataatgtctatgcgcaacacgcagaccagaaagtcggttgggcacccggacgtatctctgctccaagattcaaggaagtatgccaccttatcggacgccctgatccttcacaaatcaaatacgacaccatcaacgatgcccaatttgagcaaattatccatcatgactgggccgctaagaccttgaagtccggaaaagtggacggatatgattatacggctgttcatcaagaagatgcactgctcttaggtcgcgctttagacggacgcctcgtacgcatggtcaatatgcattgcacccaagagtacgataactatggcttacccgttatatgcaacaggtatagcgtagctgctgccgacaccactactgccggtaatccgcaacgcgataaatatgcatgctgcttcggtccgactaccgaaggtgtcggtttcccgcaaggacgctattttgcaacggcagcagaccccggaccttctgtaggcaatgacggtattgatacacgccgtatcatcaccgtatccacctccgagtatgccaaatatgcttactactacctgcccgaaagcgattatgtaggtactgttaccggtattttgagcatgtattgcgataacggcggttatgcctgctcaccatccgactgggccattactccacgaaacgtcatggtgccctccaataactgtcttattgatgatatctgcttatataagaatggtgtggagacgattgataataaatggattcccgttgaatggtcagctgaagaggatcaagacgaataacaataatgacttggcttgatgctatagtattactgccgctactgattggattggtgttaggcttaacccgtggcgttgtcacggaggttttcaccattctatcagttgtaggcggtgttatcggtgctcgaatatgggcagcacccttctctcaatggctgcaacagcaagttagttgggcgccctccatctgcgatgttatcggctatgccctactcttcttagcaatcgcaatagccctctcaatcgtagggcgcttgctctctaaactactgaaagcaattcgtttgggcatcgtcaatcgccttttaggcggcctcttcggggcttgcaaatggggactgattgtactgctactggtattttgcttcaataaattggattcgcagttcggtatcctcaaagcggacataaaaaagaactccgttgtttacaacgaagctatcacactttcgcagcaatgcctaactgctattcaagttcagataacggaatagtcacaaactcccgctgccgatacagcggatgaggaatagttaaggtgggagatgtcatttggatgtctcccattttgatgatatctatatcaattggtcggtcttcataacgtttcccctcttgcaagcttccgcggctatcgtcaccggtcagtattgcagccgtcggaggtacaacctctgcgtaagcgatgcgccgacgccccaactcacgctctatctcttgcgtgatagttaacacctcgtaagggtctaacgcagtctcaaacgaggcacagatattgcagaactcatgttcagagacatatccccaggacggactatagtagaaagaggaccgctttagcagccctcctatgcgctctgacaatagttctaccgccttattgatagttgcttccctatcgcctaaattgcttcctaaggatagatatagagtcatcaaatcggtctggtcttatgaggaatagacaagcgtgtttcgttataacattcacggcatagattaagccgttctcgtgtgcaagttatcttcatgccgaaatagacatctctgccacaacaaggacagtggaacggctccgactccttgtagggcaatttctctacgcacttcgccaatttctccatcacggttgccttgttcgcctcacgctgtttcttcgatacgtcggtatccggcacttctttcgcgcgcaactcagccgcttctgcagctacagctttaacaacgttcttcgtcgtctgaacttgcttcgcctccgttacaaggaaagctttaggcatccgccccatcaactccttatcacgagtccaatcggaaaaatgcactttctcgtagtgcttctgcactgcaatacctgataacggaagtttaacaccacatttgcggcaataataaatcgggttctctgccatggttcataaatttactcgtgcacaaaagtacaaaaaaaaattgaattgcgcaaaaaaaagtgtatttttttaacaaaatgcactattatttgcatatatcgacaattattactacttttgtagcataaaatgaagaattaagtatgaaaagaacaatgttgttgtcaagtctggctgcactgcttgttttggcaggcagttgtcgaaaagcggaagagccgcaagtaaataaaggtaggttggaagtctataaggattttccgtcgaaatatattccttcgcgaaccgtccgtgtgtggttgcctgaaggatatacttcggataagcaatatgatgtgctctatatgcacgacgggcagatgctctttgactctcgcacatcctggaacagacaggaatggggcattgacgaagcgatggatagcttgcaggcgagcggaaagattcgcccgacgatagtgattgcgattgacaatacgctgaatcgtatcggtgagttttgtcctgatgatatagtagaatacctgccggagggaagtgaggtatatccgtttcttactgcacaaggaaatgactatctgcgatttatcgtggaagagctgaagccgtttatcgatagcacctatgctacttatccagaacgggaacatacgtggttgatgggtagcagttgtggcggattgatttcgtcttacgcgctatgcaagtaccccgaagtttttgccggcgcagcctgtctgtcaacacattgtactttagcctttccccgccccgataaaccagattccgccgtgatggcagcttaccgccgctatctgactgaacacttagcggttaatagtgctaagctctacatggataatggggataagaccttggatgcctattatggcgaagcgcaggccgccatcaatgcgtccttgcgtgctgccggctgggatagtgcacattttgcctatcagtattttccgggcgcagcacactgcgaggatgactggcaagcccgcttgccgattccgctttcgtttctgctggaataactacacttcatatatacttatatttcttgcatatctaaacgaaatacacaaagaatatctcgcgtcagtcgtcgtcagattttcaacgacctcaatttcatggagagcgaagctggcttccgtgcgcgacatgatgcgcgaccatgtcaagacgctaaataaattttataggtaatcgtgcctatttaggctaagaagacctattacaaagtataaataattgcataattatttgcatatatcgaaattttatactatctttgcagcaaatttagtgcaataacgcactatggataataaaatacaactgcaataatacactaaataatccgtttcttactgcacaaggaaatgactatctgcgatttatcgtggaagagctgaagccgtttatcgatagcacctatgccacttacccagaacgggaacatacgtggttgatgggtagcagttgtggcggattgatttcgtcttacgctctatgcaagtaccccgaagtttttgccggtgcagcctgtctatcaacgcattgtacgttagcctttcctcgccccgataaaccagattccgccgtgatggcagcttaccgccgctatctgactgaacacttagcggttaatagtgctaagctctacatggataatggggataagaccttggatgcctattatggcgaagcgcaggccgccatcaatgcgtccttgcgtgctgcaggctgggatagtgcgcattttgcctatcagtattttccgggcgcagcacactgcgaggatgactggcaagcgcgcttgccgattccgctttcgtttctgctggaataactacacttcatatatatatttcttgcatatctaaacgaaaaaatctttgatttttcttgcatatgtcaaaaattattactaattttgcagggtgaaatgtaacctattttaatgtcacaaaaaaagccccgccgaagcagggctataggcttaaagccttcggccatgatggccttattgtgacaagctgtagaagaaaaacttgtttcacgatgcaaaattacaataataaaatgagataaccaaaaaaaaatatatttttctttcattttttagaatactcatggaaaacagtggaaaaaaacggattcttggtcttgacgcaggaaccaatagtttaggatgggctgtcgttgaacgtggagatgatggctatcaactaatagataagggcgtacagatttttcaggaaggtgtcaatatagaaaaaggtaccatagagaaatctcgtgcagcagaacgcacagagcatcgcagtttacgaaaaacatattggcgtcgtaaggtgcgtaagatacgcgtacttgcagtattgagtaaggccggtttatgcccaccattgacttcagaggaattacataaatggcgcgtggaaggaagatatccattagagaatgaagcctttattcaatggcaacgaactgacgagaatagggatatcaatccatatgcctcacgcgttaaatgtataaaacaacgattggatatggataaggcaacggatagatatatactcggtcgcgctttatatcatattgctcaacggcgcggttttttaagtaatcgcaaggatcaggcagacaaaacaaccggagctgtaaagactggtatcaaggagctctccacaaagatacaggactccggttgcgaatatctatgccaatatttttaccaactctaccaaaaaggtgagcggataaggggttgctatactgaccgcacagagcattatgagaaagagtttgaagctatttgtactaagcaacagttagacgaggcattaaaaatagaactccataaagttatttttgagcagagaccgttgaagagtcagcgatgcggggttgccagatgtccttttgagccctcaaaacactgtgctcctattagccacccgctctttgaagcatttaggatgtggagttttatccgcaacatcaaggtgatggggccgtatgataatgcactccgaccgttaagtggagccgagattgagaagatcctctcattatggcaacgtaaatcaaaggataattttcactttgaagatatagcgaaaacaattgcaggcaaagggcaatactgctattataaatcttcagaagataaaccctatcgtttcaattatcacttagatagcaacgtgtccggttgccccgtatctacaaggttgcgtgagatatttagtgatgacattctatccgacagggcgcagattgatatgatttggcacgccttggataattttgatgatgaccacaaattacgggagtgggttattagacattacaatgtaagtgaagaacaagcagatgcttttgttaaaattcaccttccccaaggctttgcctcattgtcattaaaagcgatagaaaacatccttccacctatgcgggatcatggaatgctttataccgaagcaaccttaatagccaaactaagagagttgcttaaagggtataatttcgatgacgaaatagaggcatatttaaaggatgatattagggattatctaaagattcctaccgataaaaatgacaaaccgaccatttcgcgtgatgagcgaaagcaggctttactgataaaatggcgtgagcgctaccatttagagcctaaagatttggataaactctatcacccgtcaatgatagaagagtatcctaaggtagaatcaaagataaatggtgtttttcaattgggttcccctcgaatttcagcgctcaagaaccctatggcaatgcggtcactattccgattaagagctgttgtgaatcaactgttgaaagacggaacaatagacgaaaataccattgtgcatattgagtttgcccgagaactcaatgatgccaatcatcgtgatgcgttacggagataccaaaacgatttgaaaaaggagagagaagaggccaagaagcaaataatttcttatgtgccgaatccgaatgatgatgatattctcaaataccttttatgggaggatcaagaccacaaatgtatctatactaacaagactatttctcttgaggcgctttacaacggaacagactttgatatagaacatactattccgcgcagcatgggcggtgataccacaagagagaacttaacgatttgtgatagcacttttaatcgcgaagtcaagaagaccaatttacccattaacctctctaactacaaaataatagagcaaaacattgctccatggaaagaaaaatacgagaatcttgataagcaaatacgcaaaatcaatacatccggtgtgagtgataaaggaacaaaggatagtatgattagtaagaggcattatctggagcttcaacgtgatttttggaaaaacaaatacaatgcctttactatagaagaaaaagatgttcaaggttttacgcgcaggcagggcactgatatatccgtcattaatcgctacggacgattattcttgcgatctttattcaatcgtgtagatgttgttaaagggtcaatgactgctgcttttcgcaagttatggggactacaaagtgcctatgagcagaagaaccgagaaaatcatgttcaccattgcattgatgctattacgatagcatgtatgggcaaagcagaatatgataatttatctgcctattaccgtgaagatgaagaaaacagatatcacaacagtggtaagatatttcccaagccttgggcaacatttacagaagatgtgcgtcatattgaggatgaattattggtcgcacaccatacgaataatcccatgggtaaacaaacacgcaaacgcattcgcacagcaaaggggaagattattcctaatcagtttgcccaaggtgatacggcaagaggggcactgcataaagacacgcaatatggtgctataaaaattgaggaccaaattaagtatgtcgttcgcaaacccttggatgctaatttcacggatgtgaaaaatattgtagatcaagaggtaaaagccaaagttgaggcggctattgccgaatacggaagcctcggaaaagcgttagagtccggtcctatttggatgaataaagaaaaaggtattgccattaaaagagtgagagtttttactccttcagttacaagacccaaccatatccgtcaacaacgtgatttatctaagtacgagtataaacgccaatatcatgtgatgagtgatagtaactatgcattagccatatacgaaggagttgtcggtaataataccaaacgagcaattaagttgctgagtaatttagacgctgctataatatataataataacaataatcacccacttatccccgaatatgacgaacataattatcatctactactgaccctttattccggaagtttagtccttctttatgaaaaaagtccggaagaattatattcagcacacaatgatatactcaaacgaagattgtataaagtaacaggacttaatagtactttaatcggtaatgttaattatggaagaattgagttaacgtatcatcaagaagcacgtccaagtaccgaagtaaaatctaaaaatggagcttttgaggccaatgaagaattacgtccgaaaattacaatgcttcacacccaaataaaagcccttgttgaaggaaaagactttattatgtcagaaacaggcaaaatagaatttaggcatgcttaagcaaacaatatttttctctaaaccgtgcaagctctcactacgactaaagcatgttccggataaagggaatgtaagtatgttaggtgttactgataaacaatttggagatatggagcatttttgtagtgcccaaaagcaacaaatgcacattccgactcagttagaaatgttttagtgttctttgaaaaaatagaagtaaaagccatttttctctcagtttgcccattttttactgcaaaaatattctataatttccttattattagtatattttgcaaggcgggttgtggcttgctgtagaagaaaagagagatacaatcctgtgcctgaccacgacatcgagactatcgttgtggcttgctgtagaagaaaagagagatacaataatctgcaagaacacgactttcggcggcttgttgtggcttgctgtagaagaaaagagagatacaattggtgttgatgttactgattcgttctcttagttgtggcttgctgtagaagaaaagagagatacaataccccgacgacctcgaactgagtgcgatggttgtggcttgctgtagaagaaaagagagatacaatgacgagacgctgttcaccgaccgcgacatagttgtggcttgctgtagaagaaaagagagatacaattttcatacaatatgggtgttttatgtctgcgttgtggcttgctgtagaagaaaagagagatacaatgagttccgcttcaatgtggacgccgtatcgttgtggcttgctgtagaagaaaagagagatacaatccggagaagaacgcccgtgagatggagatcgttgtggcttgctgtagaagaaaagagagatacaatccaacgtagttatcggggtagaaataattgttgtggcttgctgtagaagaaaagagagatacaataagcatggggatataatgtctattttaaggttgtggcttgctgtagaagaa

SEQ ID NO: 702 - DNA, 14469 bp, synthetic construct
  source 1..14469: mol_type = other DNA
  misc_feature 1..14469: note = Synthetic
accggacgtcgatccgatgtaacggaaactaagaattttctctttgtgaaacttactttaccagcactccctcatacacactgggagtgtctccgtacttgttgctcaggcacaacgagtctgccgtaacgtaaccgttcaggtccttgatgacatacttctcgtagggtttaccccctgctgtaggcactatatcgttacaactgaagcttattctttctccggtcttggtatagtccactccgctaatcagcatgtcaattgtcaccggcatggcggcagcgaacttcacctcaaacatgtacagattaagtttcttgtcatccacaagcaccagtttggtgcgaacggcttccttcgtaaatcccgatgtaggaatggtcagcagtccatatgcctcatacgcctttgagttatctttcaccggttcttcttgtgtagtgatgtggcaggacatcagcagtccggcaagtaccatcagtgtaaatagttttttcatcattctttgtcttttattggttatcatagtcaggttcatcatatctcaaatcgcacggttgctcccatctcccgaggtttgccacgctgcaggaaatcgttgcccatcgatcggaagtagaatacgtcgtactgcgtgccggtcaggttctttccccacaactccaattgcacatattgccaccttagggctattgtagctgccagcataccgtacaacggctgactgcaatcattctgctcgttccaatagatgcgacctacaccatcgcccttaaccgacatggttaccgcctgcaaggctttgtggccgaccatgtaaccggcggtcagcagcccgtgcagggtgtgctgcggtgcgtaggggatatagtgtcccgaatagtcgcccatgccgtcgttgaacgtgatgaaccgtgcatcggtaaagccgtatgaggcatccagcattccgaaccatttgtcacgcgtccagcgatactgcaatgctgcctcagcaccccatattcgtgagcgggcggcattagccatcatgcgacctgtcgtcttgccgttgggaaagacggtcacctgctgatccagacattgaatatgaaatacatccatatccaccttcagtccttcagcaggcgtcaggtgggcacctatctcgaatgtccagtccgtctcgggcttataggatgtgatcgctacgtccgaatatcgcggatcagccatatccagatgcatacccatgtctgctgccatatccgtcatcacttggttctgcgtgatggtgctgaagatctgcgggttatatccgccggccttgtagcctttggctgcgtagccatataccgttccccatgatccgtcatacgacacagccaaccggggcagcacctgcaagtacggcttggactgcctgcctctaatctcagtgtgtacatcctcataatcaggcataatcattgtgaatcggtaactcaggtcagccgtgctcaggtagtccatgcgcgtgtgttcataatctatgcgcacgcccgcgttgatatgccagtgtccgaactgaaaatggctttggtgatagagtgccgctccggcattcagcagttcaaacgagctcgggataggtaatgtggtattgctgatgcagatggagtcatctggaaaaacggtctggatgccgcgattggcgttaccgaggatcaactcttctataccctcgagcataaacgtaacgggtgcatgcatcgcattggttttcaggaaactgctccatcctacggtccactcataccattcacagggtttgggggcatacagcaatgcatccagcgttccgttatgttggcgttgcgtctgacgcaacgtaaagatgtcggcacgcgtatagtcctgatccatcagcatatcatcatgcatgtactgataactgcccgacaacagtacgcgccagtcatcatgcgtatattccgcgcgaaccgatggcagtacagatagccgctcataactacccggacggttatagtctattcttcccgttgctaccgaggcatacgggaaagctccctgccgcacccaatcggcatacaccgttccggtcacgcgccattcatccatcggacgaccgtccaatacgatacgtccgcctgcctgctgaccgtaatcaacattttgccctgtataatcgttcgtgtgaaatccgtcggtgcgctgataacgtgctgctataccccagccgaacggacgacttttcgcatcgccggcttccaatgcctgattgttgccgtagtacgacatctgagccttgacggtattggctgttccgtagctcacaccgccgcgaatcagttgcccttccaaatcaagcggttggatggtacgtatctccatcactccgccgggggagtttctgccgtagctgctgccttgcggaccacgtaacagctcgatacgtttcacatcttgcatcgtatggtcgtacatatttttatccaacagcggtacaccatccaccaccatacctaacaccggctcattgatcctgctgcccaagccgcggatatacacgctgctggtcatggcggaaccgtaatccggcatatggatattggggacgagtgctgccacatctttcggtgctgccacctgtgccgactcaatcatccgcgcatccagagcactcacctgcatctgctggcgcgatactggcaccgctatacgcgaaacggatacttccacgtccggcagggctaccgtatctgcccaaccttcaggcgaagcggcgtgcacaatggttgctgccgttgccagacatactatgactaatacctttatccgcatggatagttacacccgctatctgccgaaagcgggtgcaaaggtacaaaatttttcttaaacaaagattaagattatcttaagatgcatcaaaatccccataaatagggatgcgaagttcgttcactgcaccgttgaaatcaagagtgagggagaaatggtgcatagtcaggcgcgaactgatcttgaatatcccgggtttggctccgggaagcaacgctgccaatatactgtccagcatgcgtctcagcacttcagggtcgattgtcagttcgttcacaaatggtgtgaggtgcatctgcgccaccagaccggcagcattgatctcctgctcatgacaccgcagccattctgcaagtatcgactgcagatccaccgtgtaacgggttaccgtgtgctcgatacgcagtatcagtcctgcaccgcgaatcgtttcgattggatacttgctgttccagcccagtttgcgccttagtgcagtcaggtgcacatctatcgtgcctgtatcgtatttgaaccgtgcaccccacacgtggtcaagcagttgctggcgcgtacacagcctgttggcatgcgccgacaagtaatccagcagcccgtactccagcccggtcaggtggatcgcttgcccctgcttacgcacctggcgttgctcacggtcaatctcaacattgtcgattacagggatgtacattccgtattatttttccgttgactccgtaggtactatatcctccactttcatctgtagtgatgtcacgccgttgtacgtgttctgctccagactgtagcatacatcaacggcatttccgttctggataaacattgccatatcgcctttgccgaacgctataccgctgattgccacgctgcggtcggtcaggtccagtttgaggtgctcgccctgcttgcccacacgcttggtgtagcggttgttgatcagcccgcgcgtcacaaatcgcggatggggattatccggtccgaaaggctccagatggcgcagtacattatagaactgcttgtctatatcctgcaacagcaactcttcctccacgcggataacaggcatctgctgctcgtcggttatatgctctgccacatattgctcaaaccgccttttgaactccggcaggttagcgggcagcatgcttaatcctgctgcaaacacgtgtccgccgaaattcgtcagcaggtcgcggcaggagtcgatagccgagtagatatcaaatccgcctacactgcgtgccgagccggctatcagcccgtcttctgtatcagcgagaacaatggtcggacggtaatagttctccgtcagtcgggacgccactatacccaacacgcctcgatgccagttggctccgtacgccacgttcgtatgtttgttaggatgctcggggtccgcctccaactgctgcagagcctcctgagtgatctgctcatccttctctttccgctcgctgttgaatgcttcgatagtctgcgcgatttccgttgccaccgtggcgtcgctgcttatcagcagttcgacagcagcacgcccggacttgattcgtccgcaggcattcagtcgcggaccgatgcggtacaccaggtcggatatgttcacctgcttgccttccaggtcagtcatcttcagcaacccttgcagtcccaccgacgggcgtgtattgatctgcttgatgccaaagtatgccagcacgcggttctcgccggtgagcgatacaatatccgatgctatcgacattgccagcaactcaagcaaagggttgagcgcggtatcaaacggcatgttgtgcgtctgcgcgtaggcctgcgccagtttgaacccgacgccgcaacccgacagttccttgaacggatacggatcatccggctgcttgctgtccagcacggctaccgcctgcggatgttcgtcaccgggcatgtggtggtcgcagatgataaagtctatcccgcgtttgcgcgcgtactctactttgtctgccgacttgataccgcaatccaatgcgatgatcagcgtgcatccttgctcctgcgcataatccacaccgcggaacgatatgccgtaaccttccgtatatcggtcggggatataatagtcgatattcgtatagaacgcactcaggaatcggtacatcagtgccacggccgttgtgccgtccacatcataatcgccgtagataagaatcttctcgccgctgtccacggctcgtgacagtcgttgttccgcctcacgcataccgagcatcagcatcgggtcatgcagttgactgagtgccggatgaacgaacgccgaagcctgttcgcgggtcgttatgccgcgacgtaccagcagagccgcagccacaggactgatctgcagttcctgtgtcagcttgtcgcgcagtgctgcctgctcatccgacaatgtttgtatttgccacaaatatttcacttgctaactatcttctttactccgagaactccaaacgcacaagttttctgtccgtatctctccatagcggcaatgcttcgcgataatgcttgagcacgggcatggagagttcggctatacgtgtaccttcttcgttatctgcgaacttcagcagttcgttcatgcgtgtatcgtatgccaccgagtgtccgttgtagtgccacccggcaccatcatcgcccaccagattagctgccacgatgtaacactggttctccactgcacgcgaagccaccagtatatcccacatcaccacgcgtgcttcgggccagttggcactcaccaggatcaggtcatagtcatcgccccatacgtttcgcgcccatacggggaaccgcacatcgtagcagatgagcagcagaatctttactccttgataggtgaatatcgtacgtttcttgccgggagtgaagaatcggtcctcacctccggtggcatacaggtgacgtttatcggtgaactgcggagcggcatgcggtgacagcaggaagccgcgattgtacagtttgtcgccatcgcggcagatgaacgtgccggcaatggctataccggtatcatcggcagtctgctgaagtgtggtgattgtatatccgtcggtggtctctgccagttcgggatgatccacgcagaatcctgtactgaacatctcaggcagcaacgccacatcggtctttccgaccaatgcagcgatgcgagttacggtgtcaccgacatttttacgaacatctccccatgctacggggtactgtaatacagctactctcatttcgccttgggcttgctgatggtctcgcgcatggcggtatcagcctggatgttctgcatgcggtaataatccattattcctaaatttccgttcttgaacgcctcagccattgcctgcggcacaagagcctcagcctcaatcaccttggcgcgtgcctcttgtgctttggctttcatctcctgctcgttggcgatagccatcgcacggcgctcctcggctttggcttgggcaatgttcttgtcagcctcagcctgatccatctgaagttgtgcaccgatgttcttgcccacgtcgatatcggcaatatcgatactcagtatctcgaatgccgtaccgtcatccagacctttggacaacaccagtttgctgatgctgtcagggttctccagcacttgcttgtggctctcggcactaccgatggagcttactataccttcgcctacacgcgcaaggatcgtatcctcgcctgcaccgcctaccagttgcttgatgttggcgcgaaccgtcacacgcgccttggctatcaactgtattccgtccttggcaacggctgcaaccggcggagtgtcaatcaccttggggttgacggacatctgcacagcctcaaacacgtcacggccggcgaggtcgatagccgtagccatgccgaacggtaactgaatacctgccttgctggcacttaccagagcatgcaccacacgctctatatgtccgccggcaaggaagtgggcctccagaccgtcacgtttcacgtcctgcaagccggctttgtgagcctcgatcatgcagttaacgatcttcgtgggcggcacacgacggatacgcatcagaaacagttggatcagtgagattcgtacaccgctgacttgcgcgttaatccacaacatgaacggcacgtagtagaagaacacgattactgcaatcgcaagcagcacaatcagaataatttgtaatgcttccatactattgattttattagtttattattccttcgttatatgtccggcagcgcagcggtctaatgtttatcagcctcagcggtttctttcatctcttccgcttgcttttgcaggcgagaaatcttcttgcccggttcagccagttcgaccgtatcgtcaatctttgcatccagacccatcttttctattgcgttactcttgcagaacgcatacacagccacacctgtggcagccagcacgacaaagaaggttatatgtcctgccgtggcaccgatcaccatgtaggcatacaccactgcaccaaccaggcaggctccgccggctataccggctatacccattcccgggatgagaaacaactccagcacgagcagcgacacgcccgccagagataacagtacaagtatcaaaatatccatagcataattgttttagtcgttagtagtcatggccagtctgttggttacgactgaagatcttcctatttcggaaaagtcacacaaagttacaaaaattttttgatttatgcaagtgttctgccaaaataatcttttcttttcgctatttttacatctgcgccgctgttccgcgctgcagttcggctattatctgttcgtcagccggcagccacttcaccgtgttcaggtcttcaggtttcagccatcgtgccgcctcatgctccagcagcacgacgtgtccgtcgggcagggtgcagcggtagcagtacattgttagatggaaggcgggatagtcataatccaccgtcgtaatcagttcccctacctcaatctccgcatccagctcctcgcgtatctcgcgtcgcaaggcttgttcgggcgtctcgcctgcctcaatcttcccgcccggaaactcccaccagtctttccactcgccgtaccctcgctgcgtggcaaatatacgtccgctccggtcgatgacgatagccgccaccacccgtatggttcggcgtgaggtactgctatgtgactcggttggcatgaataataatggttttgacatacaaagatacaacttttttttgaattatgcaaatattttgcactttttttgagcatgcgacaagatatagcactttgttgcattatctttgcatcggatttcgcgatcagttgaccgtttttgtccgcaacggaaatattagcccgtgcgcagacaggtaacagcaaatcgcgcaaaaaaagttaatacatttgcatatatcaaatattttttgtaactttgcaggcaatttggcactcagcataataatatgaaaatcagcacacatataaaggacggaaaagccacgcttacgcgaggcacagccaacgaaaaagacgtagctcaaaagagacatgcttcgtcatatccctcttcgtcggcttctgtgggcgtcagcccgcagtatcgtgccccaatcaagcacaatatgcaccgccgtaagacggggcatgattattcccgcccgggagcatacctcatcaccgtagagaccaccgaccgccagcgcctccttggcacgctacaaggcgacagctcgaacacggcacagatagcccccaccacgctcggcgaaacggtaatagccgagttccgagcgatagagcgcaaagtgcaagagtctgccggttgtcaagtgcaggtactgcaataccaattgatgcccgatcatttccatggtatcctctatatccgcgagcaattgccgcaaggctggcatttaggtaagatcatcggtgcctggaaaggagcctgctcccgcgcctattgggaggcatctccttcgtcggcttcgtcgagcgtcagctcgcagttatcgtcacctccgtcttcgtcagctttgtcgagcgtcagctcgccgttatcgtcacctccgtcttcgtcggcttctgtgggcgtcagcccgcaggaaagatctcccctctttagcgccggatataacgaccgccctctaacagcaccggggcaactacagggctggatatcttatctgcgtgacaacccgcggcgactatggctcaagcatcattaccctgatcgcttgcgtaaggtgtataacttcactatcggcgatagtcagacgcgatatacggcggtgggcaatactttcctgctaaaatatccggagcggcaacaagtacgctgccatcgcaatctgacggaagaacagatacacaatgaagttaatcattacctgcatatagctcggaggggtgtggtgttggtatcgccttttatctctccggcggagaaagcagtctatgaggcctgctataaggagcaactgccaatggtgcgacttgtcaagcgtgcgctggatggcaagtttgtctatccgcagggacgtgattttgatgcttgcgcgcagggattccttgttgtgcttgcgccttttgctactggtagcgagaatgccgcagacttgcgcatctcgcgcacgcaatgcctcacgctcaacgaatgcgccgccgagcttgcttcgtcagtttctcgtcgcatcagcgatgagtataacggatatgtaccacagcagatttcgccttaaaatgcacatctgtgcaaattttcttcgggaattgttgcaaatgtgcattttttttcgtaactttgtagcatctttcccgaaagggacacgccgcacactcaaggagatcggcacactgggcttcggctcatgccacacgttctggaagcacaagaaacgtatcttgcgtgaggagtaccacatgatatggcgcagcccgcaagacctcaacccggaatgttgctttgattagagagaattgcaaaaaacgaaggagtatcatcagcacaaaaaaggctccaccgaagtagagccataggtttttcaaccttcggccttaacggccttattgtgacaagttgaagaagagataacttgtttcacgatgcaaaggtacaacatttttttgaaatatccaaatatttatatagaaaaataacaaaaaacttctattattcatggaaaacgtcattaaacaacgcattttaggcttggataccggaactaactcgttaggttgggcggtggttgaccgacttccgttaggaggatacgagttggtggataaaggtgtacagatcttccaagaaggtgtaaacatagagaaaggcacccaagaaaaatcccgtgcagcagaacgcacatctcatcgcagtttgcgaaagatatattggcgaaggaaagtcaggaagattcaactactcaaattgctgagtggaagcggtttgtgcccagagttatcgaaagaagaattgcgtgcatggcgcgttgatggcaattatccaaccaacaactctgcttttgtgagatggcagcaaaccgatgagcagaaaggcatcaatccttatgctgcacgatgcaaatgtgtagaggacgagttggatatgagtaatcccgttgaccgatatattgttggccgtgccttgtatcacatcgcgcaacgtcgcggattcctcagcaatcgcaaagaccaaactgatgacaaagacaaagaatccggagcagttaaggcgggtatcaaagaactgacgcagaagattcatgatgccggatgtgagtatttgtgccaatatttctatcagttgtatcagaaaggcgagcgcatccgcagttgttataccgaccgtaaggagcactatgagcatgagtttgatgccatctgcgccaagcaatatttggatgaagcattggttcagcagcttcgaaaagccatcttcgaacagcggccattgaagagccagcgtcgcggtgttgccaaatgtccgtttgaaccatccaagcattgtgcgcctgtatcccatccgttgtttgaagaattcagaatgtggagttttatccgcaatatcaagatgcaaacgccggaggatgctgagctgcgtatgctgactaatgaagagatcaataaagtaaagcatctgtggttccgcaaatccaaagcgaacttcccgtttgaagacattgctaaaacacttgcagggaaaggtaagtattgctattacaaatcagccgaggataagccctaccgcttcaactactatatggataccagcgttgccggttgtccggtaagtgcgcaacttcgcgatgtttttggcgaagatctgcttaaggatagggcacaggttgattctatatggttagcattggatttcttcgacgacgacctgaaactccgtgagtgggcaatcaaacattataatctggctgacgagcaagccgatgcgtttgttaaaattcgtttgccacagggttatgcttcgctttcgctcaaagcaatggaaaatattgtacctttgatgcgcgaccatcagatgatttatccaaatgccacacttgttgccaagttgcgagacttgacaaaagactatccatttgaaaaagacttcgatgaggatgtggaggcatatctgaaagccgatattgaagagtatctgactatcccaactgacaagaacggcaaaccgctgatgtcacgcgaggaacgaaaagaagcattggatgtgaagtggatgcagcactataacctatctgcaaaggagataaagaaactctatcacccctctatgattgaggaatatcgtcatgtggagcacaccacaaacggcgtatatcagttaggttctccgcgtatatctgcactcaagaatccgatggctatgcgttcgctcttccgcatgaaagcggtagtcaaccaattgctcaaggacggaacgattgacgagaacacaatcatacatattgagttcgcgcgcgaactgaatgatgcgaatcggcgtgcagcattacgaagatatcaagccgccttgcgcaaagaacgcgaagatgcggtagaggctatcaaagaattcatcccaaatccgagtgatgatgatgtactcaaatacttgctttggaaggatcaggaaggcaagtgcgtttatacaggtaaaagcatatcgctgtccgccttgtataatggcaccgagtttgacattgagcacaccgttccgcgtagtatgggtggagataccacgcgcgagaacttgacgatttgtgatgcaaaattcaatagggagataaagaagaaccgtctgccgtcacaactatcagaacaagcacaagaattgctacaagccaatatccaaacatggaaggagaactgcgaggcgttggataagcaactgcgaaagatgaaaaatgccacatccggattgagcacaaaagaggcaaaagacagcgtgattgctaaacgtcatcttttggagatgcaacgggacttctggagaaacaagtacaaagcctttacaatcgaagagaaggatgtgcaaggctttacccgcaggcaaggaacggatatatcagtaatcagccgttacggtcggttgtatttgctcagtttgttcaatcgggtggatgtagtcaaaggatcaatgactgctgcattccgcaagatttggggaatacagacggcttacgaaaagaagaaccgcgagaatcatgtgcatcattgtattgatgctataacaattgcttgtatgggtaagcgtgagtatgacgagctctccgcatattaccatgccgatgaagaaaataagtatcatagttccgacattctaatgccgaaaccatggaagacattcacggaagatatcaaggatattgagcaagagattcttgtggcgcattacacctccaacccgatgggtaagcaaacaaagaagaaactacgtgatagccgtggacatatcatccgtgatgccaacaaacgacctcgttttgcacaaggagataccgctcgtggagctttgcacaacgatatgatttatggaatgattgtcaatagccaaaatgtggatgacaagcataaagttggcaacttatgtgccgtaaagcggataatattaagttcagttgcttctaaagatgaagaaaaaatggcagccagcatcgtagatccgattattaagaaaacggtgaatgatgccagagcaaaatatggaagtttatctgctgcaattgaggctgagcaagaaaatggagacggttctatctggctaaacaaagagaaaaacgttaagattaagaaagtgcgctgtttccaagattttgccattaacgcttcacctatccgttcattgcgcgatcaatccaagaaagaatacaagcgtagccactattcaatgacaaatggcaacttcatgtctgccatctatgagggaatagatgcaaagggaaagaagaaacgttcgtttgttattatcagtttgtatgaagcagcacaggcctacggcaaacatgagcctttagtacccactgtgagcgaagaaggctatgcacttatcaagactatacgattaggggatttggtgctcttatacgagaattctccggaagagatatacaatgcttcccaagaagaattggtgaaacgaatgtacgaaattataggaatgtcagattccaaaggtctgcaaatcagactaaagcatcaacaagaggctagaccaaatggagagctacagcaaattaatggagcatttaaaaatggtgattcagcgccaatcagaatgcttttgcacactcaattcaacgctctcgtacaaggacaagactttgatatatccgataccggcaaaataacgttcaagtcatgctaaaacaaacgctcttcttttccaagccttgcaaactctcgttccggctcaagcagcttgttgaagaagagaaaagatatacaacaacatcgcctgtctgtgtgtgccgtgccagttgtggcttgttgaagaagagaaaagatatacaaccaacgtggtatatctctcgagctatcctctgttgtggcttgttgaagaagagaaaagatatacaacgcgcaggagagcaaagcctacaccatcatgttgtggcttgttgaagaagagaaaagatatacaacaggttcgacttcatctggcggacggacgagttgtggcttgttgaagaagagaagaaatatacaacgtgatacaggatgcggggtacaccctacacgttgtggcttgttgaagaagagaagaaatatacaaccatcggcaacatgtccgaactactgaccgagttgtggcttgttgaagaagagaagaaatatacaacttttttccaaaagtgcaaatataaatgtagttgtggcttgttgaagaagagaagaaatatacaacactcgcattgatatggtactccaggaagaagttgtggcttgttgaagaagagaagagatatacaactctgcagtcctacgacgagtataagcacatgttgtggcttgttgaagaagagaagaaattaaactgattgaacaataatgttcgggactgacttttcctaaatagcgttgacagttttttaatattttttactaaaagacttgacatcttcctggaaaatattgacactctcctaaaaaagttga

SEQ ID NO: 703 - DNA, 11244 bp, synthetic construct
  source 1..11244: mol_type = other DNA
  misc_feature 1..11244: note = Synthetic
gagccggtatgttccatcaggaactgtgggacgcattcctgcaacccactctcgccgacggagccgccaaccccgcttaccattcctatggagcgatactcaaacacggcggactgcttgatgtgctctatatcggtgtgaaagcaggtgtctatccctgccttatcttcatcggtgtaggagcgatgaccgacttcggaccgctgattgccaaccccaagtccttcatcctcggtgccgctgcacaagtgggtatctttatcgcattccttggtgccaacgcactcggattcacgcctgctgaagccggttctatcggtatcataggcggtgctgacggacctaccagcatcttccttaccagcaaactggctccgcatctgttgggtcccatcgctattgcggcttattcgtatatggcacttgtgcctgtgatacagccgcctattatgcgcttgctgaccacggagaaagagcgcaagattaagatgaagcaactgcgtgcagtcagcaagaccgagaagattgtcttccccgttgttatcaccactatcgtggctctcgtactgcccgatgctgctccgcttatcggctgccttatgctcggtaacctgatgaaagagtgcggcgtggtggaccgtcttgccaagactgcacagaacgaactgatgaacatcgtggttatcttcctcgggctgaccgttggtgctacggctactgccggtacgttccttacttggaagaccctcggtatcctgcttatgggtatcatcgctttctgcttcggcacgatgggcggcgtactgcttgccaaacttatgaacgtcttctccaaagagaagattaacccgctgattggttcggccggtgtgagtgccgtacctatggcagctcgcgtcagtcagatggaaggcgccaaagccgacccgagcaatttcctgctgatgcacgctatgggacccaatgtggcaggcgtaatcggttcggctgttgcagcaggtatcctgctcactatgctcggataaccttacgacgctatacggctaacttgagaggactgccattttggcagacctctcgtttttttatactgcactgtcagcatattcctaacggtggcacggtatttgttaggaaagtagcggaaaggtgcggaatgtataaacgcataaacttataaacatataaactaaaaaataacaactatgacaaaaatcaaaccgttagcagaccgtgtactgattcgtccggtcgctgctgaaacaaccaccgctgccggtatcatcatccccgacacagcaaaagaaaaacccttgcgcggcgaagtgatagccgtaggacaaggcaccaaagacgagcagatggtactcaaagccggcaaccatgttctctatggcaagtatgccggaacggagatagagattgacaacgagaaactgctcattatgcgtcaaagcgatcaactaattaaaaaaactatggcaaaagatattatgtacggcatcgaatcgcgtgatgccctgaaaaacggagttgaccaactggctaatgcagtcaaagtgacgcttggtcctaaaggtcgcaacgtagtgattgacaagaaatacggcgcaccgcaaatcaccaaagacggcgtaaccgtagccaaagagattgaactgaagaacgcacaggagaacctcggtgcgcaactcgttaaggaagtagcctccaagactggcgaccaggcgggtgacggcaccaccaccgctaccgttcttgcacaagcaatagtaggcgtaggattgaagaacgtgacagccggtgccaacccgatggacctgaaacgcggtatagacaaagccgttgcagccgtggtggcagagattaagaaacaaagcgaagaggtaggcaacgacttcaacaagattgagcaggttgccactatctctgccaataacgatgccgaaatcggtaaactcatcgccgatgcaatgcgcaaagtcagcaaagacggcgttatcaccatcagcgaagccaaaggtatggacaccaccatcgacgtggtacaaggtatgcagttcgaccgtggctatatcagcccctatttcgtaaccaataccgagacaatggaagtggagatggacaaaccctatatcctcatctatgacaagaaaatcagcaatctgaaagagttgcttcccgtactcgaacctgccgttcaatcgggtcgtcccttgctcatcatcgctgaagatgtggatagcgaggcactcaccactctcgtagtcaaccgtctgcgtgcacaactcaagatttgcgctgtcaaggctccgggcttcggcgaccgcagaaaagagatgctggaagacatcgccatccttaccggcggtacagttatcagcgaggagaaaggtatcaaactcgaatctgctacgctcgatatgctcggcacagcggagaccatcaccgtcaacaaggacaacaccaccatcgttaacggcgcaggcgacaaggctgccatcgatgcacgtatcgcacaaatcaagtcgcagattgctgccaccaagtcgtcgtacgacaaggagaaactgcaggagcgtcttgccaaattggcaggcggcgtagcacaactcaatgtcggtgctgcttccgaagtggagatgaaagagaagaaagaccgcgtggacgacgctttgagtgccactcgtgccgctatcgaagaaggtatagtaccgggcggaggcgtagcttatatccgtgcacaacaggtacttgccaaactcaaaggtgccaacgaggacgagcagaccggtatcgaaatcgtttgccgtgccatcgaagagcctctgcgtcagattgtagccaatgccggcaaggaaggtgctgtggttgtggacaaggttcgtcaaggcaagggcgactacggttacaacgcacgtatggacaaatacgaagacctcaagaaagccggtgtggttgaccccgccaaggtagctcgcgttgcacttgagaacgctgcttctatcgcaggcatgttcctcaccaccgaatgtgtcattaccgacatcaaagaggagaaccctgctcccgcaatgccccaaggcggcatgggagggatgatgtaataaaaactgacttaaacattgttccttatgtcaaaaggcggaagaagtacatgtccgggaccgatgtatccatcaacaacgggcaatcccagtggtggcggtcgtgccaacagcccctcacacaagtaatcaatcaggctaactgaaaaaagaaatcagcgcactttcaattgagagtgcgctgatttcttatatgtgaaacactatacgaacggctcataacagggacattacagatacaaaacagcaagcaactccgtaggataaccgatagataaccgaaggataaccgatagatagtgcttatctcaccgtagtcttaccgtagtctcaccgaatgcacagcggctgactgaacctgaaacggttgcctcctctcctaaacttgcaaaaggtcgatgtttggcactttcttgttctttttcttgcatatcttaataaaatagcagtacctttgcagcgtcctttgagggtacgcactcgtcccgcgtgcggctcaaacaaagagacaacaactttgttatatagaatcccgaagtcacaaagccgatggagatacagcacttgcatagtatttaatgaataatattgttaatacgcatattagaaagaaatattaacaatataaatgtctgttaaccatgtttattgaacaattggtatatgcgcgtgatatattgctttcacgcatcaatcctgccgccgtttcgcaccgcacgggcggaacagggaacttacaatcagcactcatgaaaaggattgtgatgtttctcgtgctaagtctgtcagtggtattcccatctaatgccgaaaaggcggtttcgcttgacgattactatacagtcagcgaaatatatcagatatatacggatctggctctggaaagcggctcgacatccgcacagtcatacacggtgcgcggctatgtcaccaagtgggaaagcggctatccggattttcagaacggacaattctatatagatgactctgccgatggttccacctctaaaatgtgttgcttcaggctgaaagcggataacgatgatgacaagcatgccttgaataccggcgactatatcgaggcaaccgccatgttgaagaattacaatggcaaggcggaactggtaaacggcacgtatcatatggttgcgcctctgaccgtcacctacacgttgctgataaacgcggatgaaggaggcacggtcaactcttcggtcaacgggacatacgagtcaggagaccaagtgattgtttctgccacaccggatgcggggtatgttttcaccggctggagtgacgggaatacggacaatccgcgtgtcatcaccatgacaggagacatcagtctggtggcattttttgagaaggcgcagcaggacaattgcacctattcgtcgttggaggggttgaaaagcaaggcattgctgtcttctttacattcgttgattgccgaccatactgtcctgtcttatgacgatgtgcgtggcgaccgtgctaatgtggacattaacgccgacggtaatatctgggacatctattccgattgttctttctcgcccaagggatattgccgtggcagcgacggttttgcagagtgtgagtgctacaaccgcgaacacgccttgcccaagtcgtggtggggaggcagtgataccgaacccatgtacaccgacttgtatcatatcttccctaccgatttccaggccaacagcaaccgctcggcatggccctacggcgaggtgacaggcactgtggaatggagcaacagcctcggcagcaaagtgggatacggcacgttcggcagttcgggaaacaactatgtatttgaacctgctgacgagtataagggcgaccttgcacgtgtctatttctatatgataacctgctacaatgacaagaatttcacagcaggaggcaagggttaccagatgtttacctattccggcaatacggcgggcttcacctccaaagccttgaccctgctgctcaaatggcatcgacaggaccctgtgtcaaagaaagagaccgaaaggagcaatgccgtatcactcaaacagcataataccaacccgtttgttgaggacccgaatctggtggagtttatctggggcaagtggaagaatgagtcatatacgtgcaacgcatcagggacggatgtgcgccctgttcaggaggagaatatacaaatcaatgttgtaggaggacgcttgactatccgctctgaccgttatatggatattcggatttacgatattacaggtcgtgagatgaggtctctgtccgctgacggtcatgctgacatctccctcccgaccggcttgtaccttgtctgtgtcaacaatctcgttcagaaggtaatgataccccctctctgcttgatgaattagcgtaaatggctacaccctacggatagccttctgcctgttcttttatagccttctgtttgtttcttatagccttctgccttctttctttttattgcatgcgaatttaattcgcagccctttcgtctcttgcagaggctggtagccgcttttttcttcgttaattagccccgaatctgattcgggttcaaaacgtatgtccatttcgcggcaattgtattgccgcagagccttcttcgtattccgccaattgtcaatccgcatagcttcgtccattttgccgaatagtattcggcgttttgcttcttctttgtaggctgtcagcctgcacttgtatattcagcatccaacactcagtcatcaacattcactcaccaacacgcaattatcaactatcaattgtcaattatcaattaacagcgcagcaagcaactacggcaacgacacgacaacgaccgctccttttcccgatagataaactaaattaagcagatgactaaaatagtggataaagaagttaaattttacaaataatctgcttaccgacttgtcatgtcagcttaaaatagtatctttgcagcgtcctttcagggtactcgtcccgagtgcggctcaaacaaaaagagataataacggagcaagcaaaaaaaaacagtcccgccgaagcaggacattaggttttacccttcggccttgatggccttattgtgacaagcttgaagaagagaaacttgtttcacgccgcaaaagtagtgcgtttttatgtaaccaccaaatagtaattgcaaatttaatcaagataatgatggaaaatacaggcaaacagcgcattctcggtcttgataccggcaccaactcattgggctgggcagtcgttgaccgtctgccttacggcggctatgaactgattgacaaaggagtgcacatttttcaggaaggtgtcaatattgagaaaggcactatagagaagtcgcgtgccgccgaaagaacagaacaccgcagtctgcgcaagatttactggcgaaggaaagtgcgcaaaatccgcctgttggcagtgctgagcaatgcgggtttgtgtcctccgctttcatccgaagaactgcacacttggcgtgtggaaggcatctatccgttgcgcaacgagaacttcatgcgctggcagcgcacggacgagaacaaaggcatcaacccttatgccgcacgttgtcaatgcatcgaacgcgaattagacatggagaaccgcatcgaccgttatctgttagggcgcgctctgtatcacataacccagcgtcgcggcttcctcagcaaccgcaaagaccggaccgatgacaaaaactcggagagcggcaaggtaaaagagggtataaaagacctgacacagaagatacaggatgccggttgtgagtatctctgccaatatttccatcaactctaccaacgcggcgagcgaatccgcagttgctacaccgaccgcaaagaacattacgaaaaagagtttgacgcaatatgcaaaaagcagcatttgggcgaggcgttggtgaatgaactgcgtaaggttatttttgagcagcgtccgttgaagagccagcgtcgcggagtagccaaatgcccgtttgagccttccaagcactgtgcgcctgtttcgcacccgctgtttgaggagttccgtctgtggagtttcatccgtaatatcaagatgcagactcctgcggataacggattgcgtatgcttactgatgaggaggtgaacaagattctgccgttgtggttccgcaaatcaaaagccaacttccattttgaagacattgccaaaactttggcgggcaaagacaaatactgctattacaagtcggcggaagaaaaaccatatcgtttcaactactatcttgacacgaatgtggcaggatgccctgtaagcgcacaactcaaagagatattcggcgaagaaattctgaaaaaccgcgatacggtagatactgtttggcacgcattggacttctttacggatgatatgaaactccgtgaatggggaatcagacatttcaatctgacggatgaacaggctgacgcacttgtcaaaattcgtcttccgcaaggttatgcctcgctgtcgctgaaagcgatggagaacattgtgccgctcatgcgtgaccacggaatgatttactccgctgccacgcttgtagccaaactgcgcgaccttaccagggactatccgtttgacacggactttgacggtgaagtggatgcatatctgaagaccgatatagaggactatcttacaatcccgacggacaaagacggcaagccaacaatgacccgcgaggaaagaaagcaggctctcgacaacaagtggaagacacactacaatctgtcggacatagatatacagaaactctatcatccgtctatgattgaggaataccgcaaagtggagcacaagacgaaagaaggtgtgtatcagttggactcgccccgaatctctgcactcaagaatccgatggcgatgcgctcgctcttccgtatgaaagcagtcgtgaaccaactgttgaaagacggaaccattgatgagaacaccatcatacatatcgagttcgcccgcgaattgaacgatgccaaccgccgggcggcattgaggcaatatcaggcggcattacgtaaggaacgtgaagaggctgtggaggcaatcaaagatgttgtcccgaatccgagtgatgatgatattctcaaatacttgctatggaaagatcaaggcgggaagtgtgtttatacgggaaaaactatatctatttctgcattaggaagatgtacctataccggcagagaaatatcattaaaagccttatacaacggaacggagtttgatatagagcataccgtgccgcgcagtatgggaggagacacaacacgggaaaacctcacaatatgcgatgccaagttcaacagagaggttaagaagaaccgcctgccgtcacagttgtcggaacaacagcaagccatcgttcaagccaacattgaggagtggaaaaagaaatacgaggacttaggcaaacaactacgccgcatgaaaggctccacttcgggtttgagtaccaaagacgcgaaagaccgtgttattaccaaacggcatttgttggagatgcagcgtgacttttggaagaacaagtacaaaacatttactatttcatcagatgatgtaaaaggcttcacacgcagacagggtacggatatttcggttatcagccgttacggaagactctatttgctcagtcttttcaaccgtgtggatgtcgtgaaagggtcgatgacagcggcgttccgcaagatttggggcatacagtccgcctatgaaaagaagaaccgcgagaaccatgtgcaccactgcattgatgccatcacgattgcctgcatgggcaagcaggagtatgacgatttgtctgcatggtatcatgccgatgaggaaaaccgttcgcacaacagcggacaatatatacccaagccgtggcagacattcacggaagatataaagaatattgagagggagattcttgtcgctcactatacagccaatccgatgggcaagcaaacaagaaagaaactgcgcgacagtcagggacacatcattcgcgacaaacaaggcaatccccgatatgcgacaggcgatacggctcgtggtgtactgcataatgatatgatttacggtatgattaccaatagtcatgatatggatgacaaacacgcggcaggaaaacgctttgccgtaaaacgcataccgttgagagatgttgatataaaaaatgttgtggatcctattgtaaaacaagttatcattgatgcaataaccagatatggcagtttgcagaatgccattacggcggaacaggaaaataatgacggctctatatggctgaacaaagaaaaaggtgttcgactaaaaaaagtgcgctgcttccaagataatgctatcaatgcaaagcctattcgtccgttgcgtgatttgtccgaaaaagaatacaagcgcaatcattattcaatgacgaacggcaattacatgtctgccatttatgaaggagtggacgaaaaggggaagcgaaagagaacatttgagattagaagcctttttgaagcagcacaggcatatagccggaacgaaccgttggttccggcaactaaagacggatgtcatttgataatgacattaaagttaggtgatttggtattgttatatgaaagcacacctgatgaggtgcgaaatgcatcacaaaaagagttagtaaagagattatataaaattacaggaatgtcagattcgagtgggttacaaattacattaaggcatcaacaggaagcaagagatgcaggtgtgttaaaaaatgaatatgggaatcctaaaacaggtttgtttaatgctcaacaagatatttatccaagacggatgttattacatactcaatttaatgccctcgttcagggacaggactttgagatatctgatacaggcaaaataacattcaagcaatgctgaaacagacactctttttctccaaaccgtgcaaactctcgcttcgcctgaagcagttggtcatagaacgagaggatttgccccaaccggtcacacgaccgattgaagacttgtctgtcatcattattgagaatcagcaggtgatagttaccgttccgctactcaatgagttggcagacaacaatgtggcggtcatattctgcgacagtcattttatgccctcaatgcaacttgtaccgttggaaggaaacgcgacacagcaggaatcatacaaatacgagatgaatgcctcgcaaccgcttgtcaagagaatatggaaggagattattgaggcgaaaatcaagaatcaggcattgctgttagaaagtttgtcgaaagacgcaactcctctgaaaccgttgtatagtaatgtcaaatccggcgataccgataataatgaaggcttggctgcacgactatactggagagggttgtttggaacaagtttccgacgcgaccgatatggtgatttccctaatgaactgctcaactacggatatactgttttacgggcggcaacagcgagggcgttggtaggttcgggactcagcctgtcttttgggttgtttcatcgcaacagatacaatcccttcccattggcagatgatatgatggaggcttacagaccgtttgtggacgatatagtgttccaactgacacaggctgatgagccggtgacactatcatcggaaacaaaatcaaggttgataaatgtaatatatcgtgatgtttggataaatgaccataaacatcctttgcaagtggcactgacattgacttcggcatcattattgagggtgttcaaaggtgaagacaaacatatattgttacccacttattcgccatgagttttgaacgcttgaatgcataccatattatgtggctgtttgttttcttcgacttgccggttactaccaaaaaagaaagaaaagtggtgactatattccgtaaacaattgatggagaatggtttctcgatgatgcagttttcagtgtatatgcggcactgtgcatcatacgaagctatggaagtccataaaaaaagagtgcggaagatagtgccggacaaaggggaggtctgtatgatgggggttacggacaagcagtttggagacatggagcatttttgcagtgcgcaacgacaacaaatgcatatacctacgcaattggaaatgttttagtccttttgcgca

SEQ ID NO: 704 - DNA, 24602 bp, synthetic construct
  misc_feature 1..24602: note = Synthetic
  source 1..24602: mol_type = other DNA
caagccctaccccaagcgtgtcattgttttctcaccccaccccgatgatgacgtcatctcaatgggaggtaccatccgtcgactcatgcagcagaagcacgatgtgcatgtggcctatgagacatctggcaatatcgctgtgggcgacgaggaagtgcgtcgattcatgcacttcatcaatggcttcaacactatctttgccaatggttccgaccaagtcatcaagcactcctatcagacggtgaaggccttcatcaagaataaaaaggagggcgacctcgacaatcagcagattctccgtctgaaaggactgatccgcagaggtgaggcgcgtctggcctgcgagtacaacggcatcgacagccatcatatccacttcctcgacctgcctttctatgagagcggtaagattgagaaactccccatgacagaaaacgacgtgacgccgattatcgaactgctctctgagattcagccacatcagatctatgtggctgccgaccttgccgatcctcacggtacccaccgcaagtgtacagatgccgtattggcagccatcgacgaggagaagaaggcaggagccgagtggctgaacgattgtcgcgtttggatgtatcgtggtgcctgggctgaatgggatgtagccgacattgagatgtgtgtgccgatgagtcctgaggaactccgtgagaagcgaaatgccatcctgcgccatcagagtcagatggagagtgccccgttcttgggcaacgacgagcgcctgttctggcagcgtgcagaggaccgcaaccgtgagacggcaaagcgctacgatgcactcggactggcctgttacgaggcgatggaagctttcgtagaataccacttttagcggtgaaaaggtaaaagagtaaaaaagtaaaaaaatagataagaaatggagaatgtgtcagttaacaaggtaatgggggtggttaaagtttttttatctttttacctttttacccttttacctttaagcgttcatgcgggtgaacctgcaaattatgaggtagtacctctgccacaaagcattgtagaacaaaagggtgccccattcatccttgaagagggtgttgagattctggcttcagctgagttgcagcgtgaggcagagttcctgaaacagtatatcgaagaggtgacatggaacaatcttcccatcgcccagaagagagagaagaaagtgcgttatatcgaactgagtgtctctcccactgtcaaagagaaggagggttacgtgatgacagtcagtcagaagggcgtcacgatccagggaggctctgctgctggtgtgttctatggcatccagaccttgcgaaaggctgtgaaggaaggggttatcatgaatcccgtcatcatcacagatgcacctcgcttcagctatcgtggcatgcacctcgactgctcgcgacatttcttctcagcagatttcgtgaagaagtatatcgacctgctggcgcttcacaatatgaaccgtttccactggcatctgacggacgatcagggctggcgcatcgaaatcaagagatttcctgagctgacaaccatcggagctcagcgctctggtacaatcctcggcaccaactccgacctcgacgacggtattcctcatggcggattctatacacaggaagaagcccgagagattgtgaagtatgcccaggagcgccatatcacgatcatcccagagatcgacatgcctggtcacatgctggctgcgcttgcctgctatccagagttaggctgtactggcggaccttatcaggtgggccactactggggcgtctataccgatgtgctttgcgtgggcaatccaaaggtcttcgactttgtggagggcgttctgacagagatcatggacatcttcccatcggaggtgattcatatcggaggcgatgagacgcctaccgtgaaatgggagaattgtgcgaagtgtcaggctctcggactggccaaggatcagttgcaggcttacttcactcagaaagtgttcaatttcctcactgcccaccatcgtcgcgccttgggctgggatgagattctcgacggttgtccaaaggatgcgatgatcatgtcgtggcgaggcacagcacctggggctaaagctgcccagctgggacacgatgtcgtgatggcacctacctcacatgtctacttcgattacctgcaatctcaggaacgattgttcgaaccttcgcgctgcgagggtttcatccccgttgaaaaggtctactcgctcgaccctgctccagatacgctgtcggtagaagccagaaagcatatcctgggcactcaggccaacatctggacggagtatcttttcacggaaggcatggtggaatatcaggctctgcctcgtatgtcggcactctcagaagtgcagtggacactgcctgaacgcaagaactacgaagcctttaaagagcgactgacacgcttgacggcactctacgagctctatcactatcaatacgccaagcacctctggcctgagcgacagctccccagtcgttggcaattctaagaaacaaaaaatgatggtccgtggactttaatacctttgattaaagtccacgggctttccatatacgatccttcgctgcgttgatctcctggaacttcttctcagcggccctgcgcacatcctcacccagtgcagccaccttatcaggatggtgctccagggcgagcttgcgataggctttcttcacctcgtcgtcagaagcatccggactgacgcccagcaccttataggcatcttcgagggtattgccttcgaggtggagcatcgagtcgacctcactcgcacggagtcccatccactgggcacactccttcagggccgtaatctcactctggggcacattgccatcagccttggccaccatcacgagatagttcaatagctgtaagcgctgcgaatagtccatctgctgattgatctgtccacaacactcgcgaactgtcgacttgaactgcgtccacccctcacgtttctgctcgtcgaagagtctgttcagaatctcgttaccctgctgcacggcaccagagccaaagttctggcgcaacatctgccgcaccagctccatctctgagtgcatcgccttgccgtcggccttaataatataagaggagagcacgagcagcgagaacaggaaactattgcgctgtccctgctgctgccgctggcggtaggcctgctgatatgcctgattgtaatcctgataagaacgttgtgagcctgagccccatgtacctgagttatcaggtgtattcacaccgtcgagcatcgtatcaaacattgaccccaccaaatagccagccagagctcccaacggtcctccagccatccatccgataaatcctccaatccactttcctgctgccataatttctttttttatccgcgaaggttatacttatttcttaaaacactctgtcctaactgcacatgatgcagagcatcgtgaggtcgtcgctctgaggggcatcgcccacatgctgtttcacgctctccgacagacggtccaccatctgcctggctccctcaaagggatggctggctatgatgtcgaggatctggtcatccccaaactgcaactgctcaccatcctctgcctccgacaatccgtcagtatataataacagaggtctgcccttgacattctcgatttcctcgcccacgaactccagtcccggccacaggccgataggagcattcgcctccatgtccacgaatacggggtttgagggagcgtcgccctgctggctgctctccatcatcacaggtggattgtgaccagcattacagtacaagagcctgccactctgcatatcgatttctccgatgaacatggtacagaacatgccgttctcattattctccgacacggtctcgttaagctgcgtcgcaatataatctggcggatatccatccttggccaccatacggaacagattgacaatcaccgacataaagagtgaggctggtatacccttaccactgacatcaccaatacagaaatagagtttgttgtcctgaatgaagaagtcgtagagatcgcctcctacctccttggcaggcttcaggatgccgtagatgtcgatatggtcgtgctgggggaaaagccttggcaccatgcccatctgtatttctcgtgcgatgcgcagttcactctctatacgctccttggccgtcgtcgtctcctccaactggtcgtaggccgtcttcaggttcgtgttcgcctcctgcagctggtcgttcatgagtctcaatcggcgcgcattcagactccttcgccagaggatgtaagcgagggccaggatgatgagtgcagcgatggagatggccgatgtggtgaagatcctgcgagctcgtgcggcctgttcctgcgctgccatcttcgactcgtattcgctgatctgcaggttcttgttgtgcttgtcgagactatcgttctgctgcctgacagcagcattctgcaactccacctccttgtttttcaggttcagctgcagcgtctcttcctccagccgcttctgctccagttcaccagccatattctccaactgcaacgattggttacgcagtttcagttccttctgttcgttctccaggcgccctacatccatcgaggtgatcatctccaggagcagatgcgaattgcgcacctcgttgacggagtctttccatattatataattagtcaacgactttaaggccatctcgtagttcttctgctcacgatagatttcacgctcgagattgtagcgcgtcatcggcgcacggatggtggaggctattcgcagggcctcgtcgaaatggcggtcaaggatacatctgaagatatccaccctctggccatagatatcatcccgtccataggcttttttgaccttctcacgctctgcataaaaacggttgaagtctgtcctgaagtcactgttcttgggatggtatgcggcactgtcggcagccgacatacacatcagggagtaggcattcaagcggtgtaattcattcaaatgaggctcacggatggcctgctcagcgtattggatggcactctccatgtgctttcgcaaatatgagatcttcgccagttctatcagactggaagccgcactctcattgggcaggtattcatgcagatagttgacagccttcttgaatcccttgatggcctcctcatgattctgcatttgctcatgggcgtatgccgacacatggagcccgttatagatgccccacttgttgccctgcttgatggcatgctcttgcatctccttggcaatctgcatggctctgctgcgacgctgacgattactggagaagagcacttggttagcccacgcacggtaaaacatacgatcgtcgccagcctcctctgcagcccttttcagactgtcggtgacgctgatgaactcatcgtagtcatagccgctatagagtttatacatcctggcctgcaaccgtttcacctcgtcggatgcagtcttctgagcactggcattcagcactgtcagacacagcagcaaaaccatcaggagtcttttcattctgccttgatgactgataaaaagtcttgttgaatcacaccgttcgttgccacgacgctgttaccttgggtgaagtccggagagcctgagtagtcggtgactgtccctccagcctccatcacgatcagactgcctgccatataatcccactggccgatatactgctccgcatagccgtcgagcctgcctgctgccacctgacaaagtgccatcgctgcagaaccgcaagcccgaatactgcccacatggccataaagccgatctatcaatctcttcatcacaggcttataggcatcgctgttataaggaaactgcagacaaagcagcgcatcctgcatcttctgcgaactgacgtgaagcctttcactcctcactccacactcctcactcctcgttccacattccacattcctcattccacattccacattcctcattccacaaagccatgctcccccgccctgccaggcatagaaacactcatcagcgcagatctcatagaccaccccgatgagcaccaacttcccttgcaagagtgcgatactgacagcgtaaggtgcatactgatggatgaagttcgtcgtcccatcaagcggatcaaccacccaaagcaacctttcacttttcacttcatcacttttcacttctcttgccgttccttcttccgtgatgaagcctgcctcaggcaatagctcgcgtaaggcgctgacaatcagccgctccgaccctttatccacatacgaaacatagtcgtgggcatgcttacgttccacactatcgagggagaacttacgccgttcctccctgatataagcacctgcctgtcgtgctatctcgcacacagccaacgtatatttctctaaattcttttcttccacaacttattagattaatccattttcaactgcaaaagtacaaaaagccgaggacataacaaaacgaataacgttttatttccaaattaattggaaatccctacctttccgcgagccgatagatatgaccagaggtcttgcgatcagtctcgaagtcgaacttctggtcgctcaaggccctgcccagtttggtgaaggaggtcttggggtcgtagttggcatagcggttcttcagcagctcgtgaatctccgtcagcccccaccatctgccttcgccagccttcggcttgctgaaggtctcgccaatcatctccaccagatcgttcagtttctgataaggctcattctccttgatcagcgtcgcaatctcctcattatcaagccagaagcgctcacccgtattaaagaggtggagggcctgagcgaagagctgacgatgttcgagattgtcctcgaagttgatgttgccattcacgcccacacagacaaatcggcgagagcccgtaggatccaccagcggtttctgctgattcgtagtacctataaaagaggtatagcggcggaactgcctgatggtcttgccgtaaggcggacggaacttcacttcggctgacgacagcaggtatttcagcacgatctgctgcgaggcggtggtcttgtcgaactcatcgatgttgatcatcgcaaacatcgtcagcgcaatgttcaggtcgaactcgttcttgaagttgatcttgtcgttgtagtagtcgcgcagttctggaggcaggataatcttgcagaaacgcgtctttccacaaccctgacggccaatcagcaatggagtcaacgcattgccagtcaactgtttatcgctctcacgccactgagccaccatgccgatgagccacatcttcaagtacttgggccagtggggctgcgaggtgggcactcgggctgcgagctccgagatatagtcgtgcccgttccacttcggcagcttgtcgagccagacgttcacggggtcgtactgttcgatacgggtagagtcgataaagcggttcacatctctgtcccacgacttcagtcccagctccgtagccctcatcgtcatatcgttgcgaacctcctccgtaagcggcttaaacgtctgatcatcagagtatttctcacgatactcagccacgccagtcatcaggttcttgcgcaactcgaagttctcgttgaggaagatttccgtcttcatcatctgcagcgtgtcgttagggatgctctgcaggggcttgatcttgtgcttcttcatgtagtcctcctgcagggtgacggcatagacggcctcgaaagtcttctttagcagcagtttgtctgtgttcaaggcaggatgctccagcgtcatcccctgtgcgaaggccaagggtatgccctgattcagacaacgtgtggcaatctccatcagcagcgtctccagacggtcatcgtcgggcagctcgaaataatggcccaaggtggtatcgatgatgaagagccactccagccggtaagtacgcttaacggtgcgtccaggcatcagtcggtcactctctcgagagatgctgacaggctgaggcacatcgtgttttagcgtatcggcatagaacggacgggcatcaggattgaagctcatctctgggtcggcactcacatagacggttctgtcgagacgaggctccagatactcgatgtcgaaaccaaactgattcatatacgccctgcgggctgtctgatagagattctggtgaaactgctggatgtccgcctccttttgaggtaggagattcttttctgttgtctggttggggaatagctcccctcggcatacaatcttcacgctcttgcccgatgcccccagaaagcacatcagcgtctcaggcatcatcttcgcctgatccctcacctcaacggctttctcgtaagtcggcagattgtttacctcgatgactatcagaccgttataccccagcaccctgtgctcacccttgaacttatcaaactcctgcgcaaagcagagtcgctccagtttgataccacctgcccagttggtcagaatctgcccgtcgggctgacgttccttcaagatcagattatacatctctctcagttcggtaacggtatgctgccgccagcccttctggataaacagcgcgatatcttctacaggatgacgagtgatcgtctcatttttccctttcttcttgatgattgttactttcattgctattcaattgttgatttttgagactgcaaagatactaaatttttcgcgcttttgcaaataatttgccgaaaaaattcaaaaactaatgacatatgacataatgtttatccaaaatcgttgattatcaataaattagtttcaagaaacaagtttgacaaatgacataaaaacgacatagaaacgacatactaatgacataaataacttgtatttgttttgcgatgggccaaataagcgcccatcagggaggtatctggcggagaattcccacgttgggaacaaaacattcccacgttgggaataaagtattcccacgctgggaatgaataacgagcctaaggatagcgaataagcagcacttatcgtccaataagggacccttattgcagaataagacccccttattgcagaataagggccccttttgcccctctttatgtcattagtatgtcatcagtatgtcgtttctatgtcgtttttatgtcgtttccatgtcacttctatgtcacttctaaatttcgcaatcatctgataacaagccgaatacaacaacctttatgtcatatgtcattagtttttaagattccagccaaaaagttagaaaaataacttttgagcgtctgccctgcccccaaatagccacgaatcgcaacccattttgtaacgaatcgccacccaattagtaacgaatcgcagcccatttagtaacgaatcacacattaattcgtcataaagcgaaagaaatacctagcacctctcagatgaatagtctttcgatgattcttaataagaaattgtcaaataacgagaaaaaagtgaacgatttcctcaaaaaaagcactaaagtttttggaagataggaataatatcgtaactttgcaccactagaacccgccaagcctcctaacagtgcttaaatcggtgggtcgttttttttagttgctcctatgcgtgtgccttatttaattatcatacttcagaatgatgtgacccttccgaccctcgcataccccaatgaaaggacacgagggtcggaagggtcacatcttttctggctattcctactatatatgcgcgaatgcatgcgaggcaaaccctgtctattctcgcaaccaactattcgggctgagccccaaaaaaatccaccgttgaaggacgatggatcaggacctaatgttttcacaacggaataatccttattgtgatttgctaaaaattagtgctgcaaagataaagtttttccatgaatataccaaatgattaaaaagaaatttgtatttttgtggcagaaataattaaaaacgctaaaaatatgaagaagattcttggtcttgacttaggtacaaacagtattggatgggcaatcgttgagagagatgataataaagggagcatcataaaatctggtagcagaattatccctatggacgttgctacacttggagattttgcaagtggaaatacaaaatctcagacagctgaacgtacatcgaaacgtaccgcaagaagaatgagagagcgtttccttcttcgcagagaaagacttcatagactattacacttattggggttcctccctaagcattatgaagaaagaataggttgggatttggataatgatcgcaagcattatggaacattcgtagatggtgaagagccaaaaattgcatggataatgaatgataacaagaaatttgagtttgttttccaatcttcattccatgaaatgcttgaagatttcaagaaatatcacccagtaattatttctgataaaaaaaagataccatatgactggactttatactatcttcgccagaaagccctcactcaacccatcagcaaagaagaacttgcttggattatccttaatttcaatcaaaagcgaggctacaatcaacaacgagatgaaattctagaaacctctgacgataagaaagaggagtatatgtgcctgaccgtgagtagtgttactccagatgaaggagcaaaaggcaaagacatttggtacaatatccgttttgagaacagtgatatcatttatagaaggaaaagtaagtatcctttgaattgggttggaaagaaacgaaatatcattgtaaccaccaaactcgatgaagaaggcaatccgaaactaaagaaagatggcagcattgactatagcgtaaagtcaccaaatgataatgactgggctttattgaagattaagacagagcaagaccttaaagcgtctcatcagactgttggccagtatatctatgccgccctattggctaatccgtcagaaaaaattaggggtggacttgttaaaactattgagcgtgatttctataaggacgagttagagaagattcttcagaaacaaagcgaattccatgctgaactgaaagaccgcagtctatatgagcattgtatcaaagagctctatcgtaataatgagacccatcgcaataatattgccaagaatgacttcacctatttaatactagaagatacactgttctatcagcgacccttaaaaagcaagaagtcgcttattgacgattgtccttatgaaagccatcaaggaattgataaggaaactggcgaaatttgtacttatcctctgaagtgtattgccaaatcgaatccatatttccaagaataccgggtatggaaattcctgtccgacttacggatcattgcaaataccaaagaaatcaatggtcatatccatgcagatgtagatataaccaacgagcttttgcctgacaataaaagctggagccatttatttgcttggctaaatgacaaaggacacatcacccaaggtgacttattgacttatcttggcataaagagaaaggaacagagtaagttcagatggaattatgtagcagacaagcactatcccatgaacgccactcgccacgctatattaaataggatgaaagatagtgaggaattgagcagagatatggaacaggccatttggcacctgctttattctaccacatcaaaagctgaaattgacaaatcactatcaccatctgacaatccaaaagggatattcaaaaaactaatagagactggaatttctgtagaatcgatagaaaagattaaaaccataaagttgcccgatgaaggctatggtggctattctgaaaaagccatcaagaagctattacctttaatgagatgtggggagttctgggatgaacgtaatatacatcctgcaaccttgaaacgcatcaaggaataccagacaggaaattgcatggacgatttctcagagagagtgaaacagctcatgtcaacaatgatcgacatccattcctatcaaagactgccagaatggctggcttgctatgttgtttatggaaaacatagtgaggcgaatgatattgtgaagtggaaaactcctgatgatatcaacatctatctcaacaatttcaagcagcattcacttcgtaatcctattgtagagagtgttatcttggaaaccctacgcgttgtgagggatatatggaaacgctatggtaacatggacgagattcatattgagatgggacgtgatctgaaaaatccgagtgacaaaagagcccagattactcagcgtgtgctccaaaacgaaaacaccaacatcagaataaaaacgcttcttgctgaattcttggctgaagagtacaagatagacaatgtacgcccccactctcctagccagcaagacctgcttcgtatctatgaagaagacgttcttgctcacaacgagcctgatgaagaaattcaaaatatcatcaacaatctttcgaacccgactaaacaaccatcacgcactcaagtgcttcgatacaaatgttggctcgaccagaagtactgttctccctacacaggacagccaataccactttcaaggctctttacctctgattatgagatagagcacattatcccacaatcaagatactttgatgactctttctcaaacaaagtcatttgcgaatcggaagtcaacaagcttaaagacaatcaattgggctatgagttcatcaaacggcatcacggccagactgtccaaattgcatctggaagaatggtcagagtgttggaggtcgatcaatatgaacaattagttaaaaacatttttgcccaaaataagagaagaaaacttctgatggatgacattcctgctgaattcattcagcgacagcttaacgatagccgctatatcagtaaggtggtgaagggactgctgtctaatatcgtcagaaccactgatgaggatggtaaccttgaacgcgaggctatttctaagaatgtcattacctgtaatggttctgtcactactcgtctgaaacgcgattggggattagctgaagtatggaatgccatagtgctgccacgtttccaacgactgaacaagattacaggcagagattgctttactgctctgaattctcatcatcaggagatacccgctatgcctttggaacttcaaaagggtttcagtatcaaacgcatagaccatcgtcaccatgcccttgatgctattgtaattgcttgcactacgagggaccacgtaaacctgctaaacaacgagtctgccctcccagaaaaccaagcaaacaaacatgcgctttcgcacaagctccgtcattgcgaagaggttgtaatcaatggtaagaaacgaacagtttacaaagagtttctgatgccttggaatgcatttaagtccgatacattcaattcactacaggagattgttgttagtttcaagcagaatcttcgcgtgctaacccaggccaccaatctttatacaaaatatatggatgacgagaagaagcaacaggctcaacatagtccagaccattttgccattcgtaagtctttgcataaagacaccgtgtttggtcatgttaacctacagcgcatcactaccgttaagttgaaagatgctctcaagaacgttaatcggattgtggataagcgcctcaaaaagaagataaaggaacttgtctgcaagcattataacgagaaacaactattggtatattttaaagactatgcctacgaatggaagggatatgacttcaacaaagtaaaggttttctactataccgatgagaaagaaatgatggtagccactcgtttctgcaatgaccttgttagtgtattcagtggaaagacaaagaaacaggatattgaaaagaccatcgagcaaattacagacacaggtatacaacgtatcctcaccaactacctcaatgcaaatctagaacagatagaatatgctttctctgctgatggactggagaaaatgaatgagaatattgctacatataataacggaaaacagcataaaccaatattcaaagtacggttattccaacctaagggtaataaattccaagttggtcaaacagggaataacagtaagaagtttgttgttgctgatgcaggaacaaatctattctttgctgtatatcagacttcagatgggaacagaaagttcaaaactattccgttggaagaggttttagcaagaatgaagatgagactacatcctgtcaatgaaactgatgaagagggcaacacattactcttcagtatttctcctaatgacatggtatatcttccaacaccagacgagctttctgatgggcatattaataaagagaatattgacgcgaatagagtctatagatttgtagatagcagtgggactaccgcgaactttgttccgtcaaaaatagccaacgttatttatcatctaaagaaagatcaggcagaactattctgtcaaggcgatactatccaagatgaattaggtaaaggaagtcctcaatcaaagaatcaaaaagcaatcacaggtgaaatggtcaaagacctttgtgttccactcatagttagtcgaattggcgaaataaaaatcaaatgatcaaaaagaccctatgtttcagcaatcctgcctatctctctcacctgtgattccaagtctatgccagtaggtttaatgctgccattagttggcaacacaacccagaatgaaaggtttcgtgatcagctaaatgcatcacaaccattacgaaaacaactatggcaacaaacgatacaatacaaaattcgcaaccaagctgccattctcggcaaatgtgttaatgctgaaacaaaatgtatgcttgcttgggctaacgacgttcgcagtggagatccagataatttagaggcacgtgctgctgtttattattggaagagtctttttggccatatacctggattcattagagacagggaaggcactgcgcccaacaaccttctgaactatggttatgctattcttcgtgctgttgttgcaagatcactggtcgccagcagactactccccacattcggcatacatcatcacaatcgttataacgcttattgtttggctgatgatatcatggagccctatcgtccttatgtagaccatttggtctatgatattacagaacaatatggtgtagatgttgagttatcaaaagacatcaaggcagagttgctatcgataccaactcttgatgtagtcataggtgataaacgaagtccactgatggttgcagcatcacaaaccacagcctctctttataaatgctataacggagaattaaggaaaattgcttatcccgagatatgattggagaacgttttagtgagtatagggttatgtggctcttagtattgttcgacctacccacagagacaaagaaagatatcaaggaatacactaagttccgcaagcgtctcatccaagatggttttaccatgtttcagttttcaatttatgtgcgtcattgtgccagtatggaaaatgccgaagttcatcggaaacgagtaaaagctattttgcccgaatttggcaaagtgggtattatgtgtataactgataaacaatttggaaatattgaacttttctttggatccaagccacaaatacccaatgcaccaggtcaacaactcgagttgttttagaaaaggaggaatccattctttcatggaaacctccttttactttgcaccatttttcattttctaattatctctgcaataaactgattctcagttatttattgaaattgagctgtctatgcaggtgcaaagatactaattttttagcaaatcacaacttaatttcgcgtactgacaccagtataaaagctgtctatgcaggtgcaaagatactaattttttagcaaatcacaacatcaagccctacatgctgctgcatggcacgctgtctatgcaggtgcaaagatactaattttttagcaaatcacaaccaatccgtgtccatcttcagcatgtcgatggttgtctatgcaggtgcaaagatactaattttttagcaaatcacaacacggtggatgcagcgatttttcgcataacgttgtctatgcaggtgcaaagatactaattttttagcaaatcacaacttggtctaagtggaatgattggaagttgaagttgtctatgcaggtgcaaagatactaattttttagcaaatcacaaccctcaaagtactctcccagtggatcatcctgttgtctatgcaggtgcaaagatactaattttttagcaaatcacaactattagccagcttgaatttgttccccaggagttgtctatgcaggtgcaaagatactaattttttagcaaatcacaacacgatgtagatgatttcgggaatcagggggacagattctgttttaatctccaaataaaagagaatctgtccccttgatctgatgtgccctcatgattcgaaattgagggacaacaacatgccttcattaaaaatctccccaattatttggcgcattggcaaattatgtttatctttgcagcgagtaaagatgaatgatatgacaaaagacgaatgtatcaaactcctcaggaagtgtatgaacatacttaaagataagtatggcataacgtctttgtccctttttggttcaacggcaagaggtgaacagaaggaaggtagtgatattgatttgtttgtagatactgaaactgctaatccattcttattgatggatgccaaagagttcttagagaaagaaacgggcactcctgttgatattattcgtaaccaccagaatctgaatcctcgtttaagaaaacgcatattaaaggatggaatctttagcttctgaaacaaaaggaagccatccgctttttcattgaagagttgtcaacaaaagcttaagtttctttatctttgctgcgatgtttgaatggttccaacacatgaaatactgtatcatcctgctcgctttgttctgcggcctgaatgggtatgctcaggacgaggatgatatcgcacgctcgattaatctgacggaggtggtggtgctggctgatggcatgaccttcgaggaatacctgttgaagcaggtgctggctaatgccaaaccgctgaaggagcgaatacagacgctgagatattctgtgacgtgccagctggagaaggacatggacctgaagaagtttcctcaccgtcgtaccatcactttcgcagcccgtctggctggttatggccccatcgtttctgccctcagggagcataagcatttcggcattacgatggctgaggatgtgctcttcaacaagggaaagataacgacctcgaatgtcaggatggtggagatgaagcaggagcttacgcagaagcagatcgactcgtttctgaaacacgacggcatgatgagcactaacgtatatgacaaattctataagaaggtgcgcgagaaggtgaaggaactgcagaagaagcgcaagaggggggaggacacgggcttgagatatagcggcagctatactgacggcaagcggacttactacatcgtggagctcgacaaaatgaaggttcacattgcagacggctgttggcagatttcacgcatcagctatattgaggggcagaacaacatgtactatgaatgcaaggaaatcaagcctggcgtgttcttgctgtctcatggcaatgccaaactgttccttgacaaagaaaaatggcctaagggctatatctcgatgattatgaaatacagctatcactaaagaaaacgcactatttagctacaaacttcttcccgttgatgagataaatgcccttttggggtctgactaccctctggccttgcagattgtagatgatgctgtcagcatgaggaccgacagttagcgtctgtataccactgactgactccgacatggtctcgacggcacgatccatccacgcctttcggcgagtgagccacgagatgatgccctgtgtacgctcgctgactgtcctgcgatcctgattccacaactgattatccaattctactgatgcatcaaaggctggtgcttctgctgatgcagcataagcctccagataactgaaaagatgatcgaaaatggtgggtgacaattccttccatttggcgacataggacttgataaatgcctcatcttcaaacagataattatagaaataccagcctcctctatgagccatactccactcttcttcatcgaggaagatcatgtcaaaatcccaaagcagggcaaaagcgattttcgactgcgccgtctggtcgtacttcgccaaatagtagttggcaccagccgcatccttactccctaagatgtcgtgcagcattatccaggtcacgaacgagttcacgtcgatataatcggcataggtgccatccctcatcgcgtcctcagcctgatgaatcatcgccgtgaagtaatcctgctgttcctcgctaatctccttggcatcagggtatttgaaggtatagtgcatagagatcgactcacgcgtactttccacgtagacatcctcgttccaccaataggcatcgtattcgaagatatagcccgacttatctacattcagacggcacgacttgtttctttcgacggattcgcagagcatatacagccccttgtattcgccattcagaatcagattgacatactggtaggaaggtgtccactgcatgcccgccagttcgttcaacttgaaacctgtcttcgcgctgagactctcgtcgagaatcagcagccagtccttgtcaccgtatttctcgtcgtcgcctcgcagcagcaggtctgccttcttctgcagtttgattttgtagggcttcttcttagcccatgccgtagtatttcccctgattttcagggtgataccgctctcatctttcagatagtcgccgctgtcgaagagctgttccttgcctttagtcatcctcagtctggcaggcaccttcgtggcattcttgataccatatcccatagcccctgcaggtggtgagacgttctcgtaagtcggcatttctccatcgacagtctcaatctcgatgactgtcagacctgtgtcatacacctgttgcagactgatggcatcatcagcccttgcggcagttgctatccctacaaacaggaacagcagaacacgtctgaaaaaaagcccttttcctatcacgtgttaatcgttcagaagcttttggatctcagggaagacggtccagtcttcattgttgtggggacagagcgtctggatgcccaacgactgggctactttgacattggtctcgctatcgtcgatgaaaagggtctcctctggcaaggcatgctggccttcgagcatcatctggaatatctcaggggctggcttcatcacgccacactcatagctgagatagagtttgtcgaagaaatagctcatggggcgaccttggctatcaaacgcaggactatccgtccacatggtcataaaggggttcgtatttgaaagcagacacacctgatagcctttttcccgcagacggagaatcgtttcaagattctgctggggcacatagtctacatacccatgccaagcctcaaagcagtcctgcagcgtgatttcctttcccgtcaggcgacacatctcctcacggaactcctctttcgagatacgtcctgactctagatcggcaaatacacctttctgctgataggcgtctaaacgctggcgggcatcacggactccgatcttttcgaagcccttaatacctccttcgagactgagtgccagcactacaccccctaggtcgaatgcgatgttcttaatctgtttcacttttacaaatttgctgcaaaagtacgaataactgaggacattacaaaacaaaacctgctttattttctcagattctgcgtttcttgtcagcgaggtacatgccgatgaggatgagggcggttccgagaaggaagtagatggtgatctgttcggagagaatggcccaagcgaagaggatggtggtgacggggttgaaatagacgtagttggtggcgacgacggcacccagtttcttcagtacccaattccaggctaagaaacagagcatcgaggcgacacaacccaggaacagcaggttaagatagacggagagatcgagcgaaaagagcgctgaacttgtaaagaccgttgcctcttcgggtttccataggtaataaggtatcatggcgagcagaccatagatgaacactttacgcgtgacaaaggcggtatcgtacttcagattggcaggaatcatcagcatggagtagaacccccaacagagagccgcaccaaaggccagcgagtcgccaaggggcgaaagatggagcacgaaacggccgttgagcaccacgacggtcacacccaatgctgccatcagcgaacccagcgcctggatacgtgtcagtcgcagcgaacggaagaagagcgatatcaggaacgaagccacgaggggcgagagactgacgataagcgaggtgttagtggtcgtggtgtagttcatcgcagagttctctgtcaggaaatagagcgtacctcccgtgacgcccagagcgaacatcagcacctcgtcttgccagcatttggaaaacaacaggaacgtctttcccctacccttctgcatgatgagcgaataagcgagcaacagcacgtaggcaatgataaagcggagcgtgaaaatctgtgcaggagacagtccagccaaaagcagcatcttcgtagagacgaaggtgctgccccagatggctactaccacgaaagcgacgaggtggtatgtgacgctggaacctgtgcccagcaatggcttactgcttgatttcaatgtcgcgcttaacgttattacggatcttcgtcagataacccttcatgccctcggcatccttgttgtcgatgatctcgagcagttccttcagctctgttcggatctgggctacctggtcgtgggtataggggttgaagagtatttcctgaagcagatagtcgtcctcgttgagcacacccttggcaatacgcatgtggcgcttgaaggtggtaccaggtgcatcctgatgcttcatgacagcagcgaacacgaaggtagacacaaaggggatactcaatgagtaagccaccgtcttatcgtgctcctcgaaggtgtactcatagatgttcaggcccagcttctgatagagatccttgaagaagatgcgccccatatagtcgccctcgctgatgatgatggcattctcctcagaaagctgctgcagattggcaaacgtaggaccaaacatcgggtgagtcgatacataacgcatgcccgtactctcataaaactccttcaaatccgtcttcacagaggcgatatcgctgatgatgcactctttgggcagatagggtatcacctctttgaacacagggatagtatatttcagcgtgacagcattgatgagcaactcgggcttaaactccttgatctcctcgtaggtggtgaagcgctgacaattataggtaaagcgcatgcgcttaggatcgcgttcgaagacagccacctcgtggtcgaaactcagcaggtcgatgaagaacgatcccatctttcctgcgcccattactaatatcttcattacttctattttggggtaaattttacttattaatgatctcaatttgctgtctaacactctcttcgtggatattctcaaagacgtgggcgacgaactctggatccataccgcagagggcaccctgagctccacgcttgttcagaatctcgttgtaacgattggcctgaaggacggtcatattgtgctctttcttgtactgaccaatctcacgacaaaccttcatacgcttggcgagcagatccatcaactggttgtcgagctcgtcgatctgcttacgaagctggctgatgccctcagtagtggtcttctcatcacggatcacgagcagtgagaggatatagtcgagcacatcaggtgtcacctgctgcttggcatcgctccaagccttatccgggtcgcaatgactctcgatgatcagtccgtcgaaacccaggtccatagcctgctggcaaaggggagcaatcagttcacgacgacctccgatatgagatgggtcactgataatgggcagttctggaatacgtcgacgcagttcgatgggaatctgccacatcggggcattacggtagatcttctgctcatagctggagaaaccacgatggatagctcccagacgcttgatgccagcctgattcagacgctccaaggcaccaatccaaagttccaggtcagggttgacaggattcttcacgaacacaggcacatcgacacctttcagggagtcggcaatagcctgcatggcaaaggggttagccgaggtacgggcaccaatccagaggatatcaataccatacttcaggcacagctctacgtgctctggggtagccacctcggtagagacgagcatcttggtatcatccttcacctgtttcagccatacgagggcaggctcaccatgaccctcaaagccacctggcttagtacgaggtttccatacacctgcacggaagttgtggcagcctttcatggccaactcacgggctgtggtcatcacttgttcctcagtctcagcagagcaagggcctgcaatcacgaagggacgttcattgtcactcggtaaattcagtggtgctaattctagttccatatgtctaaatatttatttttattctttctaatgcttctttaattttctcttcttttgcacagagggagatgcggatgtaacgctcgccatttgaaccgaagatgaaacctggggtgataaagacacgagcctcgtggagtaccttttctgtcagatcctcgacattctggatgtctgcaggaatcttgccccaaaggaacatgcccacctgattcttatcgtagctacagcccagcacatccataatctgctcagcccattgacgacgacgtgcataggtattaatattgtactcacgatgccactcttcgctgttgttatatgcctcagcagcagccagttggatgccacggaaggttccactctcaatgttcgactgcactttcagaatccacttgatgaactcagcgttggtagcacaaagtccgacacgccaacctggcatattgtggctcttcgacatcgaattgaactcgatgcagcagtccttggcacctggaatctgaagaatactcagatgttcctcactgaggataaacgaataggggttatcgtttactacgacgatattgtgctccttagcaaactccaccagtcgctcgtaagtctcacgacgggctctgcctcccgtaggcatattaggatagttggtccacatcagcttcacacgtgagagatccatctgctcaagctcctcgaaatcaggctgccagccgttgtcctctctcaggttgtagttcacaatcttagcccccagaatcttcgagagcgaagtgtatgtgggataaccaggattgggcaccagcacttcgtcgcctgggttcacgaaggcgagagtgacatgcaggattccctctttcgagccaatgagtggcaggatttcactcttaccatccagatcgacatcataccaacgcttatagaagcctgccatcgcctcgcgtaattcaggtgtacccatcgtgggctgatagccgtgagcattaggctgacgagctatctcacaaagtttgttgatggtctgctcggaaggcggcatgtcaggactgccgatggcgagactgataatatccttgccctcggcattaagctgggccacttccttcagttttctactgaaatagtactcctgtactaaactaagtctgtctgctggttgtatttttgtagtcataactgtaaaccgtaaactataaactgtaaactaattcgtctgtctcccgtctttatattcccctaagatcttcaagtctttcgtcagtggaataatcgcatcaatcgactggcggtatcgcgtcagatcatcgtacatcacatcgacatagaacagatactcccactcatggccgataatcggcagcgactggatcttcgtcaggttgatgtgatagaatgagagaatggccaacacatgggagagcgaaccttcctcgtgaggcagcgagaagacgatgctcgacttattggcctccatcagagggcgcagcatatcggccttattcggattcgatactacaagaaatcgggtgaagttgtgcttgttgtcctcaatgtgatcttcaagaaccttcagaccgtagagtttggcagcctcagcgtggcaaatagcagcccaccctctcttctgaccttcggcaatcatcttcgcggaaccagcagtgtcctcagcctccacattcttcagttgtgggtgcttggccaggaactgacggcactgcatcagtgccacaggatgagagtggacttcagtaatagtctcccagtcgtcttcaggcagacagcagatgcaatgggagatgtgcaacttgtgctctccgacaatcgtggttccggagtcacggagcaactcataattgtggagcaaggagcctgcaatggtattctcgatggc

SEQ ID NO: 705 - DNA, 24542 bp, synthetic construct
  misc_feature 1..24542: note = Synthetic
  source 1..24542: mol_type = other DNA
  variation 17622: note = n is a, c, g, or t
ctctaaaattattgtctaccgcggagatattgatcatatcattggttatatccattcttccgagatgttcaagcatgtgaccagcatctcgaaacatattcagcagatgccttatgttccggagacgatggcagcacgtaaactgatgcatatcttcctgcaacagaaaaaatctctaggtgtggtgattgatgagtttggcggtactagtggtatcgtttcgctcgaagatattgtggaggagattacgggtgatattgaggatgaacacgataatcagaaatacgtggccaaacagttgtctgacggtgattacatgctttcggcacgattggaaatagaaaaggtcaacgaacttttcgacttggatctccccgaaagcgatgattatatgaccgtaggtggtctaatcctgcatgaatatcaatcgttcccgaaactcaatgaagtggtgtctgtcggtcgtttccagttcaaaatcgtcaaaaatacaatgacaaaaatcgaattggtacggctaaaagtcacggaataactaaattcccctacaaaaatttgctcaattcaaagaaaatgagtaattttgcaggccgaattgacagatgtcgattttagaaaacagaaaattattaaaaacagaataaaacaatggcagcaattggaaaaatcagaagctggggaccagtactcgcaacagtgattggtctggccctttttgcattcattgccgaagagatgttccgctcatgtgaagcaacaaacaatgagcgtcgtcaacaggtcggcgaagtgttaggtaagaaaatctcagtacaggagttccagtctcttgtcgacgagtatcaggatgtcatcaagatgactcagggtcgtgacaacctctctgaggaagaactgaatcaggtaaaggatcaggtatggcagcagtttgtcaataataccatccttgaggacgaggcttctaaacttggtctaactgttaccgacgaggaacttcagaacgtgctgaaggcaggaacgaatcccatgctcatgcagactcctttcgtgaatcaggagacgggacgtttcgacgtaacgcaactcacgaagttcctggccgactataagaaggcccagcagtcttctgaggtggcagagcagtatcagcgtatttataactattggaagttcattgagaagcagttgcgtcagaacctgctgaatacaaaatatcaggctcttctagcacagtgtcttttctcgaatcccatatcagccaaaatggcttttgaaggtcagaacgaggagagcgacattcagttggccgcacttccttattcagccatcaaggacagcgaggttgaggttagcgatgccgacctgaaagctaagtatagcgaaaagaaggaactgttcaagcagtatgttgaaagccgcgacatcaagtatgtcgatttccaggttgtagcatctgctgccgatcgcactgaactgatgaagaagatgcaggaagcaaagactcagttcgagtctggtatggcagcaacggaggttgttcgtaaagctcagtctcagcaggcttatttgggtttccccgtaagccgcacatctcttccttctgacatcgctgcaaagattgactctatgcaggttggtcaggtttctgctcccttcgagacccgtttcgacaatacccttaatgtggtgaagtatattgctaaggtgcagcagcccgactctgttgagtatcgtcagattcaagttggaggagaaacagccgaggacgctcacaagcgtgctgatagtatctttactgctttgaaggctggtgcagatttcgatgctcttgctaagaagtatggtcagaccgcagagaaacagtggctcacttcagccatgtacgagcgtatgacaaccgtcgatgctgacaccaagcagtatctcactgctctgactacactgggtgttggtgaactgaagaacattgaacttactcagggtaatattattcttcaggttaacgaccgtaagaatatggttgacaagtacgatgttgctgtggtgaagcacactatcgacttctctaaggatacttactcaaaggcttacaacaaattcagccagtatgtcagcgaaaataagactcttgaagaacttgagaaaaacgctgctaagtttggcttcaatgttcaggagcgtaaggatctttataattcagagcacaatgttgctggtctgcgttcaacccgcgatgctatgaagtggatcttcgatgccaaagctggtgaggtttctcctctctatgaatgtggtaacaacgaccacctgttggttattgctctcactaacgttcatgccgaaggatatcgtgaccttgaggatgtgaaggatgtcgtgaaggaagaagtcattcgcgacaagaagtttgcgaaggctgccgagaagcttgctggtgtcaagagcattgccgatgctagggctaggggtgctgttgttgacagcgttcgtcagattactttctctgctcctgctttcattcaggctgcaggtgcaagcgagcccgtactcagcggtgcggttgcctctctcaaggctggcgacttctgtggaacacctgttaagggtaatggtgcagcatacgtcttccaggtactctcgaagaaacagcgcgaaggcgtgaagttcgatgctaagcaacagcagactcaacttcagcagcgtgcccttcaggcagcaagccgttatatcaacgagctatactttaacgcgaacgtcaaggacaatcgctacctcttcttctaaggagaggggtctggttccgtagctcagctggatagagcaacagccttctaagctgtgggtctcgggttcgaatcccgacggaatcaccaaaacatgatttgatggaggatgaacgcattctttcacatttttgagaataagaagagtaacgtaggttggcatttgccagcctacctctttttcatactccttcttgtttcatgtggaaagaagcgccaggaaccagtggtgacaccatggggtcagataactgataccattccaaacgacaatgattttgaccttgatgatatccaacgcaatggtgagttgatagcactcacgcttacaggtcctgagacctattacgactatcatggtcgccatctgggaactcagtatatgttggctcagtgctttgccgataagattggcgtcatgctgcgtatggaggtctgccgagattctgctgagatgctgcagcgcctttccgatggtgaggcagatcttatctgctatcccatcaataaggataagaaagatgaccttggctggttggtgggttctgacaaagaggatttggaacgcgagctgaaagcgtggtatcatccgtcaatggtcgactctgtaaagaaacaagaagagttcctgctttctacgcgttcagtcaaacgtcgtgtattctctcccatgctcaatcgtgcgggaggtgtcatctctcattacgacgggttcttccagcgctacgcgtcaatcattcgttgggactggcgcctgatggctgcacagtgctatcaggaatctaccttcgatcctcaagctcgctcgtgggcgggagcttgtggcttgatgcagattatgcctggcacggccgaccatcttggcctgcctcgcggaagcatctttgacccggaacagaatattgctgccgcagccaagtatttagaagaattggatcatacctttgctgatattcctgatcgttccgaacgtactaagtttgtgctggcagcatataacggcgggcatttccacatccgcgacgcgatggctttagctcgcaagaatggcaaaaacgctcttcattggcgcgaggttgagccttatgtgttaggcctcagcaaggcagagtactacaacgaccctgtggtgaagtacggctatatgcgtggctctgagacggttgactatgttcggaaaatccatgagcgatggaatggctatcgtggcgtcaagactgttcgcagcacaacaactgttaacggcacgccccagaaagccaagcgtgaacgtaagaagaaataccagattaatgccgactaattcctgctcgctatgttcaggaaatagccaattttgtataagttaaagacccataacgaaggacgcctgctcgtcaagtgcctccgttcaatggccccgaacaattgatgccaacagcgtattggagtgtgtggcagagtctgaatgcggtccaacaagcgtgaatagccttgcagctcgtttctgaattcatagagagtacgcaagccttcttcagttttgctgacgaagtgctcattttcctcaaagatttcaaagctcatcggattatcgatgtgcaatatgggaacggaagctttttccattgctttgccaaacagcacatcctcataaccgtaactcttgaaacgctcgtcgaaaggttgctgtaacatcagcgtacgcttgatcataaaattcgcggtatgaaaatcacgatagggcgacaattgtcgctcttcgggtgtatgttggctttctgcagccttttcgtatagcgagcgcagattaccaggcttacatgcacctatcactacacctccgtcaacaatgggcgtttcctcgcatgacgcatattttcttagatagtcgtttcgacatacaaccatgtcactgtctatgaatagcaaccaagcataacgggcctgttgggccaggaaattacgaatggaagcccggcccgcatttactcctctttctatcaactggcaatggggtagggcattgatactcctgttctcttctaataccttttcttgcgtagaaccgtcgtcggcaacgagaatttcgtacgtcatacccaatgcttcagcctgctgatgcaggttgcgtaccaatgtgctacacgggtcgttgaacgtaggtatcagtatcgacagttctctcatagctgatgcaaaaatacaaaaaaatgactataaaacaaacgattgtcagaagaatttcgtatttttgcagcgaataaagtagaatagctatgaatatactgcgaaacggagtcattttctgcatatgcatgctggctgttttgttgttgtcgtgtaagggtcgtaagcacgatgctgcttactatatggagatggtcgacagcatccgcaaggcagaaaccgttaaggacatccagcaaaaggctggcatttacgataatcctgtcgatgcatggttcgatacgctggccatacatactttgcccatccagtcggcaggtagtaatctgtggcagataggacatttcgtttctgtgcctatgaccatcaacgaatactttggctatcccgtcagcgcccacctgaaggccttggctcttcccaaagcctatcgtcgccccgttttcatggtggcagaaatggttgactccatcacaccgcggctctatctctatacgatggattcccgtcatcagcccatcgaccaactgtgcatctatgaacagaaggacgaagatcgtgaggatgatttcggacagactgctatggaatattatatcacgagtcaatacgagattacgcttatcatttactaccagtcacacgaccgtgagcgtaagcccgaactggtcaactcccgtcgctttatcatcaatcgcgacggtatgttcgaggagacgattatcgaattatagtagttttgccagcctactgcgcaactgctccgcctcgcttttgcggatgctcaacactatttcgcatgtgttttcaaaggtctggctgacgatgcgcggattcatgtccttcacgatgcgcatcacatcgttcatctggggataggcgaagctgtacttcacgatttcctctatctgacgcgtttctacgttggcgtgggcaatggcatcggaagcggcctcgcggtaagccacgataagcccgctggttcccaagttcactccgccataataacgcaccacgacaatcaggatatttgtcagctcgttgctgttaatctgaccgagaataggtctccctgctgttgacgagggttctccgtcgtcgttggcgcgaaagtcctcgcgtgcggcacccagcatataagcgtagcacacatgccgtgcgtcgtagtatttcttgcgatattgggcaagcaggtctttcacctcgtcgagggtatccacatgatgggcaaaagcgaggaacttactccgcttttcggtgtaatatccctcgcttttgcctgatatggttttgtattcgtcggtcatgggtatctagtaagactagttgtactagtaacactagttatactagcttgtgaatgactagtcctgagcgcagcttcggctcaaaccacgtagcctttggcggcatgatttttccgctgtcggcgatgtccataatctgctgcatcgagacgggatagagtgccagtgcggcacgcatctcgcccgagtccacacggcgcttcagttcgcccagtccgcgaagaccgcccacgaagtcgatacgctgtgaagagcgcaggtcgccgatgttcaggatctcatcgaggatcagacggctggagatgtctacgtcaagcacgccgatgggatcgttgttgtcgtaggtaccctccttggccttcaggctgaaccaatgttggtcgagatacagcgagaactcatggagttgctggggcttataaatctcggttcccttgtcctccacgtcaaagttcttgcgcagggcatccaggaactgctcgcttgtcagtccgttcaggtccttcaccacgcgattgtagtcgaggatggtcaactgtgaagcctggaagcacactgccataaagaagttgtactcctcgtcgcccttgtgattgggattctgcttctgcttttctgcacctaccagggcggcggcagccgaacggtggtgtccgtcagcgatatacatcgatggcatcttggcaaactcgtcggtaatggtctgcgtgtccttttcgtcgtcaatcacccagaactgatgacggaaaccgtcgatgggggcaatgaagtcatactcaggcttggtagctgcgtagcgcataatcagttcgttgagcacagcattgtcgggataggcaaagaacacgggctcgatgttggcgttgttcacgcggacgtgcttcatgcggtcctcttccttgtcgcgacgcgtcagctcgtgcttcttgatgcgacctgccatatagtcgtcggtatgggcacaaaccaccaggccatactgcgtcttgccgttcatggtctgtgcatatatataataatgttcgcgcgaatcctgaaccagccagcccttgtcctggaacttctggaagttctcggcagccttcttgtagacacgaggatcgtactccgatgtgcctacggggaagtcaatctcaggcttgatgatgtgatacagactcttttcgttgtcgccggcctcggcacgtgcctcttcactgtcgagcacgtcgtaggggcggctttccacctgctccaccagttccttcggtgggcggattcctttaaatggttttacgattgccataatgttatttcgttatttcgatttatcgatattacgatgttacaagtattgcttgattttctcaatcatctctgcatactcggcatccgagagatacaccttgccggggttcatctggaacgtgccgccatagtcgggaccgtcgacgtatttcggagccaggtggaaatgcaagtgtgagagcttgtcgctataggcaccgtagttgattttctcgggattgaaggccttctgcatggcacgggtcacgcgggccacatcagccataaaggcattgcggtcctcgtcgctcagctcgttcaaatcgttcacatggtccttgtaggccacaaggcaacgaccgtgataggtttgctccttgaataaaaacgcacgagacacggacagctcgcagatttcaatcatcagatcgtgaagtgtctgattgttagtgcagtacaggcactgcttagggtcactttgcataatagattacttttgttttgtttttaatgccgcgaaggtacgaaaaagcgagcgaaataccaaagaaaattgagccttttcgcaaagaaaggcatttttattgaatgtttcttgcctttcgctgaaaatatttgcttacgtaacgcatacttcgtacctttgcatcagaaatcaaacaaacaaaaattgttttagattcatacgatataggttagtagtttttttcatggtaaacagattgattcagaatcattggggctcgtcgtgatggcgggccccaatgattttcatccctcccgagttgtttcttccaatttttctttttccacccgtttttgcagactcgggagtctgcacgtgttacctcgaggaccctgcacgtgttacctcgaggaccctgcacgtgttacctcgaggggtttgtaaatacaacctcgaaggcctgttattcattttcttctcgtttcgcaggtgaaaagaggtgtataacaacataaaacaattaaaatttgccgaaaaaaacgcagaatttggctttgttctaagaaattttgcgtacttttgcaaaaaatacagctcacaatgaacatcgtttgctaaatttttcttatctttgccgacaaagaagtaataatatgagtagcagagagtgtttaagaagaatgtccaaaatcctgttttgggatattgatatggatgaggcagatatggataagtatcctgctcatttcatccagcgcgtccttgaatatggcactatggacgactggcggctcctgcgttcctattatggcctgcctaagatagtggaagagtgcaagcagttgcgtacgcttgatcctgtctgcctttcatacatctgtgccatttctcatacaaaacctgaagaataccgatgctatcatttcagacagtcgaaccccacactttggaactcttaagaagtctgatggctctgccgttgtcgtcagaaacgcgacttgtaggcggcacttcgctcgcattgcaatatggacatcgtaattctgtggacttagatttctttggcagtcttgatgatgatcttcttgcttttcgtgactgtttggaaagcataagccaagtcaacgtcattaaagagaccaagtccataagaatctataatattgatggggtgaagattgattttgttgattattcccgatacccttggttggcagacgctgttgaagaagatggtttaagactggcttcccctaaagatattgcggctatgaagataaatgcaatagagggtcgtggtacacgcaaggactttgtagatatctatttcctattacagcattattcactaaacgagatacttggcttttatcaggaaaagtatccggaacatagcatgtttagagcattgatgagcctttcctattttgacgatgcagaaaaacagatgatgcccaagatgtttgcctctgtctcttgggatgagatgaaagcctacattattaaagaggtggagaaaatcagttagttgttccttccaatttttctttttccacccgtttttgcagactcgggagtctgcacgtgttgtctcgaggagtctgcacgtgcaacctcgaggactctgcacgtgcaacctcggaggcatgttattacagactgcctccctatgcatttaacgtagaaagggcggctctctgatttccgaaagtggatcactgagattgcgaagccacactttgtaccttcaggtcaaagaagccacacttcgatctttagtcgaagaaccttcccgacttttcctttgcaatcttcagacctgtccccgtgagtaaaaaagtccaccgttgaggacgatggactggaacctaatgttttcacaacggaataatccttattgtgatttgctaaaaattagtgctgcaaagataaagtttttctatgaaagtaccaaatatttcaaaagaaatttgtacttttgtggcataataacttaaaatgctataaatatgaagaagattcttggtttggatttaggtacaaacagtataggttgggctatcgttgaaagaaaagacaatgacgggcgaatcatcaaatctggtagtagaattatccctatggatgctgcaactcttggtgatttcgcaagtggaaacacaaagtctcaaactgcagagcgtaccgcaaaacgttcagccagaagaatgagagagcgtttcctcctgcgtagagaaaggctccaccgtcttttacatattctaggctttcttccgaaacactatgaagaaaaaataggttgggatttggataatgatagtaagcattatggcaccttcctcgaaaatgaagagcctaaaatagcatggatgagaaacgaggaaaagaaatatgagttcatatttcaatcttcattccatgatatgctggaagatttcaagaagtatcacccagacattctttctgacgacaaaaagattccatacgattggacgctatattatttgcgtcaaaaggcgttgagtcaaccaattggcaaggaagaacttgcttggattattcttaacttcaatcagaagcgaggctataatcaacaacgagatgaaatccttgatgtttctgatgataagaaagaggaattcatgagcctgactgtcagcagcgttaccccagatgaagacgctaagggcaaagatatatggtacaatatccgctttgagaacagcaacattgtctatagaagaaaaagtaagtatccattgaattgggtcggaaagaaacgtaatataatcgttacaactaagcttgatgaagatggtaatccgaaaataaagaaagacggtagcattgattacagtgttaaatcgcctaatgacgatgattgggctctgttgaaaatcaagacagagcaagaacttaaggcttctcgtcagactgttggccagtttatctattcagctctgctggctaacccctcagaaaaaatcagaggtggtatagttagaaccattgaacgtgacttctataaagacgaactggaaaagattttaaagaaacaaagtgaatttcgtgctgagttacaagatcgctgtctctatgagcaatgcatcaatgaactctatcgcaataacgaagctcacagaaataatattgccaaaaatgattttaccttcttaatattagaagatgttttgttctatcagcgtcctcttaaaagtaagaaatcacttattgataactgtccttacgaaagtcatcagggcattgataaagaaacaggagaaatatgcacatatccattaaaatgtatagccaaatcgaatccatatttccaggaataccgcgtatggaaattcttgtcagatctacgcattatagccaatacaaaggagattaatggtcacatccataccgatgttgatataactagtgaattattacctgacaacgatagttggagcaatttgtttatttggctaaataacaaaggacacatcactcaaagtgacttgttggcttatttgggtattaagaagaaagaacaaagcaagtacagatggaatttcgttgcagacaagcattatcctatgaatgcgacacgacatgccatcttgaacagaataaaagatgatgaagcgttgagcagagaacaggaacaggctatttggcatttactctattcaacaacatcaaaagctgagattgacaaatctctttcgccatctgataatcccagcaacatttatgctaaacttattaaagcggggttttctcaggaatctattgagaaaattaaaactataaaactaccagacgaaggttatggtgcctattcagaaaaggcaatcaagaaattgttgccattgatgcgctgtggtaagctgtggaatgaaaaaggcattcatccctctaccttacaacggattgaagctttctcagaaaagggaggcatggatactttttctgagaacgtgaaacagcgcttgttttctatgaatataattgattctttccaaagattgccagaatggctagcttgctatgtagtttatggaaaacatagtgaagccaatgacattgtgaaatggaaatcgccagacgatataaatatctatctcaacaactttaaacagcattcacttcgtaaccccatcgtcgagagtgtaattttggaaaccctacgagtagtcagggatttgtggaaacgatatggagacattgacgaaatccacattgagatgggtcgtgaattgaagaatccaagtgacaaaagagcacaaatcactcaacgggttcttcaaaatgaaaacaccaacttaagaataaaaacacttcttgcagaattcttggctgaagagtacaagattgataatgtaaagcctcattctcccagtcaacaagatttgcttcgaatttacgaagaagacgttttggcacacaacgaacctgatgatgagataaaagacatcattaatggtttgtcgaatcccaccaaacagccaacacgtactcaggtacttcgatacaaatgttggctcgaccagaaatattgctcaccttatactgggcagccaatacctctctctcgcctattcacttctgattatgagattgaacatatcattcctcaatcaagatattttgacgactctttctcaaacaaagtcatctgtgagtcagaagtcaacaaacttaaagataatcagctgggctatgagtttatcaaacagcatcatggtcaaacagttcaattggcttcagggaaaatggttagagtcctggatgtcgaacattatgaacaactggtaaaagacaatttcgctcaaagcaagagaaggaaacttttgatggatgatattcctgctgaattcatacaacgccaactcaacgacagccggtatataagtaaggtagtaaaaactctgctttcaaacatagttagaacgactgatgaggatggtaatctcgaacgcgaagcaatttcaaagaatgtcattacatgtaatggttctgttaccacaaaactaaagcgagattggggacttggcgaggtttggaattacataatccttccacgcttccaacgcctcaacgaattgactggccgaaattgctttaccactttcaatactcatggaaatgagattcctgctatgccacttgagttacagaaagggtttagctttaaacgtatagaccatcgtcatcatgcattggacgctatcgttatagcatgtacgacaagagagcatgttaatctgctaaacaacgaagctgcacttcctgagcatcaggaaatgaaacatgcactttctcataaactacgcagatgtgaagaaatcgttatcaatggaaagaagcgcaagatattcaaagaattcatcatgccttgggcatcattcaagaatgacacccttttatcactccagcaaattgtggtaagtttcaagcagaatcttcgtgttctgaatcaggccacgaacctatatacaaagtacgagaatggacagaaaacactatcagcccaacatagttccgaccactttgctattcgtaaatctttgcataaagacacagtgtttggacatgtcaaccttcaacgtaagaccaccatcaagttaaaggatgcactgaaatatgtcaatcgcatagtagacaaacgcctcaagcaaaagattaaagagctacgggcaaagcactataatgacaagcaactgcttgtctacttcaaagactatgcctacgaatggaaaggatatgatttcaacaaagtaaatgtattctattttactgacgaaaaagaaccaatggttgctacgagattctgtaatgacctcgttagcatatttagcggaaaaacaaagaaacaagatgtggaaaaagtcattgcccaaattacggatacgggaattcagaagattctcaccaattatctgaacgagaactttgataatatagaatatgctttctccgcagaaggcttggaacagatgaacgaaaatatcatccattataatgacggtaaacaacataagcctatctataaagttagattaaccgaaacattgggtcaaaaattccaaataggattaagtggtaacaaaacggcgaaatatgttgaggcagcaaaaggtacaaacctctatttcgcagtatatcagagcgaagaaggctctcgtgcatatacctctattccgctcaatattgtaatcgaaagattaaaacaacacttatctccagtaccagagcgtaacgataaaggacataatctactattttatctttcgcctggagatttggtttatgttccaactcttgacgaattaaccacgccatgttctaatgaaataaaacctgaccgaatttacaaattggttagttgtacatcatatgtagcagattttattccagcctatatagcatctccaattataactacaacagaattaggatccaacaacaaatcccaaagagcatggacaggagaaatgattaaagacatatgcaaactattatccatcagtcgcataggtgaaattaaaatcaaatgattaaaaagacgctttgttttagtaatcctgcatacctcgcaatgaggaatgcccagttagtgattaaactgccagaggtagagaaggctgataacctcactgaggacttcaaaaagacgactgaggtaactaggcctatagaagatattggtgtggtggtactcgacaacaaacagatcaccatcacacaaggggcattagaagctctgcttgaaaacaactgcgctgttattacttgcgattcaaatcacctgccagtagggctgctcctgcccttagtgggcaatacgacccaaaacgagcgattccgtgatcagctggatgcctcgcagccgcttcgcaagcaactgtggcaacaaaccatgcaatacaagatacgcaatcaggcagctgtacttagcaaatgctctaacgcagagacaaaatgtatgcaggtatgggctaatgatgtgcgtagtggtgacccagacaattacgaggcccgtgctgctgtttattattggaaaagtttgtttgggcatattcctggtttcatcagagaccgtgaaggtgttgcgcctaacaatctactgaattatggctatgctattctacgtgccgttattgctcgttctttagttgcaagtggccttcttcctacccttggcatccatcatcataatcgctacaacgcctattgtcttgcagacgacatcatggagccatatcgtccatacgtagatcgtttggtttatgacattacagaacagtatggagtagatgtcgaattatctaaagacatcaaggccgaacttctttctatccccaccctcgatgttgtaattggaggaaaacgaagcccgctaatggttgccgcaacacaaacaacagcctctctctacaaatgctttagtggagaactcaggaaaatcgcttatccagaaatgacgtaaggagatgattgcagaacgatttagcgaatacagggttatgtggcttttggttcttttcgatttgccaacggagacaaaaaaggataaaaaggaatatacaaaatttcgaaagcgtctcattgaagatggctttaccatgttccagttttccatttatgtccgtcattgtgccagtatggaaaatgctgaagtacatcgcaaaagggtaaagtctatgttgccagaatttggtaaggttggtattatgtgcatcactgacaaacaatttggaaatattgaactattctttggcactatacctcaattacctaatgctccaggtcagcaacttgaattgttttagattatttattgctggttagaaatatttaagtctttaaagagcctttaagttagacatagtaagattggagggcaagtattagaaaaggtgaattccactatttcaatggagtccaccttcttaaacaaggctttttttcttttctaattttcttcgcaactatctggcattcaaagatttcccccaatcgagatgtttatgcctctgcaaagatactaattttttagcaaatcacaacctctgctccaaaatcttcatcagcttatcggatgtttatgcctctgcaaagatactaattttttagcaaatcacaacgtcggacaatggtcggagttacgtcggagggatgtttatgcctctgcaaagatactaattttttagcaaatcacaactgttgtgctgttgctcaaactctgcctgttgatgtttatgcctctgcaaagatactaattttttagcaaatcacaacggcatgggggcaaagccaccataaacaccgatgtttatgcctctgcaaagatactaattttttagcaaatcacaacaggttggcaacaatacatttgttgcagaaggatgtttatgcctctgcaaagatactaattttttagcaaatcacaacaattggttgcaaggtctgagcgttgacggtgatgtttatgcctctgcaaagatactaattttttagcaaatcacaactgtgcgcgagctttctcattgccaccctcggatgtttatgcctctgcaaagatactaattttttagcaaatcacaactcgtgtacaaagacggagtatatcacggttgatgtttatgcctctgcaaagatactaattttttagcaaatcacaacggacctaagcggtaagtctatcaacgaccgatgtttatgcctctgcaaagatactaattttttagcaaatcacaactcgttttccgctagggtgttttgtgattttgatgtttatgcctctgcaaagatactaattttttagcaaatcacaactaatggcgatgttataccagcgcggccagtgatgtttatgcctctgcaaagatactaattttttagcaaatcacaactatagcagtcggaaaaataggaaccgtcggatgtttatgcctctgcaaagatactaattttttagcaaatcacaacgcgctcgtttgaacttggattatttccgagatgtttatgcctctgcaaagatactaattttttagcaaatcacaactactcctcaaaaaattattgcgcgctttgcgatgtttatgcctctgcaaagatactaattttttagcaaatcacaactattgatgaacatcgtcaaaagttacatagatgtttatgcctctgcaaagatactaattttttagcaaatcacaactaagtcaacgttagggagaaagttaatgagatgtttatgcctctgcaaagatactaataactttgaaaagaaatactcttttagtgagaaaaactgcaaaaaagagtcgaatatttggaagttgacgaaataattcctaactttgcggcgttagaaatgactatccggtaagtttccgcgtgggagcaagacttaatcgacactactccaatcttatataagagtcactctaggtggctcttttactattttgtgtagcggcgaataaaagtgcggaagaaattatcacctttacgcatttctataacctcttcatattttttcgtgcgaaaatgccaaaagtgtcactttttggcttaacgtgctaaatattagtttattacaaaggtgacacttttcctaaaagtatcacctacnccatcaccacagcaaaacaacttgttttggtgggaaagaaacggcactttacgatgaaagaaaggccttctacgataccaaaacaagttgttttggtgtcggaagcaatattgtcttcattacaactagggaggaaaagggggagaagtgccgtagataccaaaaaaaaacgcagaaatgcaagcgttttggcgtaatttatttgcattttcactcacttattcgtaactttgcaggctgtaatataataaggtaagatgatttctgtagaaggactgcgtgtagagtttggtgtgaagccgttgtttgcgaacgccagtttcgtaatcaacgaccgcgaccgtattgccttggtgggcaagaacggtgcgggaaaatcgactctgctcaaaatactttgcgggcagcaacagccgacagccggtgtggtgagtgtgcccaacgatgcaaccatcggttatctgccgcaggtgatgaacctgcaggacacgatgacggtgcgcgaagagacccagaaggcctttgccgacatcaagcagatggcccagcgcatagagcgcatgaaccagcagctggccgaacgctcggactacgagagcgaggagtatatggcgctggtggaacggtttacgcaggagcatgaccgctaccagatgatgggcgcggacggctatgaggccgagatagagcgcacgctgattggactgggatttgagagaagtgatctggatcgccaaacgcgggaattctcaggcggttggcgcatgcgtatcgaactggcgaaaattctgctgcgaaagcccgacgtgctgttgctggacgagcctacgaaccatctggacattgagtcgatacaatggctggaacagtatctggccaacacggcgaaggccgttgtgctggtaagtcacgaccgtgcattcatcaataacgtgtcgaatcggacgatggagatatcgtgcggtcagattacggactacaaggtgaagtacgatgaatatgtggtgctgcgcaaggagcgtcgcgaacagcagctgagggcctacgagaaccagcagaaggagatagccgagatgaaggacttcattgagcgtttccgctataaggccacgaaggccgttcaggtgcagcagaaggtgaagcagctggaaaaaatcgtgcccatcgaggtggaccaggtggacaattccgccatgcatctgaagttcccgccctgtctgcgaagcggcgactatcccgtcatctgcgacgaggtggcaaagaattatggcgaacacaatgtgttcgcaaaggtaaacatgaccatcaagcgtggcgagaaggtagcctttgtgggcaagaacggcgagggtaagtcgacgctcgtgaagtgcatcatgggcgagattccgtttgacggcagcctgaagataggccataacgtgcagataggctattttgcccagaaccaggcacagctgttggacgaatcgctgaccgtgttccagacaatagacaatgtggcaaaaggcgaagtgcgcctgaaaatcaacgacatactgggtgcctttatgtttggcggtgaagcggcggacaagaaggtgaaagtgctgagcggcggtgagcgcagtcgtctggcaatgattcgcctgctgttggaacccgtgaacctgctgattttggacgagcctacgaaccatctggatatggcgtcgaaggatgtgctgaaggaagccatcaaggtttttgacggtacggccatcgtggtgagtcacgaccgtgagttcctggacggcctagtgacgaaggtttatgagttcggtggcggcaaggtgcgcgagcatttgggcggcatctacgacttcctgcgtacgaagaagatctctgagctgagcgagttgcaggggggaagcgctagcagcactagcagctctagtgggactagtagggctagtgagactagtgagacgagtgttcctagcagcggcgcacagagctacgctgagcgcaaggagcagcagaagcgggtgcgcaaggctgagaaggctgtagaggagtcggaacggaagatcagcgatatggaacgcaggctgaaggagttggacgacctgctgatgaagcccgaaaatgcgtcggacatggagttggtgacagagtacacgtccacgaagaaagcccttgacgaagaggtggaacgatgggagaaactgtcggaagagctggatactttgaacatataacaattaacattatataaaaaaggtatgaaaaaattattgattatgatggcattagcatcgatgacaatgtcgggtagtgcgcagcagttgcggtcgggtattaatatggccgatctggacaccagcgtgcgtcctgccgatgacttctatgagtatgcctgcggcggatggatgaaagccaatccgctgcctgctgcctattcacgttatggcagtttcgaccgtttggccgaggacaacaacaagcgtatcaacggaatcctgaaagagttgctggagaacagctacgaggagggtaccatcgagcagaaactgagcgacctgtataagctggctatggattcagtccgtcgcgaacaggaaggactcactcccgttatgccccttatcaagcgcttggaggctgcgaagacaaaggagcagctgtttgccattcagcttgacatggctccctacggtgagcaggagttcttcggcgcctatatcggtgctgacgagaagaacgccacggagaatattgtcaacatcatgcagagcggactgactctgggacagaaagactactatctggagaatgacgaggcaacgaccaagatccgtgaggcctacaagaagcacatcgtccgcatgttccagctcttcggtttcaagaagggtgctgccgagcagaagatgaagaacatcatgaaggtggagaccgctttggccaaggtttctaagtctcgtacggaactgcgtaatccgcaggccaactacaacaagatgacgctggacgagttcaatgccaagtatccccacttccagctgtcgaagcaggccgaggccatgggactgaggctggagtatctgaaggaactcgtggtcggacagcccgaattcatggctgccgccgacaagctcttcgctacgatgaagcccgcagaatatcgtgacgtgatggagtggggcgttatcaacggctctacgggagtcttgaacgatgctgtccgcgccgctaacttcgacttttacggcaaggtgttctcaggccgtaaagaggatcacccgttgtggcgccgtgccaccaaccaggtgcaaggcgtgatgggcgaagcactgggccgtatctatgtcaaaaagtatttccctgcttcttcgaaggagcgtatgaagacgttggtagagaacctgcgcattgccttgggcgagcgtattgccgcacaggactggatggacgattcgacgaaggtgaacgcactgctgaagctgaacagcttctacgtgaagattggttatcccgaccgctggaccgacctgtctggcttgaagattgattcgaaaaaatcttactacgagaatatgaaggaatgctcgcgtttctggctgaattggcagatagagcacaaggccggcaaacccgtcgaccgcgacgactggcacatgactccgcagacggtgaatgcatactataaccctaccacgaacgaaatctgcttccccgctggtattctgcaagttccgttctttgacccgaccgcagacgatgcctttaactatggtgctatcggtgtggtaatcggtcatgaaatgacgcacggtttcgacgaccagggacgtcagtacgacaaggatggaaatatgcatgactggtggaaggtagctgacggaaaaaactttactgaacgtacagacaagtatgccgagttcttctcgaatatcaaggtgcttcccgacctgaatgccaatggtcgtctgaccctgggtgagaatctggctgaccacggtggcttgcaggtggcgtggtatgcctacaagaatgccaccaagcgcaatccgttgcccgtgattgacggaatgaccgccgaccagcgtttcttcctggcttatgctggagtttgggcaggtaacgtgacagaagccgagatccgaaatcgcaccaagagtgacccccattcgctgggtcgttggcgtgtcaatggtgccctgccgcatatcgatatgtggtatgatgcctttggagtgaaggaaggcgacaaaatgttcatcccgaaggctgaacgcctgtctttgtggtaatatttttctgccaaaaagcataaaatgccgtcgtaaatgtaaatttacggcggtttttttgttggttttaaaaaaaattagtaactttgccacaattattactacgtgtgtatgatgaacgaaagaaatgacatagagagtacgcaacggaccgcacggccgcaaacgttgcaaagagagatggaaatgccgcgtgaagaccagcctgtaatgatgcaacagcagcaacagcaggcggcaggtaaggcttgtccttattgcggtgccattaatgagcctgaggctatgttttgtgcccaatgtggccagcccatcagtaaaacaacctgtccgcactgtggcgccgagatggacccggatgcagatttctgcgaggtgtgccatcattatacccgtaaagacgtctgctcctattgcggcgcccgtctgtcaggcaacgaggcctattgtccggaatgcggcagtccgcgcggtggtattgtctgtccgacgtgtcacactttgaacgatttcgctttctgcaagaagtgtggtacggcgctgacggaagaagccaagatgctggtgaaggagttgcagcacaatcccgactaccaggaactggtggatatcgtacaggacttctcaaagttggaaaatgcattaccctataataccgagcgcgacatattacgtgagcaggccaacaataagttgcgtgagcgtgtattgactcttctggccaaggacgaaggcgtggagaatcctgtgattcccaagcccgaaacgaagcgtatgaccaaggaagaactggaggaacagaaagccgtgaagattaagatgctgtcggctatcctcgacaaactggccgtaccgccttgtccctcaccggctaaggcccgtaattatgcgatggccagcaaacctgtaggtgtgcgtctggcgtgggtatgcaactacaagcatgccatgcacagcagtccttgtggttgtgccaagccccagatgggtggaaagtgggtagtgttaggaagtaatagtaacgtggaaataaaagacgacaaataacttatggacgacaagaccgtacagggtttacaacctgctgctgctaacgatgcaactgcccaaacgatgaaaacggtacgtgcggatggtagccagcaggcttcaaatggtgacatgaccatccgtccgggttcgaatacccagaaacagtcgggtggagaagttgaatttttgctcaaaggcaggttatataagagcatcaaatgcttgagcgacaactcgggtgaagctcaggtctttttggtggaaggcgaagagggacagcgtgtgctgaaaatctactatcccaactttaccatcaagaagacgctgatgcgtatcattcagaatatcaacatggagatgattgtcaggattgacgattacggcaagacttatgtggacggtaagaaccgtgactacgagctgatggaatatcttcatggcggtacgctcaataactatgatttggacggtgacttcaaccagttccgccgtattgctctgcaggccgcagcagctttggcctattgccataactataacatcatacacaaagacattaagcccggcaacttttttttccgcgagaccgatcataaggaaattgtgttgggcgatttcggtatctccagcgtgctggagggtgacgagaaggtacaccgtacaacgcaggcccgcacaccggtgtatgctgctcccgagatgtataatgacgtcattgacggcgaggtggagattactcctgctgttgacttctattcacttggtatcacactgatgacgctatggttgggtgagaatccgctcagtcataacgagcgtgtgatgatgcgcaagaaaaatgaaggccgtctgccccgcataaatgaattgcccgaccgcgtaaggatgattgtgcagggtctgacttcggtgaatccgacgacccgctgggggtatgacgaggtagagcgttggttcctgggtgaggatgtgaagattgacttgtcttcgccgattctgaaatatcgcagtttcattgttgatccggaacgtaaccttgtggccgataatgtacacgagctgatacctttgttgctggataacgaacgtctggctatcaattacctttataacggacgcatttccggttggctggagcaatgtggtaatgtgaaattgagctctgccgtcaaggatatcgtcgtcaatcgctatcccgttgaccagcatgccggactgatggctgccgtctatgtgatggaaccgacctatccttataaagatttgcgcgggaacttatgtgacgatgtgcatagtgcggccatctccgtcttgagctatcaggaggaatacaagattgcattggcgaatccgaatgacacgctctatctgtatctggaatcacattccaaggcagatgtgaaccgactccgtagctattttgccgaagacagcaatatcgacacccgcgtggctattctaaggttcgtctatgaggttgatcacgacatcccgttcctggtgaatcgtccttcctcgaatctggcggatatcgtacattccttcggttatgaagattgtacggacgacgaatggctcagtctgagtgacggccgtctgttgtcgtggatgtat

SEQ ID NO: 706 - DNA, 18204 bp, synthetic construct
  source 1..18204: mol_type = other DNA
  misc_feature 1..18204: note = Synthetic
ggtatggtgcttttgctgccattccaacctttattcccggccgacacattctccaatgccacacttcaagcgccttcttgctttaaggcagacggcacggttatgaatgtagacagcgtcaatatcgacaccatggtgtccgacagccaggcgggcaacgagaacagctccaagaaggtgtgcattctcgcagctggtcagagcaacatcgacggaagaaaccccttcgccgaactgccctcctatgtggtgaatcccaacccagctatacgtttttcgtggaacaagatcaacggtgtattttccgatttcgccatcacggatggcggtcacggcagagattgggctttcgacgccatcgtctacaatgcacttgtagatgccaaccacggagcacaggacaccatctatgtcatcaagcgcagttatagcggctcatccatcgacccggaaggagccaccgactatcattggacaacggattatgagcagttgccctccgaaagatattccttgctgcggctctttgagcggggcatcagagcggccatcgagagagacggcgacaagtttgatgtcaaggcgattatctggcatcagggttgtggagacgccaatgtgtcgctcgaggtggctgaaagataccagaacaatctgcgcgatgtggtggcctacatgaggaatatagtcggcaaacctgagctgccgttcatttgcggcagcatcagcgagaacaatcatgtctgcagatggcgcgacatcgtcaatcaagccatttggaaccttactgccgaggacgacaacttctactgcatcgacatgagcggggcaacactcttggatgcctatcatttcgattccgccagctcggagtatttcggccaaaaggtctatgacctgctcgtcgaccttggtgtggcaagcggaggagtcaagtacaatcctgtctgtccctgggatgagaatggagtttccgctgccaagcagtctggccatgttgtccccggtgccatctacacgcttctaggcacgcaggtgagcaggaatgccgcctcagcccagcgacaaaagggcgtctacatcatcgacggcaagaaagtggtggtaaagtagtgaggcattatctctacaaagaacctgtcccctgtgagcttaataaagcgacaaacacaaaaaacatacaaaactgcgctatgaaaaagatttatattacttttttctttctgttttgcgtaattatcgccaatgctcagaaagatgtgactaaatttcttggaatacctgtggacgggagcaagtctgagatgagaagaaaacttatctcgaaaggattcacgcctaagacagtctttggcgaagaacaccttgagggggaatttaatggcacagatgtctacataatgatagggaccaataacaataaggtatggcggatagtagtggttgatcagaattcaatggacgaaaaagacatcaaaaaccgttttaacagactggtgagtcagtttgagaacaatgaacgttatattacccctaatgattttacaataccagaagaggaaaatatcaagttcaggttttactataaaacctatgaagcagtattctatcaaaaaccagatgaaactaaaatagacactgccgctattcgtaaaaaaattgagaaagaattactcagcaaatactcagaagaagaattagagaacccttcagaagagaaaaagcaggaaatacagcaggatttcatccaatcctttcaagatttgtttatcaataagcctgtatggttccgaatcgaagaagaaaaaatatccggtaagtattacatcatgatgttttacgacaacgaatacaaccatgcaaacggggaagatttataatccccgtttttatttttctggtttgggtagcctgaactgtatgggtaaattgtactttacacggacctcgacaccattttgacggccgggattccagagcggcatttcatagcatactcttacggcttctgcatccatagagggatggatacctcttatcacctgcacattgctcaaggtgccgtctggctcaacgacgaatgaaacgacaactcttccctgaacacatgcatccaatgcttcagccggatacttgatatggctttccaaccatttcatcaatgctccgttacccccagggaatgagggctgctgctccacaacatcatatatcttgatttgtctttcaggagtattattgtcagcaaattcctcatgagagttcaactctatttccactttcaaacttctttctgcattgagaatctttttatcatctctatgagtgacctgtccgaaagccgtctgcgcagctattagggagaataggaataatataatggtcttcatcatatttttattaaagggcgcttcgtatgccgttgcaaaaatagtgattttgtttggataaccgtggctttgggggtgataaaaacggacatttcattcctcacccggcagttgctcattttcggtaagcagctgcagcagttctatatcgatcatggagagatgaaagagcgtatctttcgcccggtgccgctcaaagaagccgaaatgcttcgactgctccaatacgtcattaatacactgatgcgccttttctatctggctgtacatccactcctcattttttgttttctgcggcataatggtaattgctttggttttctttttccgcgaagataaggcatcggtgcggtaacaccgaatgtattaactttatttccgcttttcgcgcatttgttaagatggaagaagaaaaagtccctacttgtgccgcgttatgagacaagaatgggctattttcgcagaaaaatcaacaagcaacagatagttatttcatgtaataatcgaaatcatactagaacctataatcaattaaagaaaggagaaaaattatggcactttatgtagataaggagacggggcacgtcttgtcgaagagccctcaggcaacgctgagaatggatcaagtggaggcgaatgcagggatgctcctgatggccgacctcataggtacagatcttctgcatcttaaagaggattttgaagcgctgccgatagagagacgggaagaactgatggacgaaatggaagaggagatggcccactggagtcagggtatactggacttcgcagtgagcatgggcctacgcaacgggaaagaactgataccagtgaaggagtggctggagagtcaggaagagacacctgctacagatgaggaggccgaagctctttatctggatgaatatgctggaaactggtacgacttgcaggctgatgtgaatcctccggagtgggactgaggtctttagaggtcggaaatcgttctgctcacagggggacaggtgttttgcgaggttacctcacaaagcacctgtccccctgtgagcacataaaaaagtccaccgttaaggacgatggacaaggacctaatgttttcacaacggaataatccttattgtgatttgctaaaaattagtgctgcaaagataaacttttttttgataattacaaaataaaccagaaaattattatatttgtaacgaaattaacttaaaatgccatatgatgaaaagaatattaggcctcgatttaggaacaaatagtataggttgggctgtagtagaaaaagaagataattgcggtcgaatcataaaatcaggaagtaggattattccaatggatgctgccacccttggggattttgctaacggcaacactaaatcgcaaacagcggaacgcacagcaaaacgagcagcaagaaaaatgagagaaagattccttatgcgaagagagagacttcatagaatccttcacatcttaggatttctcccaaagcattatgaggagtgcattggctggaatctagacaatgacagtaaacattatgggacttttcttgaggggaaagagcccaaaatagcttggaggaaaaatgaaaatggcatctacgatttccttttcaaggattctttttatgagatgttggaagaatttaaaaaacgacattccatccctgctcacgagaaaataccctacgattggactctttattatttaaggaagaaagcattaagcgaacctatagaaaaggaagaactagcctggattattctcaattttaatcaaaaaagaggctacaaccaactcagagacgaagttcttgtagactctactaataagagggaagaattcgtctgtcttactgtagaaagcgttaaagccgatgaaacatctaaggacaaaaatgtatggtacgaaataagatttaaagaaagtgatattatttatagaagaaaaagtctttatccccttaattgggtaggaaagaaacgcaacttgatagtaaccacaaaacttgatagtaatggtaatccaaaacttaaaaaagatgggtctattgattatagcgttaaatctccgaatgaagatgattgggctttgcaaaagataaagaccgaacaggacttagaagcatcccacctaactgttggccaatacatttataatgctttactttccaatctatcagaaaaaatcagaggtggattagttaaaacgattgagcgcaaatattataaggaagaattaaaaaaaatcttgcaagtgcaagaacaattccatcctgaattgcgcaacaagaaattatatgaacaatgtgttgaagaattatatcgaaacaatatagctcataaaaaagctataatgaaaaatggatttgagtatctgcttttagatgacgttttattctatcaaaggcctttaaaaagcaaaaaatcgttaatagataattgtccttatgaaaaccataaaggtgttgacaagagaaccggtgaaatatgtatttacccgattaaatgtattgccaaatcaaatccatattttcaagaatttcgtatatggaaattcttatcaaatctgcacatcattgcaaatagtaaagcagtaaatgggcatattgtaacagatgttgatgtaaccgaagattttattccaaatgatgatattcggtgcaaattgtttgaatggttaaacgataaagattatattcaagaaagtgatttattgaccttttttggaataaaaaagaaagaacaaaaaaaatataggtggaattatgtttcagacaagagatatcctatgaattccacacgccactctcttctaagaaaaatgcaaaaaggagaagttctcagcagagaaaccgagcaaatcctttggcatttgctatactcaacaaaatcaaaatcagaaatagacaaatctctttctcccagaaaggatggaatctttaactatcttattaaaacaggtttatctgaagagacaattgaaaaaatcaaaagtgttaagttgcctgacgaaggatatggagcctattcagaaaaagcgataaagcacttattgccacttatgagatgtggaaaattttggacagtaaataacatccaagcaaaaacaaagcaaagaataaatagttatctactcggtaatgccttgaatctgttttctgttaacgttagaaatcgcatatctacattaactgacataacaatgtataaaggactacctgaatggcttgcttgttatatcgtatatggcagacatagcgaaggcaataatattactaaatggagaacacctgacgatattgatattttcctaaacaatttcaaacagcattcacttagaaatccaatagtcgagtgtgttgtattagagtctcttcgtgtagtaagagatatatggaaacgttttggcgattttgatgaaattcatgtggaattaggcagagatattaaaaaccctagtgagaaaagagcaaaattaacacagcagatattgaaaaacgaaaaagccaatcttagaattaagtatttacttgcagaaatggcaaaagaagaatatggaattcaatctgtgcgtccttattctcctaatcaacaagatcttttgagaatatatgaagaagaagttttagaaaacaatgagccggataaagaaatacaagaaatcattaatgatttatcaaatccatcttctcagcctaaaaaatctcagattttacgttacaaatgttggctagatcaaaaatactgctccccgtatacagggcagccagtacctctttcaagacttttcacatctgattatggaattgaacatattataccacaatcaagattcttcgacgattctttctctaacaaagtcatatgtgaatcagaagttaatcaattgaaaggaaatcaattagcctatgaattcatcaaaaagcatcatggacaaactgttatgcttgcttctggaagaatggttaggatattagaagtttcgcaatatgaacgccttgtaaatgacacttacattaagaacaaaaggaaaaaacttttgttggatgacatcccattagaattcacaaatcgtcaactaaatgatagtagatatattagtaatataatcaggggtttcctttcaaatatagtaagagatgtagatagtgaaggaacccttgaaagagaagccatatccaaaaatcttgttacatgcaatggaacgattacatctcgtctcaagcgtgactggggaatgaacgaaatttggaaagaaattgtccttccacgctttctaagacttaacgatttaacaaagagagaattattcacatcaactaactctcaaggtaagattataccggcaatgcctttagaactccaaaaagggtttagcattaagcgaattgaccatcgtcaccatgcattagatgctatagttatagcatgtgcatctaaggaacacgttaatcttttaagtaatgaatattcttcacccgataaaaagaatataaaatattccttatctcataagttacgaaaggttaaagaagaagtcgtcaatggaagaaagtacaattttttcaaagaatttatcatgccctggccatcattcaaaactgacgtcaaagtttctttacaaggaataattgttagtttcaaacaaaacttacgtgtccttaatcaagcaactaatctttacacaaagtatgaagatgggcagaagagatacatagcacagcatagtattgaacattttgctatccgtaaatccctacataaagataccgtttacggacatgtgaaccttcaacgaatcaccacggttaaacttaaagaagcattaaagaatccgagtcgaattgttgacaaaaaactaaaaaaaacagttaagagccttattaagctacactataatgaagaacaattgctagtgtatttcaagaatcatgcttacgaatggaagcagctggattttcaaaagatacggattttctacttcactgatgagaaagaaatgatggtcgcaacaagattctgcaatgacttaataaatttgtttagcgggaaagttaacaaaaaggacatagaaagtaccatcaatcaaattaccgacactggcattcaacgaattctttacaattatttgaatgctaatattaatcaactggagtttgctttctctgctgaaggtcttgagaaaatgaatgaagacattctattatacaataatggcaagaaacataaaccaatttacaaagttcgactctttcaacctaaagggaataaatttcaaattggaataagaggtaataataagatgaaatatgtagtagccgatgcaggtacgaatttatactttgccgtctaccaaacaaaagaaggaacccgtagatatagaactattccactagaagaagttattgaaaggcttaaacaacatctccatcctgttaatgagaaagacgaaaatggaaatactttattattttccatttcgcctaatgatttagtttacctaccaaatcaggacgaatctaaaggaaacatctatttaaaagacattaaccctgaaaggatatacagattcgttgacagcagtggttcgacagccaattttgtaaaagccagtatagctaatgttatttatcatctaaaaaaagaagaagcaaaacttttttgcattggtgatgttatccaagatgaattaggagtaggtagtccacaatccaagaatcagaaagctatgagtggagaaatgattaaagaaatatgcattcctctctctgtcaatcgtataggagaaatagtaatgagatgataaagaagacattatgtttcagcaatccagcttacctttctcttaggaacagtcaattggtaataaaactgccagaggtagagaaggctgttaacttgacagaagacttcaaaaaggcaactgaaatcacaaggccgattgaggacattggggtggtggtattagatcacaaacagattaccatcactaccggtgccttatcggctctgcttgaaaacaactgtgccgttatcacctgcgacaaccgctccatgcctgtaggactccaattacctttagctgtaaatacgactcaaagtgagcggttccgagaccaaatagacgcatctcaacccctccgcaaacagctatggcagcaaaccattcaatataaaatccggaaccaggcagccgttctttctatttgctcaaaagctgaaacacggtgtatgactgtatgggctaatgaagtgagaagtggagacccggataatcttgaagcccgtgctgctgttttttattggaagaatctatttggagacatacctaactttataagaagcagagatggtgtgtctcccaaccatcttctcaactatggctatgccatattacgtgctgtcgttgcccgttcattagtggcaagcggtctccttcctacccttggcatccaccatcataatcgatataatgcatattgtttggcagacgatatcatggaaccctacaggccctatgttgacagattggttctttacatcattgaacaatatgggatagatatagaattatccaaggatatcaaagccgaattgctgtccattccaacaattgatgtcgtgataaacggtaaaaggagtcctttgatggtcgctgcagcacaaacgacagcgtcactatacaaatgtttcagcggcgaattgcgaaaaatagcatatccagaattatcttcatgaaagccgagcgttttagcgaatacagggttatgtggttactcgttctatttgacttacccacagaaacgaaaaaagacatccgggaatatactatatttcggaaacgtcttttgagggatggctttacaatgtttcaattctctatctatgtgagacattgcgctagcatggaaaatgctgacgttcaccgaaagcgtgtaaaatcatttttacctgaatatggtaaagttggaattatttgcattactgataaacaatttggtaacattgaactcttttttgggaaaaagccacaaaagcccaatgcgccaggccaacaactcgagctattttaggaagagaggaacttcacattgtaagcgaagttcctcttttccattacctttttttattttctaaagaatctcgtaaagttctttatttcaggcactttctacaatcgagttgtctttgtcggttcaaaggtactaattttttagcaaatcacaaccatggcgcggagcactttggcagttgccttggttgtctttgtcggttcaaaggtactaattttttagcaaatcacaacatccgcaagcatggaggcgaggactatcgcgttgtctttgtcggttcaaaggtactaattttttagcaaatcacaactgtatgctgaactccgtgcccaggatgaggttgtctttgtcggttcaaaggtactaattttttagcaaatcacaacaaggtccaacggttgaagaaattcgccgtacgttgtctttgtcggttcaaaggtactaattttttagcaaatcacaacattctgaaggacattgcaaaggtgtacggagttgtctttgtcggttcaaaggtactaattttttagcaaatcacaaccccgtgtcggcaggggtgtattcgacccaagttgtctttgtcggttcaaaggtactaattttttagcaaatcacaaccaatattatttttgaataaatatacaggagttgtctttgtcggttcaaaggtactaattttttagcaaatcacaacactgtgttgttccatccgtcgaccatgttggttgtctttgtcggttcaaaggtactaatatttaacaaatcacaactagtgccctgctgaatgatatttttatccgttgtctttgtcggttcaaaggtactaattttttagcaaatcacaacgagccgagcgagagggccatcttcttgaacgttgtctttgtcggttcaaaggtactaattttttagcaaatcacaacaatcagttgaataccagcatcagcaccttggttgtctttgtcggttcaaaggtactaattttttagcaaatcacaacgtagaggagatgatgggatttccgaaagaagttgtctttgtcggttcaaaggtactaattttttagcaaatcacaactattccggcaccagtaatcattgtgtggaggttgtctttgtcggttcaaaggtactaattttttagcaaatcacaaccatccgcttttagaccctagttgctcacctgttgtctttgtcggttcaatggtactatttttttagcaaatcacaactggcgtcttcttccgttgtatgtagattgtaactgaaaagtgtaccacccctaataatcgaaaagtgtaccactctccctgttgaaaggttaacataaggattatctttttcttatcatttttgaaaatatttcaacaattgcctattgagactatcagttttttctttacttttgcataagatagccaaagacacataagccccgctaatagagtattgaaaatatgactttgaatatcacaggtatttcagaaaataaaataaatcacagcatcactgggagcagagaccccgcccctgccccgctcctaccaggcctacaaggggtggggagtgagaattgcaactcattgggacaggattcttgatgagcgaaaaaggtgggcatggcccagtaaacgcaatttttatgataaaaaagcgggagttttgattttttttgtatttttgtggcataatagggccttatgagaggctgagtataaaacaaaaataatttactacgtatgagtcagaataattataacctgatgaacggcgagactatcattgccgaagctcaattccattacttcctctactggctgccggcactgctggtgctgctggccgtggtgctgcccttcctgcccctgcaggctcccgtaaaatatatgctctattgctcgggcgccctgctcgtggtggcgctgctctggattgtggcgctcaacaacggcaagcgctatatcctgaccaacaaacgcatcatcaagaagacaggcatcatacagcgcgagacggccgagctgatgctgcgcaagatagaggcggtggccaccaagcagagcatagccggacgcatcttcggctacggcgacgtggaggtgtcgaccggcgagcagaccgacagcttcgagtttatcctgcggccccaccagttcagcaacaagattcacgagcaaattgacctgatagcatcaaccgcttccgccaccggcacccaactgaccaccggcgatgaatagacgggccacaaccgcaaaaagacaacaacaatcataaaaataaaagaacaatgaaaacattcgtaaccaaacatttcatgaggagctggctcctcgctctcaccgttgtgattctcgcctcctgtggcaccaccagcaccgtgcccatcaccggcagaaaacaacgcatcgccgtagacgaccagaccatcctgagtctgagccagcagcagtatcaggagtatatgaggaccgccaagccctcgaccaacgccgccaacaccgccatggtgaagcgcgtgggacaacggatagccaccgccgtggagacctacctgacccaaaacggctatgccaacgaggtgcagaacttcaagtgggagttcaacctggtacaggaccccaacgtgaacgccttctgcatgcccggcggaaaaatcgtggtctacgagggactcctccccgtgacacagaacgaggcctcgctcgccgtcgtgctcggacatgaggtggcacacgccgtggccaaacactcggccgaacaaatcaccaagcagcagcacgcctcgaccggcacacagattctgggcggtgtgctccaggctgtgggtgtggacgccggcaccgccagcatagccaccgcagtggccggacaagctgccagcctcatgaacctgaaatactcgcgcaacaatgagacagaggccgaccacatgggtctcgtcttcgccgccatggccggctacgacccgcgcgtggccgtgagcttctggcagcgcatggccagttcgggcggtgccaacacccccacctggctcagctcgcacccctctgacgcccaacgcatcagcgatattcagaacaagttcctgcctgaggctctgaaatactacaaaggaaaataatcatcctccgtcgccatgattgactatctatcacagaacatctggcttatctgggtgctggtgtcgctgctctgcctcatactcgaactgggctcgggcgacctattcatcctctctttctcggtgggcgctctctgcgcagccgccgccaccggactgggagccggcgtggtgctgcagattatcatcttcgtggtgtgctcgctgctcagcgtgttctacctcagaccgctggccaagcaatacctgcaccggaacaccgaaaaccgactgagcaacgccgatgcgctgccaggacgtatcggcaccgtgagccaggacatagaggccggcggatatggacgcgtggccgtggacggtgacgactggaaggcactgagcgccgacggctcagccatcgccaagggcgaacgcgtgcgcatcgtgagcctcgacagcatcatcgtgaccgtggagcgggtggccgaggcttgatggccggccgctccgcccctaccctattttccataaaaatcattcttcaccccataacccaaaaactgatttatcatgagtgtaacaaccaccgttctgattgcgctcgtcgtgctcgcaatcatcatcgccaaaaagacactggtcatcataccgcagtcggaaaccaaaatcatagagcgactgggacgctaccacgccaccctgagcccgggcatcaacatcatcatccccttcatcgactcggccaagagcatcgtcaccctgcagcgcggacgctacatgtactccgactccatcgacctgagggagcaggtgtacgacttcgacaagcagaacgtgattaccaaggacaatatccagatgggtatcaatgccctgctctacttccagattgtggaccccttcaaggcagtgtatgagattaacaacctgcccaacgccatcgagaaactgacacagaccaccctgcgtaacatcatcggcgagatggagctcgaccagaccctcacctcgcgcgacaccgtgaacaccaaactgcgcgccgtgctcgacgatgccaccaacaaatggggcatcaaggtgaaccgcgtagagctgcaggacatcacgccgccggagagtgtgctctcggccatggagaagcagatgcaggccgagcgtaacaagcgtgccgccatcctcacgagcgagggtgaaaagcagtcgcagatcctgcagtcggaaggcgacaaggcggccatgataaaccgtgccgaggctcagaaacagcaggccatactcgaggctgagggtgtggccaccgcacgcatccgcgtggccgaggccgaggccgtggccatcaagaaaataaccgaggcggtgggcgactgcacgaatccggcgaactacctgctggcgcagaagtatatccagatgatggaggaactggccaagggcgacaagaccaagacggtgtatctgccgtatgaggctaccaatgtgatgggcagcctgggcggcatcaaggaactgttcaaggggcagtaatttaggggaggagtcgctctgcgagcgagaaatctcgcaaaatctgaacaaaatcaaacagaatcaatgctgacagattggggaagcccctacgggacttctgattcggagtcgctctgcgagcgagaaatctcgcaaaatctgatcaaaatcaaacagaatcgatgctgacagattggggaagcccctacgggactcctgattcggggtcgctctgcgagcgagaaatctcgcaaaatctaatcaaaatcaaacagaatcgatgatgacagattggggaagcccctacgggacttctgattcggaggcgctctgcgagcgagaaatctcgcaaaatctgattaaaatcaaacagaatcgatgatgacagattggggaagcccctacgggacttctgattcggagtcgctctgcgagcgagaaattattcaaaaattaaattcaaaaattaatcgcgctgcgcgctgaaattgagaagcccctacgggacttctgattactcggaataatctgaataatctgatgactctgactaatctgatgactctgactaatctgaatactcggaagatactgacaaaacaaaaacaagaaacggacaaaagaaaatgaatatttgcatagtggccggagcacggcccaacttcgtgaaagtggcccccatcgtcagggccgtggagaaagcacaacagcagggacgcgatatcagctataccctggtctatgccggtgtggccgatgaccccaccctggagccctcgctcttcgacgatctgcagatggcaccgccctccgtgtatctgggggtggactgccccagcctcaacgaactgaccggaagggtgatgggcgagtttgagaaatacctggaacagcatgacaccgacgtggtgattgtggtggacgacctggcctcgacgatggcagccgccatcgtgaccaaaaagcagggcaaacgcctggcgcacctcgtggccggcacccgctccttcgacatcaagatgcccaaggagataaaccgcctcgtcatcgacggcctgtccgactttctcttcaccgccggagagggcgccaacaacattgtgtcgcgcgagggcgtgagtctctcgcagacctatatggtgggcaacatactgatggactcgctgcggttcaaccgcaaccgcctgcagcgacccgaagtggccgaccgcctgcaactggccgacggcggatacatcgtgttcaccctgaaccggaaggcgctcgtggccgacaccgccaacctgcggcagatgctgaaggccatcgtgaacaccacacagggatgccccgtggtggctcccctgcgcggtctggcccgcagcaccgtggagcagctgctcaccaccctcaacgccgacaccgaccacttccacctcattgagccgctcagctacctgcagttcggctatctcaccgcccacgccaagggcatcgtgaccgactcgggcaatgtggccgaggaggccaccttcaacggggtgccctgcatcacgctcaacagctacaccgaacacatagagaccgtgcgccaaggcaccaacgtgctcgtgggagaggacgccgaacggctgcgcgacaccctggccgacatggtggccggacaatggaaaaagcactcactgcccgagcgatgggacggacggtcggccgagcgcatcgtacagattctcatcgacgaggtaggaagggaataacagaatgcttcagaaaacccttcccatcgtgggaatgatgtgcgccgcctgctcggccaaggtggaacgcacactggctgctatggacggtgtgaacagcgccgccgccaatctggccgggcgcaccgtgaccgtggaatacgacgagcaacgggtatcgcccgacgccatgaaagagaaactggccgacgccggctacgatctcatcaccgacaccgaggtgagcgtgacgcagttagagcgccggcgcatgcagctgctcagcaggagggtgctgctctcctgggccttcgcactgctcaccatggcgctctccatgggatggatacacataggagggcgcgacttcaccaaccaagtgctgctcatcatcgccgccgccaacctctggttctgcggacgggagttctatgccacggcctggcgtcaactgatgcacgcctcggccaatatggacacgctcgtggcgctgagcacggcggtgtcgttcctcttcagcaccttcaacaccttcgccggcgatgccgtgtggggcgccaggggcatcgagtggcacacctacttcgatgcctcggtcatgattatcaccttcgtgctcaccggacggtggctcgaagagcgtgccaagaacagcaccgcatcggccatcagacagctcatgggcatggcgcccaaaacggcgcgactggtgagcggcggcgaactgagcgaggtgcccgtggccaccctggagcgcggcgacaccatcgaggtgcggcagggagagaagatacccgtcgacggcgacgtcttcaccgaagacgacgcctatgtagacgaagccatgataaccggcgaaccggtgccggtgaggaaacagccggccgaccgtgtgctggcgggcaccgtggtgagccacggcagtctgcgcatgaaggcgcggcaggtgggccagcagaccatgctggcacaaatcatacgcatggtgcagcaggcgcaaggctccaaagcgcccgtgcagcgggtggtggaccgcgtggccctcgtcttcgtgcccgtggtggtgggcatagccgtgctcaccttgcttatatggctcgccgtgggcggcacggaccggctgccggaggccttgctgtcggctgtctccgtgctggtgatagcctgcccctgcgccttaggactggccacccccaccgccctgatggtggccgtgggaaaggcggcgcagaagaatgtgctggtgcgcgacgccaccgccctggaacaggtgcgcaaagtagacgcactcgtcatcgacaagaccggcacgctcaccgtgcccaagcccgatgtcgacttccgtcaggcggcacagctggcccctgaggaacgcgagacgctgaagccccacgccgccgaggccatgcaggccctggcgcaggagggggtgacagtgtatctgatgagcggcgacaaggaagaggctgtggactactgggcccgcaaggtgggcatagagcaccaccgcagcggtgtgctgccgcaggacaaggaagatatggtgaggcagttgcaggccgagggaaagaccgtggccatgatgggcgacggcatcaacgacacgcaggccctggcggccgccgatgtgagcatagccatgggcaagggcaccgatgtggccatggatgtggcacaggtgacactcatgggcaccgacctgcggcgcgtggccgacctgataaggctttcgaggcagacggtgcgcatggtgcgccagaatctgttctgggcttttatctacaacctggcctgcatacccctggccgccggcgcgctgcgcctggtgggggtgccgtttcagattacacccatgtgggccagtgcgctcatggctttctcaagcgtcagcgtggtgctgaacagcctgcggctgaaactgataaaatgatgggctagaggctctagatgggctagaggctctagatgggctagaggctctagaaaccctagaagccctagatgggctagaggctctagaagccctagaagctctagatgggctagaggctctagaagccctagaagctctagatgagctagaggccctagaagccctagaagctctagatgggctagaggccctagaaaagcctcttattcattgctttttaggaagccatcgaccagctggaggcggccgatgcggcacagatgcccgatggcggcagagacgagctggtcgctcttgatggtgcggcgggcgaagccgagcaaacggggcacctgccgcttcaggtcttcctcggagatggagacttgctgctccaccgccatgaccaccacattcataatctccaccacgggtatgtcggccatctcacgggcggtgccggtgcggtagcccttgtactgggcggcatcggcc

SEQ ID NO: 707 - DNA, 23123 bp, synthetic construct
  misc_feature 1..23123: note = Synthetic
  variation 17129..17390: note = n is a, c, g, or t
  source 1..23123: mol_type = other DNA
atcatggtaacccaggccaactgggtgcatcaccgggtaaccgaggaccaactcgtccttgatgtctcccccgacggagactggagcaccgttcgcgtctggtggccccccaccagccagatgggcaccaccgactacgacattttcggcttcatccggcccgaacatccgtccggccacgaccggatcctcgcggccgtgccaggcgctattcgggtcgcggaagcggggtggtagcggtgtccgagcgccctttgaacccggtcgccaccacgtaaagctcgctggaatccttccggctcgccggcggcttggcatgccgcacggtgctgaaattctgcttcagcaaatcaagtatctgcttctctgacccgccctggaacaccttcgccacgaacgccccgcccggcgacagcacctggatcgcgaaatccaccgccatctccgccagcgccacgatccggatgtgatcggtcgaggcatgccccgtcgtgttcggcgccatatccgacaacaccaggtcggcgccgccgcccagttcggccgtcagccgctccggcatcgccgggtcggtgaaatcgccctgcatgatgaccgcaccatggatcgggtcgatcggcagcaggtccagcgccagcaccgccgacgccccccgcttcaccgcgacctgagtccatccccccggcgccgcgcccaggtccagcacccgcacgcccttctggatcaggtggaatttgtcatccaattccagcagcttgaacgccgcgcgcgaccgccagccctgctgcttggccgccacgacataagggtcgttcaactgacgcgccaaccagcgcgcggacgcggtgctgcggcttttcgcgctcttgacgcgaaccaccaacccccgggagggcggcatggacggtgccttggccatcagcggcatccgtcccggcgtcgcccttggcgcaagcgatcggcgcgcatcagccgcagcagcacgccttcccgcagcccacgatcggcgacgatcacatgcggcgccggccaaacccgggtgatcgcggcaaacaccgcgcagccaggcaacacaaactcaaccctttcgggccccacacacggatgcagcatcaatccttcccggcccagcgcacgaaggtgcgacagcgcgtccgccgcctcctggctgcaaagctccacgccgtcaacggccagccggcgataccgctccagattcaaggcgacgcccgccaaggtggtgaccgtgccgctggtccccagcaaccgcaccccgccatcccttatctcgcgcgcgatgcaatgcaccttctcgaaagaccgcagccggtcggcgacatcggtgaccatcgcctcaaacccatctggattgaacccagcgtcgccccaacgctccgccagggtcacaacgcccaccggcagcgagtcatagccgatcagttccggccttccgttcgtcagcctaacccacgcgagttcagtcgaaccgccgccaatgtcgaacagcagcgcccgccttccatcgcagggcagcagcggcgtgcaggattccagcgccagttccgcttcctcgcggctggagatgatcccgaaatcaaacccggtttcctgcttcacccggcacagaaacgccggcccattcgatgctcggcggcaggcttcggtcgcgatcgcccgcaccccgcgcaccggccggcgcgccaaccgagcggcacaggcctgaagcgctccaattgctcggtccatcgccgcttcgttcagcatgccggtgctgtgcaacccctcgcccaggcgcacgatacgggagaagctgtccaggacgcgaaacccctcacccgagggcgtgcccaccagcatccggcaattattcgtgcccagatccagggcggcgaaagccggcccgaacacccggcgtgcctgatccccgcgcgcttcaggacaactggcggcggcgtcaagctcagcaggggcctgaaccggcatcatctttggattgtcacccggcttagccggccgggcaagcaccgaatgcaagtccagtgccggctgtcggttttttcatggcccggtaggttcagcgtgagacactcgccatccgcctccacctttcgccttcacctcacgggccgccatatgcgcccggcgcagcagggtgcgtatatcctccgtgcttcccggatgacggctggcgatgccgatggagaaggtgatgggatggccctcagacagctcccgcaactgacgtttcaggcaaagcgcctcggcgcgttccgccgcggtcagatgatccatgccatccagccacaccccgaactcgtcagcgccggtgcgggcgaccagatcgctgggacgcaccatcgcgcgcaactggctggacatgcgtaccagcacccgatcaccctcggcgcggccaatggccaggttcaagccgcggaggtcgtcgatatcgatgagcatcagggtgccgaccctggcatccagatcaagacggtcgatatgccggtctgcctcatccaggaaccagcgtcggttcggcaggccagtcaggcgatcgatccccacctgccccatgccgttaccgatcgccacccgcaacagcatccccaccgaggcggccaggtcgcgatcggcatccgaccagggacgagcccggggcgaacgccaaagcgccagcccgccagggcgggtcggcggcagcacccagggacaggtcaaaatcggccgtttgtctggcgcaaccttatgagagggctggccggggctggcattcagcatctgcagggcgacggcggcggtgtactctccggcaacccccacgcagtacgcgactggggcctccgccgcatcctggctcaggtcgagtatcgccagaccctcgacatcggcggtcaaccgcaattgctccaaaaccgcgacgatagagccatcgtaatcgcccctgaaaggcacgccagtcactccggatgaaaggatcgaacccaagcctaggctcttcggcaaccaaaaagtatcaaatcgcgacccgggagcaacttcccggcgcactgtgtcgctgccgcttcggccgcgaatgggatacggtgccatccaagcaacggagggaacaaaatgcgcgctgtttggtatgaccggcagggaccggcgaacgcggtcatcgttaccggggaactgccgacaccggaacccggcaccgggcaggtgcgcgtgcggctggaagcctctggcgtcaatcccgccgacacataccgccggcgaggcgcggtgccgcctgaatacccccgcgtgatccccaacagcgacggcgccggcgtgatcgacaaggtgggtgacggcgtgtcgtcccaatgggttggaaagcgggtctggctgtacaacggccagcgcaacgggcgctggatgggcacggcagcggaatacatcgcgctcgatgccgatctggtgaccgagctgccggatcatgtctcgttcgcgcagggcgcgacgctgggcattccctgcatgaccgcgcatggctgcgtgttcgccgccggttcggtgcagggcaagacgctgctgattacgggtggcgccggcgcggtcggccattatgccgtgcaactggcggcctgggcgggggccgaggtcatcgccaccgtcagctccgacgacaaagccgaacgcgcccgggctggcggcgccgcgcatgtgctgaactaccgcaccgaggaggtcgccgcgcgcgtggcggaaatcaccagcggccgcggcgtcgatcacgtggtcgatgtcgatctgggcggcaatctcgccgcgaccctggcatcggtgcgtgagaacggcagtatcgcctattacgccacggtcggcatgcaaaagccggagatcgacctgcgcgccctgatgggcaagaacatcacgatccggggcttcgtgcttcccacaagcccgcatcccacccgcaaacgcgcccagcaggacatcgccgcgttcatccgcacgcccggccggatactgtcggtcgccggaaccttcccgctgtacgaaaccgccgcagcgcatctatcagtagaggccggcggcaaggttggcacggttgtcgtggcgtgtgctcgctgagcacgcgcccccaattgacaccttccgcaaccccgcctctgctgccgccacaacaaaaatccgagggaaccagcatgacccagatcactcgccgagcggtgctggccggcgcgacggcgctgaccgcactgcctgcccgtgccgaaaacgcgcccggcgttaccgacaaggaaatcctgtttgggcagaccatgccatacagcgggccagcgtcctcgtacggcaccatcggcaagtcggccgatgcttacttccacatgatcaacgacaagggcggcatcaacggccgcatgctgcggatgctatcgctggacgacggctacctgccgcccaagaccgtcgagctcacgcgccggatgatcgaggaggacaaggtcgccttcctgttcaactgcctgggcacgccgacgaacaacgcgacccggaaatacaccaacagcaagaaggtgcccgacatcttcgtcgccaccggcgccacgcagttcggcgaccgcgagcactatccctggaccatgggctggcagccgacctatcaggtggagggtcgaatctacgcccattacatcctgcaggcgttccccgacgcaaaagtggcggtgctctatcagggggacgattccgggcgcgactacttcaagggcatcaaggacggcctgggcgacaaagccgacaagatgatcgtcgccaccgcgacctatgaggtgtcggacccgacggtggactcccagatcctcaccctgcgcgatgccggcgccgacgtgctgttcatgaccggcattcccaagttcaacgccatgggcattcgcaaggccttcgatgtaggctggaagccgcggctgttctgcatttcgtccaccggatcgtcggtcgcgaccgcgatcgttccggcgggcgtggagaaagccgtcggcgtggtgacggccagctatttgaaggacccgacggacaagcagtgggccaccgatccggggttcgtcgaatggcgcgccttcctggagaaatactatcccggcgcggatccgaccgacgtcaacaacgcttatggctacacgacggcacagaccctggtgcagactctgacgcagtgcggcaacgacctgtcgcgggaaaacatcatgcgtcaggcgaccagcctggacattgcgttgccgatgctgcaaccgggcatccgggtgaagacgggaccggaggactactatccgctgaagcagatgcggctggtcaggttcgacgggaccgcgtggattccgttcggcgaagcaatctcggggtaaattatgacagacaacaagttggttttgatcgtcggtgccaatcgcggcatcggcctgggcgtaacgaaagtcttcctggccaacgggtggtcggtcatcgcgaccgcccgcgacccggcaaaggcatcggcactgcaagaactggcggcggcgaatcccggccgggtgtccatcccggccctggatatgaatgacgcagccgcactcgacggattcgccgccacgttgggcggcaagacgctggatgcggtgctggtgaatgccggcgttgccggccctgcccaccgcagcgccgatgccgccaccgccgaggaaatcggcgcgctgatgttcaccaacgccatcgcgccgacccgcctcgcccggtcgctggcgagccacatccggcccggttccggtgtgctggcattcacctcgtcgatcatgggcagcgtggccctgaacgaaggcgggcacgaactttatcgcgccagcaaggcggcgctgaactcgctgtcgcgcggactgtggggcgagttgcgtggcaagaacattacgatgctgacgctgcatcctggctgggtgcagaccgatatggggggcgcctcggcggcggtcacggtggatgacagcgcggccgggatggtcaaggtgatggaaagtcaggccggcgtgcataagcacctgttcctggattataccggcaaagaactggcctggtaaaaaccacgggggaccggcggcaactgtcggccccccgaaccttgccaaccccacccgccggcgtactatcccgtcaacccagggagaaacgccaatgataaccaagttcgatagcctgttcgccggccataccgacgtggaagacatcggctacggcggcatcccgatcaacgatcggcgctacgacaacgcgcatctgtcctcggcgctatcgaaagcccaggcaatcgcggtgaaaatggacgatctaggctactccaccttctggatggcggaacaccatttccagcgcgaaggcaccgagtgcattcccaacgtgctgctgatggccctgcacctgacgcatgtgaccaagaacatcaacatcggctgcggcttcaacgtgctgccgatgtggcacccgctgcgcctggccgaggactatgcgatggccgacatcctatcgaaaggccgtgtcgtgttcggcatcgcccgcggctatcacacccgcgaggtcgaaacattcggctccccgttgatggaccaggaagccaaccgcgagctgttcgaggaacaggccgacatcatctttaaggcgttcaacgaagagtccttcagccacaagggcaagcactacaccctgccgcccgaggtgccctatcgcggctataccctgaaggaattgaccctggtgcctcgccccgcccgcctgcctgtggaatgctggcagccgatccagggcggatcggaacgtgccctggccttcatggccaagcacggcatccagggcatggtcggcggcgggtccgccgagggcggcgcgatgcacaacgtagtgctgaaatggcagcaggaacacgccaagatcggcaagcacatcgaactgggcgagcgcctgtgcttcggcttccatttctacatgggtgagagcagggaacagtgcgtccgcgatgccgcgaaatattacgaggaaaacatgaagatgttcggcgaactccggctgaacaaggcgatgaccgacgagcagattgagatcatgcgcgacccgaagcgcgcgcccaccgccaaactgccgcggatcgaggatgccgtgaaagccggcgggttcctgaccggctccgccgacgaaatcatcgaccatctgaagaagctggaaaaagcctatcccggcctcgaccgcatctccatcagcccctcactcggtgtccccaaatcggtgatcctggaacaggtggagcgttttgccaaagaagtgatgccggcgttcaagggcaatacgctggaagtgaaacagccggcgttggcgaagggataccagccgcccgccgactgacaaaagagtcgaatcttcgggcggctagtataagcggataaattggcgagcgaagccgccggtctttcctggcgtcatgcccctgcttggcgcggccccccaagcgtgcgccaggacctccatcagtcggcacggccgcgcccgttcggtcgggcagaccgatctggggacgacgaccgatgccgttgacgtcggtactactgagtagcacataacgccaggaggtgcccatgaccgcgaaaacctcgatctcgctgaccgacgatcagcaagcctatgcgcgcgccctggtggagagccggcagtacccgagcctcagcgcggttctgcagcgcgggcttgagatgctgcgccgcgacagcgagatgcgcgatgcggaacttcaggccctgcggtcactgatcgatcagcgccgcgccggagctttcgccgatctcgacaagggcgaagcggacacccgcgcgatgctggatcgcaaaaggaaatcgcgtgcggcactatagggtcagccgcgcggcggacgtcacgcgcgacctcgaccttatcgaggagcatttggttcaagcctaccaggaattcggggatgacctggagaatgcgatggaacgagccgccgcgcgcatcgaagacgccctcccctatatgcggacattcgcggcccacccccaccggggcaccgaacacccgaagattcgtcccggcattcggaccgcgaccaaaaagagtttcatcttctactttgagatcgatgagccgtcgttcgaagttagaatactcgccgccttcttcggcggcgcggatcacaggcggcagatcctcgatcgctttcggcactaacggagtgaaaaggccgctgcctcccaaagcagcggccctcactccgaatactgtacccccagcctaccgccccaacgtcggcatcgtgaactccggcccacgtcgcgtccccgccgcccaacgctgcgtcaccgccttgtagcgcgtgtagaaccgcacgccctccggcccatagatgtggtgatcgccaaacaacgagtgtttccacccgccgaacgagtggaacgccatcggcaccgggatcggcacgttgatccccaccatcccgatctggatcgcctgagtgaagtcgcgcgccacgccgccatcgttggtgaacagcgcgacgccgttgccatattcgtgcgcgttgatcagccgtgtcgcggtcgcaacatccggcgcgcggaccaccgacagcaccggcccgaaaatctcgtccttataaatcttcatgtccggcgtgacgttgtcgaataggcagccgcccatgaagaacccgttctcataaccttgcagcttcaacccccggccatcgaccaccaggttggcgccttccttgacgcccaggtccacgtaacccagcaccttctgcatatgctcgcgcgtgaccagcggccccatttcggcgtccggatcaacacccggagcgaccttcagcgctcggaccctgggcgccagcttcgtcatcagctcatcgcccgccgatccgaccgtcacggcaaccgacaccgccatgcaacgctcgccggccgcgccataggccgaacccatcagcgcatcgaccgcgtcgtcgatgttggcgtccggcatgatgaccatgtggttcttcgcaccgcccagcgcctgcacccgcttgccgtgctgcgtgccgccgcgatagatcgtctcggcgatcgcggtggagccgacgaagctgatcgccgaaatccccggatgcgcgatgatggtttcaaccgcctcgcgcccgccctgtacgaccgcgaacacaccgtccggcaggccggcttccttcaacaattccgcgagtttcagcgcaaccgaggggtccttctccgacggtttcaggatgaagcagttgcccgtcgccagcgccaccgggatcatccacagcggcaccatgatcggaaagttgaacggcgtgatgccggcaaccacgcccaagggctggcggatcgaccacgcgtcgatgcccgtgccgacctgatcggtgtattcgcccttcaacagatgcggaatgccgcaggcgaactccaccacttccaggccgcgctgcacttcgccatcagcgtccgacagcaccttgccgtgttcggcggtgatgatttccgacatctggcgccggtcgcgctcgatcaattccttcagcttgaacatcacccgcgctcggcgcagcggcggagtattcgcccaggccggccacgcggcggtggcggcggcaacggccttgtccacttccgacgcatcggccatcgcgaccttggcggtgacttcgcccgaggccgggttgaacacgtccccaaacttaccgctggtcccggcaacatgtttgccgccgatgaaatgcccgatttcgcgcatggtggttcctccgtgatgtcgggaggcaagtagaacagctttggatgggggtctagatggggggcagagtgaaagggaacgacgggccgtagcccgccgctcatttggtgcgcccgaaggcacttgttaacgcaggcccccgcttccccatcggctaaaacaggttaggtttctgcaagcacacgttgcacgaccagacggttcaggtcaacctgttgctatgaagatatcatatcgcctcggcgttgatctgggtgccaattcgatcggttggtccgcccttatgttggatacggccggcgcgccgtgcggtttgttggacatgggcgtccgcgtgtatccggacggccggaatccaaaggacaatacgtcgctggccgctgctcgccgcgggccgcgcgggatgcgtcgcaaccgcgaccgctacctgcagcggcgaagaaatctgctgaacgccctgacccgcatgggccttatgcccgcggacaccgatgaacggcagaacatcgcagcgcgcgacccctatgccctccgcgccaaagccctccacgaaaaactggcgccggaggacctcggccgcgtcttattccatctcaaccagcatcgtggctttcagtcgaaccgcaagacggaccgcgactcgaacgaagacggcaagatcagcgatgccacgaaaagaacgatagcggagttgcaacttaccggacatccgacaatcggcagttggctggccgaacgccatcaggctcggcaaccggttcgggtaaggcttgctggatcgggaaagacagaggcttacccattctacccgtcgcgggacatgatcgagtcggaattcgataccatctggaccgcccaagccggctggaaccggaacctgacagagccgatgcggcagtctctgcaccatattattttccatcaacgcgacctcaaaccgcccaaattggggaaatgctggctcgaacccgaccaattccgggcgccccgtgcgctaccgaccgcgcagcggttccgtatcgcacaaactctctcccacctgcgggttgtccgccccggcgtcccggacgaaccactgaccaacgaccaacgcgcgatattggccacgaccctttatcgaggccgcgatttgaccttcgaccaaattcgcaagcgcctcggtctcccaggcgacacggattttaactttcgcgacgaaaagctaatcggctgtgcgacggccaaccggctggccaatggcaaaaaggcaccgatcggcgatgcatggcactccctcgacctgacgacacaggacgccgtggtcaccgcgattttggatgcggaaacggtagaggaaggaattgaaatactgaagacgatcggccttgcgggagagatcgccgaacgggcggtcaacaccacactcgtcgatggtcatacgtcgctttccatggttgcgatgggaaaaatcctgccgcacctcgagtccggcatgcgctacgacgaagccgttaaagcagccgggtacgttcaccattccgaccgccgcaccggtgaaatccgcgagcagttgccctattacggcgaactcttgttcgaccggattggcaccggcacaggagaaccggcggaccctgacgaaaagcgccttggcaaggcacccaacccgaccgttcacgtcgcgctgaacgaactacgccgcgtcgtcaacgacatcatcaagcggcatgggccgccggccgaaatcgtcgtggagactttgcgggatctcggccgttcgaagctgcaacgcgaagcatacagcgccgaccaaaaaaagaaccgcgatgccaacgacgcgcgccgggcaatgctaaccgaaatgggcatgccgttgaacggccgcaacatcatgcgcctgaggttgtggcaagaacaggcggcggacccaaagaaccgattgtgcccatacaccggcaccctgatcacatgccgaaccgcattgtccgacgcgatcgaggaagaccacatcctgccattcgcggtaacattggacgacagctcggcgaaccgtatgctggtgacgcgggaggcgaaccgaagcaaggctcgccagtccccgttcaccgccttcggccacaccgcccaatggccggacattcaagaccgcgtggcatttcttccgcagaacaagcgctggcgctttcagccggacgccatggataaatttgccaaagagggcgatttcctcgcccgtcatctcacggacagtgcaaccattgcgcgctgggccacggaatacctggaaatactggcgcccggcaaggtctggtcaatccctggacgcctcaccgcgctattgcgcgataagttgggattgcggccggatgtgatcctgggcagcggcggggcacgcaaaaaccgtgacgaccaccgccaccacgccattgacgcggttgtcgtagcgctgacggatcgcggcctgttgaaacgcaccaccgatgccgccaaacgggccgaaacaacaggcgagcgcctggtcgtgaagatggagccgccctgggaaaccttcgtcgcggacatcgcgaaacgggcgcgaaccgtcgtcgtctcccataagccggacatcgggtggcaggcggccctgcataacgacacgaattacggcatcatcaagggggctcgggaagaccaggacaatgtcgtgacgcgccgcgcggtcaccgacctgctgaagaaggacggcactctggcattcaccgtccgcgatccggccttgatggcaaagatccaggcgacggtcgccggggcgcaggacattccctcgcgcaaggcggcgctgtccgccctcacccattccggcggctatgtggttcgacgagttcggacgaccgagcggttgaatgcgacccaagatatcaatgatcgacgcacgggaatgccttaccgaaccgtcaagcgcgacggtaatcaccgcatggagttgtggcggatgcccgatggttcgttcctgtcgcgggtagtctcaacttttgccgccgctcaacaggccatggcggcagcgcgtggggacaaaacagaccgcaccaacgatccacgcccacatccctcggctaaattattgctacggctccatggtgccgacatggtcacaatcagcgctgatgggaaccgccgcctgatgcgtgttgtgcagatatccgacggccagctcaccctcgccgcgcataacgaaggcggcaaattgagggaccgccatagagcagacgatgaccctttcaggtatgtctttctttccagcggcgcgacgatggtcaaggcaaacctcaggaagattttcgttacgcccagcgggcgtgtcataaacggcgatcagaaacagtgaccgcgtcgccgctcaaccgggtcgtcgagatcgcggaaggtgggcggcatcttgcaaagacccggggctttttgactgtcagcgtgaagggcgaagaaatcggcagggtgccgctggatgatatcggcgccgtcattgcaaccgcggcctcgaccaccgcttcctgtgcattgctggcggaactcgccgaacgcggtattccattcgtgttgtgtggacgcaactatgccccggccgggctggtttggcccgtcgccgggcatcatgcgcagcagcgccgcatggaggcgcaactggacgcgagcagagtcctgggcaagcgtctctgggcacaggtggtggccgccaaaatacggcggcaaggatgggccttggcccggcagggcaagccggcgggcgccttcacccgtctggcgcagatcgtcaaatctggtgacccggacaatatcgaggcccagaccgcacggcgttattggccgcttctgatgggcaatgcgtttcggcgggacgtggatgcggacggcgcgaacgccttactgaactatggctatacgatcctgcgcggtgcgaccgcgcgagcgatcgtagcggccggcttgcacccgggtttgggaatttttcaccgccatccgcagaatgccatgccgctggccgatgacctgatggagccctttcgtcccctggtggatctggcggttttgggaatcatacgctccggcacgcagcaggtgacgccggaggccaagcggactctcgcggctattttgttgactgaagaaacgacgtccgccggacacaccccggtatccaccagcatgattcgcctcgcggcaagtttagccgacagttttttaaccggcgaaccggcactcgagtttccaattctccctcctccgcgcgctacgccggtccacgacgacgatggccaggaccggtaatcccactctgtccgggtatcggttcatgtggttgctggtgatgttcgatctgcccgttggaaacaaagccgaacgccgggccgcgacaaaatttcgcgaatggctgctgggagagggttttgagatgagccagttcagcatctacttgcgattctgcgtcggcaaggagcaggtggatcgccgcgtgcgggagattgccaaggagcgcccggataaaggttcgatccacgttcttgcggtaaccgaccggcaatttgagaatatggcggtgtttcgtggtcggagccgcagcaagggccgtaaggctccaaaccagcttgaattattttagtgtcgctttggcgaccctgacccaggctaaaaactcttgatatttaagagcatagcctgggtcagttatagccgatggggaaacgggggccaagcgcaacgacgcctgggacatccgtgcggtgacgttgttatagccgatggggaaacgggggccaagcgcaacacaggaccgcgatgccagccgagatggaaagttatagccgatggggaaacgggggccaagcgcaacacgatcggggattggtgcctggacccacgggttatagccgatggggaaacgggggccaagcgcaacggtggcgcgggaggcggctaccaaggcagcgttatagccgatggggaaacgggggccaagcgcaacgggcgcaaggttagggaggaaacgtccaagttatagccgatggggaaacgggggccaagcgcaaccatggtgcgtcacttggatggcgcgctgggttatagccgatggggaaacgggggccaagcgcaacttatcgagcgggcgaaggaaatataccttcgttatagccgatggggaaacgggggccaagcgcaacgcgaatacccagatacaatgccgcaggcggttatagccgatggggaaacgggggccaagcgcaacacgtccaaggggatcggttcggccatcagggttatagccgatggggaaacgggggccaagcgcaacgcagaaaggtcttcatgtcatcaacgctgagttatagccgatggggaaacgggggccaagcgcaacattggcgccctcgctttcgttctcgccgcgttatagccgatggggaaacgggggccaagcgcaacaaaatccacgtcgcgaagaagcagcttgcggttatagccgatggggaaacgggggccaagcgcaacaacgtgctggggcggctgtcgcgagacacgttatagccgatggggaaacgggggccaagcgcaacgttagcgatcgcgaggtagtcgatgctgttgttatagccgatggggaaacgggggccaagcgcaactaatccatgactccaccaacgtcaataaatgttatagccgatggggaaacgggggccaagcgcaacaattaccatggtggacaaacctactaccggttatagccgatggggaaacgggggccaagcgcaacatccctgatcggcgggagcgccagcggcggttatagccgatggggaaacgggggccaagcgcaacatcccggacaacaggcgcgtggctgggcggttatagccgatggggaaacggttcgacgaaccggtcacccaatcgcaagcccggaagcaatcttgacttttttcctaattatatctataaatcgcgacatgcgcgcctgttttcagcctcacctttggaacgcctcaagagccgccaccgcgcagcgccgtggccgggctaacttcgcattcccccgccttgtgccgcccccgccgccaaacccggcggccgccatcgtcgggacggacggtttccacgggcagtcattcttataaacaggacaaaataccatagcgtggcttttgagacatccgttagacacaaaaaatcagaacacatcgacacggctgtcttacgctccatcaacgcggcggtcccccgcatgcctccaccaacctcttttcatgggtccgaaaccggaaaaccgcgtattgcttgccctctggggccgaagccgctaacccggcagcgctaatagaccgatcgcgcggccacttccgtgccgccgtcaaacaggagaatgtcatggcttacagggtcgcggttgtcggcgccacaggggcagtcggacgcgagatcatcaaaaccctggtggagcgtaacttcccggcgtcggaagtcatcgccctcgcatccggccggtccaccggttcggaaatctcctttggcgaaaaacagatcctcacggtccgcaacctcgacacgttcgatttcgccggcaccgatatcggcctgttcagccccggcgccgcgatctccgccatccatgccccgcgcgcggcggccgccggctgcgtggtgatcgacaacaccagccacttccgtatggaccccaacgtcccgttggtggtgccggaggtgaacccgcaagacctgcgctggttcgccaagcgcaacatcatcgccaaccccaactgctccaccatccagatggtggtcgcgttgaagccgctgcatgatgagttcaagatcaagcgcgtcgtcgtctccacctaccagtccgtgtctggcgccggcaaggaaggcatggacgagctgttcaaccacaccaagtcgtccttcgtgcatgaacagtcgccgccgcagcagttcaccaaggaaatcgccttcaactgcatcccgcatatcgacagcttcatggatgacggcgccaccaaggaagagtggaagatgacggtcgagaccaagaagatcctcgaccccaacatcgccgtgcatgccacctgcgtccgcgtgcccgtcttcatcggccatggcgaggcggtgaacgtcgagttcgaacgcccggtcaccgccggcgaggcccgcgcgatcctgcgcgatgcccccggcgtggaagtcgtcgatatccgcgaggatggcggctacgtcaccccgctggaatgcgctggcgaggacgcggtgttcgtcagccgcatccgcaaggacccgacgatcgagaacggcctgtcgttctggtgcgtgtccgacaaccttcgcaagggcgcggcgctgaacgcggnnnnnnnnnnnnnnnnnnnnnnnnnnnnnnnnnnnnnnnnnnnnnnnnnnnnnnnnnnnnnnnnnnnnnnnnnnnnnnnnnnnnnnnnnnnnnnnnnnnnnnnnnnnnnnnnnnnnnnnnnnnnnnnnnnnnnnnnnnnnnnnnnnnnnnnnnnnnnnnnnnnnnnnnnnnnnnnnnnnnnnnnnnnnnnnnnnnnnnnnnnnnnnnnnnnnnnnnnnnnnnnnnnnnnnnnnnnnnnnnnnnnnnnnnnnnnnnnnnnnnngaacgcggtgcagatcgccgagacgatgatcgcgatgaacctgctggtgaagaaggcggcttagccggcgtgccatggccgggatcaagcacggtcatggcaaagcccccctatgcctgcattccccgcagatgcgcctccaatgcaggtaacccgcacggggcatccgccggaaccacctcgcgccaagcctccacccccggcaaccggccggggttgcgtaacaccagttccgtcttcaggaacgggtaaccgaacttcgtcgccaacacatgccaaagatgctgggtcgggttgagcggccattcgtgaagaagtgcctcggcctcagcggccggcaggcggtccaggtcacccagtttgccgtgcgaacccatcagccgccgccgctcggccggatcggcgacggccgcgcggctcacgcggtcgtagccaaacatcgcggccacgcggtggccacgatcgcgcatccacctggccaagcggatttctcccatttggaccagcaaccatttcgattggctgacgtaaagcgtccccaggaaccgcatcatatccgccaccaccgccttgccgcgccccagcaggaaatagctttgcagatgggcgccgccttgcaggctttccgtcagtccgaacaacccgtcgccgccttcccgcatcgtcaggaccacgggcgtcaaggggtggatcggtccaagcacactgtcattcgcgagcagtagttcgttcggggacggccaccgtcggcgcacctctggcataacctcgcgccaggcgccgaaatctcggccaaagttctccctgcgtaccacgagcgcacacaccgcccgaaccacctgccagtcttcctcgggaatcgccgggccgttcgaaatgaacacgatcgcgaaccccagcgacaccagcaaagccaactgcgcccggaccatgcccgaaacccgcccagtcggagcataatgtacgtaaagagcgacccgatccgcgtctgcccccggatcgacaccgtcctccatacggaacggtttggtgggccgacgcagtgtatccgccacgagggccggcaccacctccaacgcgacattcgcggcgcggtagatcacccgtctccaggtccccgaggtcgcataaccatgcgcaacacgccggatacccggattcccaccggtcagttcggtaaggtacagaggctcgatcatgccagactgatagtccataagaagcccgtgccgccagcgcggggaaagcggcgcccgacatccgctgatccgatgccgccacggcggcaccgatagattttcaaccggttcaggtcaagaacgacggtcgtcaggcggctccgacaaccgccaaacgggccttcagcatctgccaggcgcggcaggctgaacccgccgcgcggttcgcgtgcggattaccggcggaaatccgctcccttccgctcgactgtgcgaaccagccctttccactcgttaaggccatagccctcggtcttacgcatcttcgacatccgctccgcggccttacgctgcacgaattcgtcaatgatcacaggtggttcgtcgagttgccgagcgatcaattccagctcgcaggcgcgttcaagcatatacaaacgcatcatcgccccgtggatggtttcgcccagcgtcagcaacccatggttcagcaggacgacgcagctacccgtggcgcagcttttgcccagcgcgtcgcattcctcgaccgtcgcgggcacaccgtattcgtggtaaacgacgtcgtcgatgacatgcagcgcatcctggctgatcgggcgcaaacccttgcgcaacagcgagacgccagccccggcacgggtgtgggtatgcagcacgcaattggcgtccggccgagccttgtagacaccgctgtggatgatgaaaccggcgttgttgaacttaccgccgggggaaaggacgtttccgtccatgtccatcttgaccagggacgaggcggtgatttcgtcgaacatctccccgtagttgttgatcaggaagtggttcggctcacccgggacgcgcgcggacatgtgggtgttgatcaggtcggtccagccaaggtcgttgatcacatgatacaaggcggcgagttcgcagcgggcgtgccattcggcgtcggacatatcgggcttcatttgcagcgcggctgacatggattggtctcccttgttggtatcattctggctaggatcgtgaccgtgtcggcccgatcgtgcaagtttccagcggtgtcaaaggtccggttcatgccagtttgctcggtaaactctcccctgtttaacctgaccaaccgccctatttgccgtatagcgaatgaaacggaggcacctgtatgaacgtaccctggcgggacaggcgcggcagagtcctgcccctcaaggcgacgatcctcgtctgcctgttcattcccggcattctcaatgccgcctggctggcgaccgaccaactcggcggccgcccggtcatggaggtgatccatggcaccggactgtgggcgatccgcttcctgatgatctccctggcgatcacgccattcgcgcgggcgctggactggccgggtctgctgctggtccgccgcaatgtcggggtcgccgccgcctgctatgcggtcgcccacctgtttctttacgtcgtcgatcagaacttcaaactgctgaccgtggtgtcggagatcgcgctgcggttctacctgaccatcggcttcgctgccttgctggtgctgctcgcgctggcggtgacctctaccgacggatggacgaagaagctgggccggaactggaagcgcctgcacaagctggcctacccggtcggggccgttgcactgctgcattactacatccagtcaaagctgaacgtgtcggagccggttttcgtctctggtctgttcatctggctgatggcctggcgctcggttccggaggcgtggcggcgcaagcagggcatcgccttcaccgcggcgctatatggcgggctcgcggtggcgtccgggttgataacggcggggctggagttcgcgtggtacggtctggcgaccaaggtcaatccgtggcgggtgatcgccgccaacgagtcgatcgcgcacgggctgcgcccggcgcattgggtgttcgtggttgggatttcgctggtggtggtgtttgtcgcgcggcggatgatgcccacggcacggcctgttcggcgggtggcggcttagcggtcccgaacgctttggtgagcatgaggagcaatcaatgaccacaaaaccggacgaaccctcgatttcggaccgcgaattggtattgacccgcttgatcgatgccccacgcgaaaagctgtatcgggcgtggaccgaccccgccctgcttcggcaatggttcgctccgtcaccttacagcacgccgcacgccgaactggacgtgcggccgggtggtgccaccttggtcgtgatgcaggggccggacggaacccagatgccgaaccgtggcgtatacctcgacgtcgttcccaatgaacgtctggtgttcaccgacgccttcgtagcggcatgggaaccctcccccaaaccgttcatgaccgtgatccttaccttcgaggacgaaggcagcaagacccgctatacggcacgtgtccgccattggaccgtggccgaccgggagatgcatgaacagatgggcttccatcaaggctgggggatctgcgccgaccaactcgcagccctggttacgaaagccggctgactcacccctccgactcccttgaccccccgcggccatcacgctaccggctggtaacccaaccaaggacccagccggtgaacgccttcagcttcccgcccccgccgccgtctccccaggccgaagccctgcgcctggaagtccgcgacttcctgcgcaccgaactcgcgacccgcaagccggtggagaaagccgaatcctggaccggaatggacgcggaattctcccgcaagatgggccagcgcggctggatcggcatgaactggccaaaggaacacggcggccacgaacgctcctccctggagcgctacgtcgtgcaggaggaaatgctcgccgccggcgcccccgtcgcgctgcactggatcgccgaccgccaatccggcccgctgatcatccgcgtcggcaccgacgagcagaagaagatcctgccgcgcatcgccgccggggaggtcttcttctgcatcggcatgagcgagcccgacgtcggctccgacctagcctccgtccgcacccgcgcggcgaaggtccagggtggctatctggtcaacggcaccaaggtgtggaccagcttcgcccacaaatcccactacatgatcctgttctgccgcacaggggcagccgacgccaaaccgggggatcgacacggcggcgtcagccagttcatcgtcgatctgcacaacacgcccggcatcacgatccgtccgatcatcgccctgaccggtgagcaccacttcaacgaagtcgtgttccaggacgccttccttcccgaaagcgcgctgctcggcaaagagggcgacggctggaaccaagtcaccagcgaactcgccttcgaacgcagcgggccggagcgcttcctgtcctctttccagctcttcgtcgaactcatcaacgcccttggcccggagcctaccgatgcgggcgccatcgccatcggccgcctgacctcccatttcatgacccttcgccgcctgtcccgttcggtggccggcatgctgcagaacggcgagaaccccgcgcttcaggcggcgctggtgaaagacctcggcgcgctggtggaacaggaactgccggaaatcgcccgccaactggtcgatcaggagccggacgagaaatccacccaggcctttgcctccgtcctggcgcacacgatgatgcatgccccgtccttctccctgcgcggcggcacccgcgaaatcctgcgcgggatcatcgcgcgcgggctggggctgcggtaactcactcccgataaggaaacacccatgaccgacaaagtcctctacgagcaggacggccagatcgtcaccatcacgctgaacgatccggcgatgcgcaacccgatctcggagcgcgcaaccgttgacgccatcgtcggcgcgctggagcggctgaaccaggaccgcaccgcgcgcgtcgccatcctgaccggcgccggcacggccttcagctccggcggcgatctgcgcgccatgaagaagaacttcgaggaacgggccaaacaaccggccctgaccacgcagtattacaagttcggcatccagcgcatccccctggcgttcgagaagctggacgttccgatcatcgccgccgtcaacggcccggcgatcggcgccggactggacctggcctgcatgtgcgacatgcgcgtggccggcgagagcgcccggttcgccgagagcttcgtcaaggtcggcatcgttcccggtgacggcggcgcctggctgctgccgcgcgtcgtaggctattccaaggcctgcgagatggcattcaccggagacatgctgaacgcccaggaagctctcgccgcgggactcgtgtcccgtgtcgtccctgacgccgaacttctggacgcggccaaggccctcgcggcccgtatcgcggtcaacccgccctacgcggtgcggatggccaagcgcctgctgatcgagggccgccatagccgcctggacacgctgctggaactctccgccagcctacaggcgttggcgcacgccacgggcgac

SEQ ID NO: 708 - DNA, 16102 bp, synthetic construct
  source 1..16102: mol_type = other DNA
  misc_feature 1..16102: note = Synthetic
tcctgcaggtgcagaaagacacgatgttcatcgtgctgggcctgatcgtgctggtggcggcgttcaacgtcatttcctcgctgatcatgctggtcaaggataagcgggccgatatcgcggtgctgcgcaccatcggtgccagcagcggggccatcctgcgcattttcctgatgtgcggggctttcgtgggcgtatctggcaccgtgatcgggaccatcatcggcgtgctattttgccacaatatccatgggatacagcacgccattgaatctctgaccgggggacgggtgttcgattcctcggtcttcatgctcaccgccctgccgaacaccatcgactggggcgacgtggtgcgggtggtggtgctcgggctcattctgtcgctgctggcgaccatctatccgagctggcgcgccgcccgcaccgacccggtggaggccttgcgccatgagtgatccgctggtcctgcgcggggttcagcgcgtttatcgtggggaaggcgaggatctgcccatcttgcggggcgctgatctgaccttgcgggcgggggaaatcgtcgccctggtggcaccgtccggcgccgggaaatcgacgctgctgcatgtggccgggttgctcgatcgcccggatggcggtgcggttctggtcgaggggcgcgacgccgggtccctgccagacgccggacgcaccgcggtgcgccgagacactatcggcttcgtctatcagttccaccacctgctgggggagttcacggcgctggagaacgtcatcctgccacagatgatcgccggacgatcccgcccgcaggcgcgggcgcatgccgcggccctgctgacggattttgggctggccgcgcggctcgatcatttgcccggcaagctgtcggggggggagaagcagcgcgtcgccatcgcgcgggccttggcgaatgggccgcgggtgctgctggcggatgaaccgaccggcaatctggacgtagcgacggcggcgacggtgttcgatgagctgctggcgatcgtgcggggccagggcctggcggccttgatcgcgacccataatccggacctggcggcgcggatggatcgcatcgtgacgctgcgcgacggccttgtggtggcggggtaacgccggcgcattgggcttgttccccacggcggatgtgcaattctgtccgccgggatgggagtgtcgcgggaatgatgaaagagaacagcatcaggcgggcggtgcgcgaagggcgggcggcgctgggcaccgggctcaaggaattcgcttcacgcggcgtgccctggatcatcgaggcctccggcttcgattattgcatgatcgatcacgaacacggggcattcgatctggagacgatcgccgatctggcagggtggtttcaggcgaccgatgtttcggcgatcgtgcggattcataagtcgttcatccccatgatccccgcgattctggatcagggaatcatgggcatccaggtgtccgaggtcgatacggtggaggaggcgcaggcgattgtccgcgtcgcgaaatatccgccgatgggcgatcgcggcatttccggccaggggatgcacacgggctaccgcagctatggcgcccggcacgcgaccgaatacgcgccctgggccaatgccaatatcatcgtttgcgtggcgatcgaatcgctggagggcctggacaatgtcgaggccatcgcggcggtggagggcatcgacatgatcgcctatggccactccgacctcagtgcccggttgggggtgcatttgcagctggagcacccgacgttcaaagcggccgtgcgccgcatcgcggaggcttgtaacgcgcatggcaagctctgccggggttcggcggagaccgaggcgcagatcgaggaatactggcagttggggtgcaaggtgttgaacctgccggggacggatgtcagcacgtatctggatgggctgaagacgcgggccgggcgggcgcatgcgcggttgaaggcgattggggttccggtgccctgatgggggggcgatcaggttttccagggatcgaggacccggaggccgccggcctcgaaaggtgacatgtcccgcgacgcgacgatgaagccgcgcgcggcggcgatcgcagcgatgtatccatccggcgttggaaacccgcggccacttcgccgcgctgcgacggcgagtgcggcgtagtggcgggcggcctcaatgtcgaatggcagcacgcgatcgccgaacaggtcgagcatgccgtcgagggcccgcgtcaggccatccttccgcctgcctgctggcagcgcggcaattccaaattgaagctctgccagggtgatgctggtgatgtagagggtttcggcgagttgctcgttgagccagccacgtacggcgggattggcctgcggcttcatcgcctccgagatcacattggtgtcgaggacgatcattcgaacattatcggcttcgcgggcgattggtcgcgtatttggtcaatggccgcgatgtcgtcgttcgtgagcccggctttgcggccgagggcggccagtgcgtcgccgaggcgaacgcgctttgccggcttcacggcccgttccaggatgtcgcggatctcggcctcggcgctacggccgtgctggacggcgagcacgcgcagggcgcgatggacgtcgtcggggacgtttctgacggtgattgaggccatgatatcggattgcccgcggtgagtggattgattgcattataatgaagtgcaagcataggcgttacgggaaaacttgcaaaaaacacggtagggtcaggtgccgatgaggtcgcgggggaccggcggctttctgccgccgccttgctggcgccttgctaggtgttcagctaacgccatcctgaggatgccgcaagccaagttaatacccagccagagctcacgaccggcacctcttccgcatctaacagccactatcgcaaacctcggagcgtcgatcgcaccacctcgcccagcgaagagagggcgtcttattttttgcattcactccccataccgaagtactttgagccagtcgcgcaatgctgcgcccacactcaagcaaccaggagcaccccatgcgcgacgcagccgcaccctggcggaccgatgacctcctctacctcgaacgcgagatcaactactggaccgggccgaccggctacgccgcatgcaccagcgccgtgcagacagcccgcgaccacgcggccaaacacggcatgaaccgcgtcgcggtcctcccggcctgggccgcacaatacgacggcgtattaagcaagatcgtcgcggggatcgaccccgctggcctcgtcacggactgcgacggcgcggaaatcgtcgttatgcccacgccggagaccctcgatcaattcctggcctggtgcgggcagcatgtccgctgggatcgccccgcctggaccatcgtccctggcacaggctaaaaaaccaaaaaccagaggagaccccatggcctacgtccccgttctcaaatcccctgacgaactcaccggggaagcccgggcgatcgcggaaaagatcgtcgatacccgcaagtcgctggaaggccccttctcggtctggatgcacgcgccggaatgggccgcgcgcgtggcccatctcggcacgctggtgcgctgggaagggacgctggaattgcgcacccgcaccctcgccgcgctcgtcgtcggccgccatttccaggcccaatatgtctggggcatccagggtgttatcggcgccgaacggaacgtcccccgcgccaccatcgacgcgatccgtgacgaacgctccgacggcatcccggccgaggacctgcagatcattgacttcacccggcaattgctgcgcaagaaccgcgtcgacgcgccgctggccaaggccgtcatggcacggctcggcgcggaccagtatgtgcagctgacgacctgcatcggctactatgcgatgctggcgatgacggtgaacggggtcgagctggaaccgaacccgaagcatgaggcgctcacaatctgacggatcgccgcgcgccccggctgaggcggtcctctccggatgtatgacgtaaacatcgccgaaagcactggacacatccatggcgccacatcctcaacgactcacggtcacacggcgctcctgggcgctggcccggccgattacgacgccgcagggggttcagaccacggctgagaccattctggccgaaattgccgacggcgattcccgcggccgcggtgaatgcgttccgctggcccggtatggggaaagcgccgacagcgtcgttgcggctctgaacgggctgaaggacgcgatcgtgtcggggctgaaccgggacacgcttcaaaaggcgctgccaccgggcgcggcgcgcaatgcgctcgactgcgcattctgggacatcgatgcgaaccgggcctattgcacggtcgcggagctggcagggcagggggcggggacgccgatcacgacggccttcacgattccgcttgatacgccggagcacatggcggacctcgccgcggccaaccgtgcccacccgctgctgatcctgaatctggggggtgacggggacctggaacgcgtgagggctgtgcggcaggccgtgccggcgtcccgcctgatcgtcgatgccaatgaaagctggacagcggcgcagctggcggccttcctgcccgcgctgatcgagtgccgggttgaactgattgaacagccgctgccagccggcgcggacgacgcgctagcgggatgtgcacatgcgattccgctcggcgccgatgaatcctgccgctctgttgccgatatccaaggcctcgccggacgctacgaggcgatcaatatcacgctcgacaaagtgggcggcctgacggaggcgctcgcgatggcggcggacgccaaacggcgtggcctgcgcgttatcctcggcggtacccttggcacatcgctgggggttgcgccggccttgctcgtcgtccccatggcggagatcgtggtgctcgacgggccgttacggctggcatctgatcggtatccggggctgcgctacgaaggcagtacgatccacccgccagaagggcggttctggggccagccaggttaagaaaacggcgaaacgacaagaaaggaaacgatcatgggacggctcgaaggcaaaatcgcggcgataaccggcggggcatcgggcattggggaggcaacggtccggcgcttcgtcgccgagggcgccagcgtggcgttctgcgatcgggatgccgaacgcggccagcgcgtggcggccgaactccaggcggccggcgccagagtcgcgttcacccatgctgacgttgggacggaggccgcgtgcctcggcttcgtcaatggcgtcgcggagaggttcggtcgcctcgacatcctggtgaacaatgccggcatccgcaaatacgagacagtcgatgtcgccagcgcggcgagctggaacgaaatcctgagcgtcaacctcatgagctacgccttctgcgccaaggcggcggtgccgctcatgcgccgcaacccgggtggggccatcgtcaacatcgcctccgtccgatccgtcatttcgggtgggggcaacctgcaatacgacaccgccaaggccgcggtcgcggggctgacgcggggcctcgcggcggatcattcggcggaggggattcgtgtgaacgccgtcgggccgggcccgatcttcacaccattccatcagaaccgcatcgctgcggccggccagaccgtcgcgcagtacaacgcccgggccgccgaaggcacgatgatgaagcggccaggccgggcggaggaggttgccgccgcgatcctgtttttggcctccgacgacgcatcctacgtcaccggcgcgctgctgttcgtggacggcggcatgaccgcgctttgacgtcaggacaggccgcacggtgccaggctgacgtccggaccgtgcggccttccgtcccatgcgcgcaaagggctccgggcttgggctcacatcggatctgaaacaggagggcggatatggtacaggccaccacggcggcgataccggaattggccgcgatgccgggcgagcgaacccatcgtggatttgagccccttcgaccgatcgggacggccacggcccggagctattctcatatcgatccgcgtccggtcgtccccgcgttgggcgcggagatcgccggtatcgacctgcgccgactcagtccggaggcgcaaggggaactccgagaggccctggcagatcgcaaggtcctcgtatttcgcgatcaggatctaacgccccatcaatatgctgatgtcctgaggatcttcggagtccccgtgaaagaagacatggtggtcgatcccaatcaccctccagaggtcggcgccatccatacccgcccgaatgaacagcagcagatcaatttctggcacatggaccattcgtttcgcgaattgccgacccgcgtgctctcgctttatgcgaagcacctgccgccggttggtggtgacacgttatttgccagcctggcggcggcctacgatgccctgtccgacgcgatgaaggagcggatcgacggtctgcactgctaccatcgggtgacggcaacacaaaacacgaagcgccggtataccaaggaagaagcggaggcgatggagaagacgccgccggtggtgcaccccctcgtaccgcgcgatcccgggaacggccggcgctacctgtttgtgaacgtgccgatctattgccggagcatcgtggaactgcaaaccccggagggcgatgcgttactgcgtcagttgtatcgccatgtccagcggccggaattccatttccgcctcacctggcagccaaataccgtcgtcgtctgggagaataaccacacgctgcattaccccgtgtccgactacttcccctatgagcgcaagctctggcgtggcgtgatcgacgcgaccgaagccgatcggcccaggctttaggtatgttttaacaagctatttcacctgtttgttgatcgctgcgcgattcaaccgaaaccggtctggccctgacatcccctatccggccgggatcgtctgcaggtgccggacccggatcggcaccggggggtgcgaataatgcagcagcgcataaagatcgtccggagtcagcgttgatgcgttgtcccgcgacagcttgaccaacgcgctgatcatcggcgccgcacccgcatggcggcaggcgaacgcatcggcctggaattcgttcctgcgggaaatccaattgctgaaggggcgcaggatcgggctcaccatggcgctcaggagcaggcaggcattcaaagccagggcgtcgtcctggtaggcgaaaccgaaggacggcagcaaccagggctgtttgctcagccagccgaaagccgccagcacgccgaacgcgatcgccgccccgcgcaacaggccgaacagaacgtgcttatgccaataatggccgagttcatgggcgatcacggcaccgatttcctccggcgtattggccgcgatcagcgtgtcgaacagcacgacgcgtttggtatttccgaagccgataaaatacgcgttgccgtgcgccgatcggcgcgacgcatccatggtgaagaggccggaggatttgaagccgcattgagtcatcagcgtttccacccggctgcggaggtccccatccgggagcggggtgaaggtgttgaagcgcggggcgatcaggtaaatgtaaaccatcggcgcgcccagcatcagtgcgacgacaccgcaccaggtccagagccaccagaatccggccaaatggcgcatggcccagaggcaggcgaatagcagcggcaccgcgatgatcaggccgatgagccaggatttgagcgtgtcgaccgcgaaagtggccagtgtggagcggttgaagccaaatttttcctccagcacgaaggtgctgtagagcgagaacgggaggctcaggatcgcctcgatcgcccaaagggcgatcatgaaggcaacgccaagggccggtgagggcaggacgccggccagcgcgccgaacaggatgttgatgccgccgcatacccaaagcagggacgtcgtcaggcccaggaccgtttgaagggcgtccagtttttcgtgggcgacggtgtaatcagcggctttgcggtgctccgcgggggtcacggtggtggcgaaatcggcgggcacctggtcgcggtggcggcggacgcaggcgatctggcgcgctgacagaccgagctccaccgcggtccagagcagggatgtcacgacgaaggcggtgcgcaggatgggcattcgggcactccaggcacgcccatctggcgtgcggcgagagcgtgatcggcggaggtggaaacaccggagccgtgaatcacgcgatcaaacaatcggttagagcatgtcaggtgcgcctgaaagcaccagacatgctctaactgcaggttaacacggtgctcgcggcaatgggttaacgcgggcggcgccgcgcccggccgcggcaatctggaccgctccaggcatggtcacgatcgatctgcggtcttcggccggtggtaacgatcccgtcgatggcgtgctcccgaagggctgggcagccctgtcgggttggctctggcatggatggtggtgttggagaggatcggacagtctcgcgccaaaagcgcgatctcacccacgctgctatgcgagcgttggatcgggcgccacacggaccagtgtcttgccgaaattctcgccacgcagcatctcggcgaaggcagccgggatcgcgtcgaacccctcgcggatatactcgcggtaacggacctcccccgacgcgacccagggcgccatctcggccaggaacgtgtcgtgccaatccgccacataggcgccgacggagaggttttgcacacccacgccacgggcctcggcgcggcggcgctcctcggctttggcgtccgcctcgggcgcgtcgccgtaatgcgcgatcagcccgcaaatcgtcatccgcgcgcccgggttgaacaacggcagcaccgcgtcgaacaccggcccgccgacattctcgaaatacacatcgatgccgctcgggcaggcggcttgcaggtcctgggcgaaggtgggggacaggtgggagacacaggcgtcgtagccgagttcctccgtcacatagcggcatttttcctcgcgcccggcaatgccgaccacgcggctgccccgcaaccgcgcgatttggccggcgatctgacccacgccgccggacgccgccgacacgaccgctgtctcacccggcttcggctcgcattgcagggccatgccggcataggcggtgaggccaagcatgccgagcacgccgaccgcgtggctgatcttgccgcgggcgggatcgagcttgcgggggatcatgtagctgggccgggcgacgccctcccccatcaggccgtattcggcccagccgttggtgttgaagacgaaatcacccggcgcgattccgtcgatccggctttccaggacctgcgacacggtgcgggcgtggcagggcaacccctccggctcttcaccgcggcgcttgaggccccactgatagggatcgagggagacgtagatcgttcgtgtcagcgcctgtcccgggccgggggccgggatcggcgcctccttcagcgcgaaggtggcgtcgtcgggccagggcggcggcggccgtttggcgagcgtccagtagcgcgtgttcacgggaacctccctttaagcgttggtgctttttcgcattcgcggggggcggcgtccactggcacaaccacggagacagcgtgcggaccgataacacccagttaaaggcgctgagcgcaggcggggtccggagatcaatctctggccccatgcaaatcaagaacggcgggccgtagcccgccgcacatttggtgcgcccgaacagcgcttgttaacgcaaggcccccgcttccccatcggctaaaacaggtagaggcttggcaaccatttatttgctcgaacggccatcccgtgtcaagctgctttaatggaaactcgttatcgcctcggcgttgatcttggtgccaattctatcggttggtgcgcattgatgttggatacttcagggtcgccctgcggcctcctcgatatgggtgtccgggtgtacccggatggccgaaacccgaaagacaatacctccttagctgccgcccggcgcggtccgcgcgccatgcgccgcaaccgagatcggtacctcagacgaaggggcaacttgcttgctgcgctgactcgtttcgggctgatgccagaaagcgatgcagaccgccaggccgtcgccctgttcgatccctacaacctccgtgccaaagccttgcacgagaagctaaccgcccacgaaatcggtcgcgtgctgttccatttgaaccagcaccgcggctttaaatccaaccgcaagactgatcgcgcctccaacgagggtgggaaaatcagcgaggcgacggcacggaccattgcggcgttggctggtgctggccacccaacgatcggcagctggctcgccgaacgacacagcagaaaggcgccagtgagggttcgtctcgctggctcgggcaaaaacgcggcctacgaattctacccgttacgcgccatggtcgaagcggaattcgacacggtttgggcagcgcaggcgggctggaacccgcagctgaccgacgccatgcgcgatgctttgcgccatatcattttccttcagcgcgaactcaagccgtcgatagtgggcaagtgctggttggagccggaggaagaacgggctccccgcgccctgccaagcgcacaacgcttccggatcgcgcaaacgctcgcccatctgcgttatgccaaaccaggaagccccgagcagccgctgacggatgagcatcgggggccactggccgatatcctctaccggggccgcgacctaaccttcgatcagatccgcaagcgcctcgggttgcccggcgacaccgatttcaatttccgcgacgataagctggtcggatgtgccaccgccagccgactcggcaacggcaagaatgccacaatcggcgacgcctggcacaagctcgacctggcgacccaggatgccgcggtgaatgccattctgaacgccgagaccgatgacgaaggtcaggaaatcctgaagacgcttggtatcgccgcggacgccgccacgcgggcggtcagggccattctggtagacggccacgcagcgctgtcggcggtggcaatgggtaaaatcctgccttatctggagggtgggcagcgttacgatcaagccgttcaggatgcgggctatcatcaccactcggatacgagcacgggcgagattcgcacccaactcccctactacggcgaactcctgttcgcgcggatcggcacaggaaccggcgaaccactggacgccgaagaaaagcgcctcggtaaggcacccaacccgaccgtgcatgtcgcgctgaacgaactccgccgcgttgttaacgcgatcatcgaacgccatggcccgccgactgagattgtggtcgaaaccctgcgtgatcttggacgctccaagaagcagcgggaagaataccgcgacatccaaaagaagaacgaaaccaccaacgacagccgccgccaacaattgcgagagatggggctgccgctcaacgcccgtaacatgatgcggctccgcctgtgggaggaacaagccaccgacgtcaaggaccgcctctgcccatataccgggaccgtcattaccgcccggaccgccctgacagatgagatcgaggaagatcacattttgcccttcgccgttgtcctggacgacagctcggccaatcgcatcctggtgacgcgcgaggcaaaccgtatcaagaccaggcgctcaccctatgaagcctttggtcataccgcggagtggcccgccattctggaacgcgccaacctcctcctgcctcacagcaagcggtggcggttccagccggacgcgatggagaaattcgcgcgcgagggcgattttctggcccggcatttgaccgacagcgcgacaatcgcgaaatgggcgaaggactatctggagattttggcacccgaaaaggtctggtccattcccgggcgcctgaccgcccttctgcgcgacaagctcggcttgcgacctgatgtcattctgggcacgggcggtccgcgcaagaaccgcaacgaccatcgccatcatgccatcgatgcggtggtcgtggcgcttactgatcgtggcctgttgaagcgaaccaccgacgcagccaagcgtgcagccgatatcggggaacggctggtcgtaaagatggagccaccctgggagaatttcgtcgccgacatcgcgcggcgggcgaaaaccgtggtggtttcgcataagcccgataccggatggcaggcggcgctgcataacgatacgaattacgggatcatagtgggtgcgagatccgaggaacacaacgtggtcgtacgccgggcggtcgcggacctgctgaagaaggacgggacactcccattcacggtgcgtgatccggtgctcggggcgaagatcgaagcagctgtcgcggcatccgcggaccaagcgacgcgcaaggccgcgctggcgggtctgacgcattccggcggacacgcagtgcggcgagttcgcacaacagaccggttgaacgcgacacaggacatcgcggatcgacggacgggcaagccgtaccgcacagtgaagcgggacggcaaccacagaatggaactatggcgcatgccagatggttcctacgtggcacccgtgatgtccacgttcgccgccgggcagcaagcggaggctagtcggttgatgcggccaatcgccgatacacgcccccatccggcggccaaacttctgatgcggcttcacaaggacgacatggtcaccataggtgaggggagcgagcggcgcctaatgcgggttgcgaagatatcggcagggcagttggcgttatccgcccataacgagggtggtatattaattgaccgacataaagctgctgacgatgcattcaggtatgtattcctgtccagtggaaatacgctcatgaatgcaaacatcaggaaagtgtttgtcacaccggacggtcgtgtgctggacggaggccttaagcggtgaccgcgtcgcccctcggccggatcgtcgaaatcgcggaagaggggcgatacctcgccaaaagtcgtggtttcctgacggtcagcctgaagggcgaagaaatcggccgggtgccgttggacgatatcgcggctgtgatggcgacggcgctttcgaccacgacttcctgcgcattactggcggaactcgcggagcggggtattccgtttgtgctttgtggacggaactatgcgccggcggcactgatctggcccatctctggtcatcatgcgcagcaacggcggatggaagcccaactgggcgtggccaaaatactgggccaacgcttatgggcgctgatcgtcgccgccaaaatccgccggcaaggttgggccttggcccaaagcgggaagcgggccggcgcattccggcgactggccagtatcgtgcagcccggcgacctcgagaacatcgaagcccaggcggcccggcggtattggccgttgttgatgggggatgcgttccgccgcgatgttgacgctgaggggccgaatgccctgctcaactacggttatacagtgctgcgcggtgccaccgcccgggcgatcgtcgcagcgggcctacacccggggctgggcatctttcaccgccatccgcagaatgccatgcccctggcggacgatctgatggaaccgttccgtccgctggtggacctgagtgtcctggagattttacagacgggcaccacggcggtcacgccggaagcaaagcgtgccctcgccgctgtcctgttgaccgagcaaacgacatcggccgggcgcaccccggtctcgacgtgtctgatgcgactcgctgccagccttgcggacagttatctgacgggcgaggcctctttggaatttccaatcctgccggagcccctcactgcctctgtcgtttccgacgatggcccggctcggtaacccgatcctttcaggataccggttcatgtggttgctggtgatgttcgacctgccagttggaaccaaagctgagcgacgggcagcaaccaaatttcgtcaatggctaatggatgcgggctatgagatgagccaattcagcatctacatgcgattttcggtcgggaaggaacaaacggaccgccggatccgtgacatcgccaaagcccgcccggacaagggatcggtccatgtactgaccgtcaccgaccggcagttcgagcatatgaccgttttccgaggaaagaagcgcggccatggccgacccgtccccagccagctcgaactgttttaaaccgcattatggcgcctggcactggtcgagaacccttgagaatcaagggcctcgccagaagcagttatagccgatggggaaacgggggccaagcgcaacagcagaacgcaggcttgttcttgaatccggttatagccgatggggaaacgggggccaagcgcaacgtataacgtgagtccgtccggttttttttgttatagccgatggggaaacgggggccaagcgcaacctggcgttgtcaatgggtctgacgcatcggttatagccgatggggaaacgggggccaagcgcaactgcttgcatcggggcgcacgagcacgttgagttatagccgatggggaaacgggggccaagcgcaaccgtgttccccgcttcggcgacgggcgcccagttatagccgatggggaaacgggggccaagcgcaacgtagggctgattgatattgatccgactttgttatagccgatggggaaacgggggccaagcgcaacaagaacgaacgcggtattggaaagtcatatgttatagccgatggggaaacgggggccaagcgcaactctacccgttaccgctggcgttaccgctgggttatagccgatggggaaacgggggccaagcgcaacagccgcacacgtcaccgctcgatgcccaacgttatagccgatggggaaacgggggccaagcgcaaccggcgacaatggcgatgcgcgatggccaagttatagccgatggggaaacgggggccaagcgcaacgatcgcggtcgtcgtcatcgacatgtgaatgttatagccgatggggaaacgggggccaagcgcaacatcccgttcaggttgcggcggaggtgcttcgttatagccgatggggaaacgggggccaagcgcaaccgatggcggattttcggcggatggcggaggttatagccgatggggaaacgggggccaagcgcaacgggccgtggtgccgatactgcaaggcgcgggttatagccgatggggaaacgggggccaagcgcaaccatcgcttaagcagagtcggtgcgggattgttatagccgatggggaaacgggggccaagcgcaacacggcgcgcagcgaggcgtttcgcagggcgttatagccgatggggaaacgggggccaagcgcaaccaacaacagggaacaagacgatgaacgcaagttatagccgatggggaaacgggggccaagcgcaacggggaaggaaagggaaaaatgcaccggggcgttatagccgatggggaaacgggggccacgcgtgacctggtgaccgcaatgaggcgacgaaatgggctatgctatccaccgttttgcgacaccttttcgaccacgtgaggttcaaaattatgggtcggtgatcccgagagtatcgtcttaatttcagatacttgtaggctccgtaccatatcccccaagtcaacaggtccggagagaatcggccgtcagagagagaaatccggccttcgttccacccctggcagtcaacaggtgtccccgaaaatccgcaggatacctgcgcttttcagcgcaatacaccgctgcagagactgtccacaaaaggaaaactggcggaggggatgagattcgaactcacggtacggcttgacgccgtacggcggtttagcaaaccgctgccttcagccactcggccacccctccgcctggagagttatccccgggcgaacccggacacagcgttt

SEQ ID NO: 709 - DNA, 14404 bp, synthetic construct
  misc_feature 1..14404: note = Synthetic
  source 1..14404: mol_type = other DNA
gatcacctggcccgcgaccttgccgccgtatttcggcatctcgcgttcgaggatgacgcggttcggctcggcgaacggcgtctgggcggcgaggatgaagatgttcctcgccccgcgctcgccgaggaactcggcgagcttggtgatctgcagggtcgagttgggctgggtgcggatgatgaagccgcgatgcggcagttgggtgatgctgtcggcgcccgagacggtgaacagcatggtccggctttcccagcacaggggcgcgacggcggtggtgaccgcggaggcccaggtgcccatgatggcgatgacgcgatcgacgtcgatcagcttgcgcgcggcgcgcacggcggcgtcggggttggtctgggtgtcctcgccgaacagttgcacgcggcggccgttgatcccgcccgcgttgttcaccgcctcgatcacgccctcgatcgccttgcgcatggaggggccgtagggcccgcccgcgccggtgagcgggttgagcgcgccgaagcggatcggctcggcctgggcgcggaggatggcgggtgcggcaagcgcggcggccgtcccggccagcagcgcgcggcggttcagacggacgagcatgggtggtctccctggggactgccgactgatgatgacgcggaatcacccgccgaggaagattcgtcgcacctcggggtcggacgccagggcggcggcctcgccggtgcgggcattgcggccgtccacgaggatgacgccgcggcgggcgatcgacagcgcttccagcgcgttctgctcgaccatggcaatcgcggtgccttcggcattgatgccgcggatggtgtcgaacagcgcctcggccgcgacaggggagagcccggcggagggttcgtcgagcagcagcacgcgcggttccaccatcagcgccatcgccatggcgagcatctggcgctgtccgccggagagggtgcgcgcggcctggcggcgcttctcggcgaggatggggaaacgcgcgaagatcgcctcgatgcggcggggtgtctccttcggctggatgaagccgcccatctccaggttctcgcgcaccgacatggtggggaagacgttctgttcctgcggcacgaaggcgatcccccgcgcggcgatctcgcgcggggggtggccggcgatcgcggccccgtcgagcgtgatcgatccggcggaggggaccaggatgccggcgatcgccttcagcagcgtggatttgcccgcgccgttcgggccgatgatcgcgacgacctcgcccgggtggacgtcgagatccacgcccttgaggatcatgtcggcggcggcatagcccgccaccacgccgcgcgcggagagcaggggcgcggtcatgcggaggcgaagcggcggcccatataggcttcttgcaccgaatggtccgcggcgatcgtttcaaactcgccttccgcgagcttgcggccttcggccatgacgatgacgggcgagcagagccgggcgatcgcgtccatgtggtgttcgatgatgaggaaggtgaggccttcgtcgcggagccgcatcaggtggtcgccgatctccgcggcgagggtggggttcacccctgcgatcggttcgtcgagcaggatgagcttgggatcggtcatgagcgcgcgaccgatctcgagcagcttcttctgcccgcccgagagttcggcggccggattgttcgccacgcgcagcagattcaggcggcgcgcggtttcgatggcgcggtcgagcagctcggactcgcgggtgcgtgcggcgcgcgaggggaggatggcgagggggagggattcgccgggctggtgtgcgccgtagagcatcaggttctcgagcacggagaggcgcgggaagccgcgggcgatctggaaggtgcggacgaggccgcgttgggtgacgcggtcggggcgcagcccggtgatgtcggtgccgtcgaattggacggtgccggagtcgggtgggacgaggccggtgatgacgttgaaggccgtggtcttgccggcgccgttgggcccgatgaggccggtgatggtgccggcttcgacgtcgaggtcgaggccggtcagcgcatgaacgccgtagaagctgcgggtgaggccgcggacttcgagcaggggcatgggcaggagactacggggatcgcggcgcaagggaagggggagggtccggcggatccgcgctcaccttctcctgagcggaccgtgttcggtcgccggaggccaggggccatcgccccgttccggcgcggattgccgcggtggggcccctcgctggccccggctctccccatgcctggtcaccgaacgcggttcgccaccagttccgtcaccaccgccgggtcagccagcgtgctcgtgtcgccgagattctccgtctcgttcgccgcgatcttgcgcaggatgcgccgcatgatcttgcccgaccgcgtcttcggcaaaccgggcgcccactggatcgcgtccggcgaggcgatcggaccgatctccttgcgcacccaggcgatgagctccttgcgcagagcctcgctcggctcgaccccggccttcagcgtcacatagcagtagatgccctggcccttgatgtcgtgcggcatccccaccaccgccgcctccgcgaccgccgcatgcgcaacgagcgcggactcgatctccgccgtgcccatgcgatggccggcgacgttcaacacatcatccacccgcccggtgatccagtagtacccgtccgcatcgcgccgcgccccgtcgccggtgaagtatcgccccgggaaggtcgagaagtaggtctgcacgaagcgctcatggtcgccgtacaccgtgcgcatctgcccgggccaggaatcggcgaggcacagattgccctcggtcgcgccgtgcaactcgttgccctcgccatccacgatcaccggcttcaccccgggcagcggcaaggtggcggagccgggcttcaacgccgtcgcccccggcaggggcgagatcaggatcccgcccgtctcggtctgccaccaggtgtccaccaccgggcagcgcccgtcgccgacattgcgccagtaccagagccacgcctccggattgatcggctctccgaccgttccgagcaggcgcaggctggcgcgcgacgtcttcttcaccggcgcttcgccctcgcgcatcagcgcacggatcgccgtcggcgcggtgtagaagatgttgaccttgtgcttgtccaccacctcccagaaccggctcaccgacggatagttcggcacgccctcgaacatcagcgtgatcgccccgttcgcgagcggcccgtagacgatgtaggtgtgcccggtcacccagccgacatcggcggtgcaccagtagatatcaccgtcatggtagtcgaacacgttctgatgcgtgaacgacgcccacaccatgtagccgccggtggtgtgcagcacccctttcggctttccggtcgaaccggaggtgtagaggatgaaaagcggatcctcggcacccatcggctcgggcggacactcggccgaggcggcaccgcagacctcgtgataccaatggtcgcgcccgtccttcatcgcgacggcggcgccggtgtgcttcacgacaatcacgtccttgatcgtcggcgcgttcttcaacgcttcgtccgcgttcgccttcaacggcaccttgcgcccaccgcgcaagccctcgtccgcggtgatcagcagcgtcgaggcgcaatcctcgatgcgcccgtgcaggctctcgggcgagaacccgccgaacaccaccgaatggatcgcgccgatccgcgcgcaggccagcatcgccaccgccgcctcggggatcatcggcagatagatcgtaacgcgatcacccttcttcacgccgagcgccttcatcgcgttggcgagacggcacacccgctcatgcagcgcgcggtacgtgatgtgggcgctctgcgtcggatcgtcgccctcccagatgatcgcggtctgatccccgcgcgcggcgaggtgccggtcgaggcaattggccgaggcgttcagcacgccatcctcgtaccagcggatgcgcacgcgtccggtgtagtccacgtccttgatcctggtcggaggcttgatccaggagatccgcttcgcctcgttcgcccaaaacgcgatcggatcggccttctcggcggccaccatcgcctggtacttcgccgcatcgacatgtgcgcgcttggcccactcgggcggcacgggaatcacggtctcggcggccttggtcgcgatggtgtcgggcatcggcggtctccccaatcgttgcggcgcgcggacaggatcacgcaggcgcgccacgggcgttgttctgggtcaaaacctagccgatgccgcgggttggaggggagccccctcagccccgcgcggccctgagcgcctcttcgggactgatccggccgtcatacagcgcccgtccgacgatcacaccctcgatccccgccgcggcgcgggcgcgcacggcggcaatgtcctccacccgtgccaccccgcccgaggcgatcaccggggtcgtgagcgcccaggcgagatcctcggtctgttcgagattgagcccggccagcatcccgtcgcgcgagatgtcggtgaacacgatcgccgccacgccggcgttctcgaaggcgagggcgagatcgagcgcgcgcatcgccgtggtctcggcccagccttcggtggcgacgaagccgtcgcgcgcatcgatcccgacgacgatccgtccgggaaacgcccggcacgcctcgcgcacgaggtcggggttcttggccgcggcgctgcccaggatcacccgccgcaccccggccgcgagccagcgctcgatcccggccatgtcgcggatgcccccgcccagctgcaccggaatgtccaccgccgcgaggatcgccgcgaccgcctccgcattggcgctgcgtccctcgaaggcgccgttgaggtcgaccacatgcagccaatcgaaccctgcgtcctgccaggcccgcgcctgcgccgccgggtcatcggcatagaccgtcgcctcgctcatctcgccgcggcggagccggacgcaggccccgtccttgagatcgatcgcgggatagaccgtgaccgctttcacgaccccttggcccgccgaccggtcggcgcgaggcacttgaagtagaaatggcccgcgatcacccggccgccgacctgcgcatagacggggtgtgtgccccagcgctggaagcctgcggcctcgaacaggtggatcgcgccctcctgcgtctcgcgcacatcgaggttcagcacgcgcacaccgatcgccgcggcgtaggcctcgacccggcggaccaggagccgcgcgaggccatggccgcgcgcatagggcgcgatgaagaagtgcatgagctgggccgagaaggcctgcgcctcgttgttgcgcggcgggcggacgagctgggccgcgccgacgatggtgccgtcgagccgggcgacgaacaggctgcgctcgggcaccagcagcacgccgcggaaatagcgcgccagcgtgtcgcgcggctgtggcttcacccagccgaacccgccaccgtccatgatggcagccgccgctgcctcggcaagctcgttgagctcggtctcatcgagcgcctgggcacggtccaccgccagcgtcggctgcggccgcggcggcgtggtcgatgccccatgatgctgctccggcggaggcgccccgcggtcgttccgttccatcgcgcgccgtctcctcacgggctccacgccaggaagttcgccaggatgcgcaagcccgttgcctggctcttctccgggtggaactgcacgcccgcgacattcccgcgcgccaccgcggccacgaccgggccgccatagtcggtcaccgccatcacgtccgcctggtcccctgcggccaatgcataggaatggacaaaatagacatgggaagcttgcggaagtccttccaggagcgggtgcgccggctcacgccacgccaacgcgttccaacccatctgcgggtagggcagatgccccgccggatcgtggcccggcaggtcgcggatgtgcaccacctcgccccgcagccagccgaagccctggtgcacgccatgctcgagcccgcggtcggccagaagctgcatgcccacgcagatgccgaggaagggcaccccgcgccggcgcaccgcgtcgcccagcacttcgagcatgcccggcacggcggaaagcccggcgaggcagtcggcgaaggcgccctggcccggcagcacgatccggtcggcgcgcgccaccgcctcggcctcgccggtgaccaccacgcgcacgccgcgcgcggcctcggcggcgacccgctcgaacgccttggcggcggagcggagattgccggagccgtaatcgacgatggcgacggtgccgctcacgcccgcgccgcactccaggcgagcaggtccggccggccggcatagagccgtgccagcgcctcgtcctcgccccccttcgccgcgaccacgccgatcatccgccagccgcgtcgttccagggtccagcggcggaggtcgcgggcgtggaacccgaccagaagctgcacggcgaaggccgcaagggcgatcgcggcctcgggcagcgcctgggccgccgcgccgaagatcgcgccgagcgcgacgtagagcaccagcaccagccacatgcggttgaccaggaaccacagcatcgggaacaggaaggccagcgccgcgaagccctcgcgcacgaggatggtctcctggccctggcggacatgcaccgtccagacgcgcatcagccgacgagactgcccttggtggagggaatcgcgccggcggcccgcggatcgggttccaccgccgcgcgcagcgcacgggcgagcgccttgaagcaggcctcggcaatgtggtggctgttcgcgcccgcgcgcagcgtcacgtgtagagtgatccccgcgttggtggcgaaagcgcggaaccattcgacgaacagctcggtgtccatctcgccgaccttcatggtcgggaaggtcacatcccaggcgagatacggccggcccgagatatccaccgccgcctcggccagcgcctcgtccatcggcacggtggccgcgccgtagcggcggatgccgcgcttctcgccgagcgcctgcgccacggcctggccgagcacgatccccgtgtcctcggtggtgtgatgggcatcgacatgcaggtcgccctcggccgcgagctcgatgtccagcatcgagtggcgggcgagcgccgtgagcatatggtcgaggaagccgatcccggtcgcgaccttggccgtgccgctgccgtcgagatcgacggtcgcggcaatgcgcgtctcgctcgtctcgcggcggatggcggcgcggcgcgggggggtcatggccacgcttctagcgaagggacgcggcggcgtccacgcgggcgggttgctgcggaacgcccggcgggccatctatcggggaccttggacacctccccggacagcatgagcacgcacgaccccaccggctggcacggcaccaccatcctttgcgtccgcaaggccgggcgcgtcgccatggccggcgacggccaagtcagcctcggccagaccgtggtgaaagggaacgcgcgcaaggtgcggcgcatcggcggcggcgcggtgctggcgggcttcgccggcgcgaccgcggatgcgttcacgctgctcgagcggctggaggcgaagctggaacggtttcccggccagctcgaacgggcctgcgtcgacctggcgaaggactggcgcacggaccgctatctgcgccggctggaggcgatgatggcggtcgccgacaaggaccgctcgttcctgctgaccggcacgggcgacgtgctggagccggaggattccgtgatcggcatcggctcgggcgggaactacgcgctggccgcggcgcgggcgctgatcgatcgtgaggacatggatgccgaggcgatcgtgcggcgggccatggcgatcgccgccgagatctgcgtgtacacgaatgacaggcttacgctcgaagtgatctgaagaaagcgtcccggggggccattggccccccggacccccctggagggcgtcgctcccgttggtcgcgacgcgggccccgaccaacgggaggggcccccaggtgcagggggtccgggggaccagcgtggtcccccggtcctatggagacctggatgaccaactactccccgcgcgagatcgtcagcgaactcgaccgcttcatcgtcggccagaacgacgccaagcgcgccgtcgcgatcgcgctgcgcaaccgctggcgccgccagaatctgcccgaggacctgcgcgccgaagtgctgccgaagaacatcctgatgatcgggcccacgggctgcggcaagaccgagatcgcccgccgtctcgcccgcctcgcccaggcgccgttcctgaaggtcgaggcgaccaaatacaccgaggtcggctatgtcggccgcgacgtcgagagcatgatccgcgacctcaccgaggtctcgctgcagatgacgcgcgagcggctgcgcaaggaggtcgccgccaaggccgaactcgccgccgaggagcggctcgtcaccgcgctggtcggcgagggcgcctccgccgagacgcgcatgaagttccgccgcctgctgcgcgaagggaagctcgaggacaaggaggtcgagatccaggtcgccgacaccggcggcgtgccgatcggggcgatggatatccccggcatgcccggcgcccagatgatgaacatccaggagatgatggggaagatgttcggcggacggcagaagccgcgccgcaccagcgtcgccgaggcgcgcgacctcctccagcaggaggagtccgaccggctgctcgaccaggaccgcgtacgccgcgaggcgatcgaggcggtcgagaaccacggcatcgtcttcatcgacgagatcgacaaggtctgcgcgcgatccatggacggctcgggcttccgcggcggcgacgtcagccgtgagggcgtgcagcgcgacctcctgccgctgatcgagggcacgaccgtcacgaccaagcacggcccggtgaagaccgaccacgtgctgttcatctgctcgggcgcgttccacctcgccaagcccgccgacctgctgcccgagcttcaggggcgcctgcccatccgcgtcgagctgaagccgctgtcgcgcgacgacctcaagcggatcctgaccgaacccgaagcgagtctgatccgccagtacgtcgcgctgatgggcacggagcgggtcgagctccgcttcaccgatgacgcgatcgatgcgctggccgacctcgccgcggcgatcaacgagcgggtggagaacatcggcgcgcggcggctgcacacggtgctggagaagctgctcgacgagatcagcttcaccgccgccgaccgcccgggcgaaaccatcacggtggacgcggcctatgtgaaggagcgggtcgcgccgctggccgcgaacgcggatctcagccgcttcatcctgtagcggacggcagcgggtcggggcgcgctcacgcccggccgcacgatctcgaaggacttggactgcccgagcaccgtccggccggccggacgtcagggaccggcttggatcaacggaacggcgggcggggccggtgatgatgccgtcttcgacggcgaggtcgaggccggtgagcgcgtggacgccgtagaagccgcgcgtgaggccgcggacgtcgagcaggcgcatgggcacgagcccagggagatcacggcgcgaggacagggggagggttacggtggcctcgctggcccgagtgcgcgctccgcggcggcccgtcaccgacgaaaaaagggcgagccgtggctcgccctctcattcggtggacccggaggtccttgttaacggaaggcccgcgtttatcccctgggcgaccagaggccaccccatcggctaacggagtcgaggcttccggcaggatcatgtaacgtttcctccattgaagcaaccggcaggatgcgtcatgcactatcggctggccctggatatcggcgcaaactcgatcggctggtgctgccttcggttgaacgaggccggtcagccggccggcatcctggcgatgggcgtgcgggtgttcccggacgggcgcaaccccaaggacgggtcctcgaacgcggccgcgcggcgccagccccgcgccatgcggcggaaccgagaccgatacctgcaacgcagacgcgcgctgttgaacgccttgacccgattcgggctgatgccagccgatgaggcggcacggtgtgccgtggcgcagcgcgatccgtgggcgctgcgggccgaggcgctgacgcgacgcctggcgcccgaggagctggggcgcgtgctgttccacctgaaccaacgccggggcttcgcctcgaaccgcaaggccgaccgcgggaacgaggagaaggggaagatcgccgaggccgcggatcgcctccgggcggagctcgcgcgggccgaggcggcgaccctgggcgcgtggcttgccgagcgacacgcgaaacgcgagccggttcgggcacggctggtcggggctggcgcgaaggctgcctacgatttctatccgacgcgcgacctgattcaagccgagttcgatacgatctgggccgcccaggccgggtggaacccggctttgaccgaggagatgcgggaggcgcttcggaccatcatcttccatcagcgcccgttgcgggcggtgcggcgcggcaagtgctggctggagccgggcgaggaccgcgcctatcgcgcgatgccgacgacccagcggttccggatcgcgcaggacctggcgaacctgcgactgaacacccccggcgagccggcgcgcgggctgacggaaggggagcgtgcgcttctggcgtcggcgctgcgcaaggggaaggacctgagtttcgaccgtatccggtccgttctgaagctgcccgccgataccgatttcaacctgcaaagcgcgaagcgcgacgagctcaaaggggacgagaccgcgcacaggctgggcggcaagaaggctctgggcgacgcatggcacaagctgccgctggacgcccaggacgaggcggtcgaggcgctgctggaggccgaggacgaggcggcgctgatcgcgcgcctcgcggtcatcgggctggacgaggccgccgcgcggaccgcgaacgacgtgacgttgcccgacggcaccgcgtccctgtcgctgaaggcgatgcggaccatcctgccgcatctggaacggggcctgcgctacgacgaggcggtgcaggcggcgggctacgtgcaccactccgaccgacgtaccggcgagatcatgaagcggctgccgtactacggcgaagttctgggcgagcggatcggcaccggatcgaaccagccagacgatccggaggagaagcggttcgggcgcgcgcccaaccccacggtgcatgtcgggctgaacgaactgcggcgcgtggtgaacgcgctgatcgaccggttcggccatccgcacgaggtggtggtggaagtgctgcgcgaactcggccgcagccagaagcagcggcagcagatcgagcgggagcaggccgagaaccagcgcgcgaacgagcggcgcgcgcaggagctgaaggcgctggggttcccggtgaacggacggaacctgatgcggctcaggctgctggaggagcaggcgttcgatccgaaggatcgcgtctgtccgtatacgggaacgatcatcaccccgcgcaccgcattgtcggaggaggtggaagaggatcacatcctgccgtttgcgctcaccttcgacgacagcacggccaaccgcgtgctgtgcacgcgcgaggcgaaccggctgaagcggcggcagacgccgttcgaggcgttcggccatacaccgcagtggccggcgatcctggagcggacgaaatcgctgccgcagaacaagcggtggcggttccagcctgacgcgggccagaagttcaaggacgaggaacagttcctggcccgccacatgaaggaaagcgcttggctggcgcggctggcgcggatgtacctggaagcgatcgcgcccgagcgggtggtggcggtgccgggccggatcaccgcgatgctgcgcgacacgttggggctgaactcggactccgtgctcggcaagggcggggcgcggaaggaccgcaccgaccaccggcaccatgcgatcgacgcggtggtggtggggctgatcgaccggtcgttcctgcaacgggtgcagacggcggcgcggcggagcgaggaggagggacggcggcgcttcgccgatctcggtgagccgtggccggggttcgtggcggaggtgggcgcggcggcgcgggccatcgtggtgtcgcacaagccggatcacggctggcaggacgcgctgcacaacgaaacggcctacggcccgatcgtcggcgcgcagcgcggcggaccgaacgtggtggtgcgtcggccgatcgagacgctggcggacaaggggaccgaggcggcggacgcggttcgtgacgcgccgctgcgcgagaagctgcgtgcggtgctggcgatcacggacaaggcggcgcggaaggccgcgctcgcagcgatcgagcatccggcgggtgttcgggtccggcgcgtgcggatggtggaacggctggacagcacgttggcgatcgcggatcggcggaccggcaagccatacaaggtgatgaagcgggaaggcaatcaccgcgccgaggtgtggcggatgccggacggcaagctcaagctgtgggtggtgtcgacattcgatgcggcgcaggaggcggaggcgcggcgactcgggcgcaaggtgcccgacctgcggccgcatccggcggcgaagctgctgatgcggctgcacaagaacgacatggtagcgctcggcgaggaagagggacggcgcttgatgcgcgtggtcaagttcagcgaggggaacattacgcttgcgccacaccaggagggcggcaatctcaaagcacgtgacgcctcgaaggatgacgagttcaaatactactacctgagcggcaagcgcctgcgcgaggacaaagcacggcccgtttcggtcgacccggccggcgtcgtgcgtgatccgggaccccttccgtgagccccctgggcaggctggtggagatcgccgaggaggggcggcacctcgccaaggatcgcggcttcctgaccgtctcagcgcgcggggaggaggttggccgcgtaccgctggacgatctcggcggcgtgatcgccacgggacacggcacgacgctgtcgctgaatctggcggcggcgctggcggagcggggtgtggcgctggtgttgtgcggacgcaatttcgtgccgacgtccttgctctggcctgtgacagggcaccatgcgcagcagcgacgcatggaggcacagatcgcgcagggcggcgtgctggcgaagcggctctgggcgcagctcgtcgcggccaaggtgcgacgccaaggctgggttctggcgcaggtgggcgagcggacgggcgcgttcgcgcgcttcgcgcggatggtgaaggcgggcgatcccgagaacatcgaggcgcaggcgtctcggcgctactggccgctgctgttggggcgcgcgttccggcgcgatccggacgggaactggccgaacgcggcgctgaactacggctatacggtgctccgcgcggcgacggcgcgcgcgatctgcggcgcggggctgcacccgtcgctcgggatcttccatcggcacccgcgcaacgcgatggcgctggcggacgacctcatggaaccgttccgtcctgtggtcgatctgctggtgcgacaagcgctggatgagggcgaaggccgcatgacacccgacgtcaagaagcgtctcgccggcgtattggcctacgacctggtcagcgcggccggaacgacgccgctcggcacctgcgtgcagcggctcgcgcagtcgctggcatcctgttatctcgatggcggaactgtcctcgacctgccgcatgtcgaagtgccggcggacggacgggaggatgcggatgagccgccgttctgaggcgctgtccgcctatcggttcatgtggctgctggtgatgttcgatctgccggtgatgacgaaggcgcagcggaagaaggcgaccgcattccgcaaatggctcctggacgagggctacgagatgagccagttcagcgtgtacctgcggttctgcgccgggaaggaacaggtggagcgccggatcagggatatcggccgcaatctgccgggcaccgggagcatccacgccctggcggtgacggatcgccagttcgagcagatgacgacgttccggggccgcgagcgcgggcggggccgaagggcgccggagcaactggatttgttctgatggcaagacatccgactcctccggtgcagcgattcccgttgt

SEQ ID NO: 710 - DNA, 14240 bp, synthetic construct
  misc_feature 1..14240: note = Synthetic
  source 1..14240: mol_type = other DNA
cggttgccgcgtcatccgtgatcgagatcacggtgcttttttttgaaatcggtgatggctttcaaagcggcccttttggtgtcccgctctgcgagcgggagggagcgcgcttagcttctcttttttgtcttgaagcctgccaggatagcgttgttggcaggcttcgagcgatctgggtggttggtgagtctcagagcgagggcaaagcgggaccagccccgcgacctgcgcgaggttggccgcttgccctcacgatcggctggccggagccgtcccgtcgcatcaggcccgccacgccaggaggcgcgtggacggaaggtcgacaacttctcgacggctgcctgtgccgccgggcgtccttgggctttcgacctgcgcggtgcccttctggtggatgacgccagccccacggaaccagtctcagccaacgcgccgccgtatccaaccgaccacgctgacccagccgatccaccgacacgcggcagatggccggacttaaacagacgagttcggttgcgcgcgcagcggaaatccaaccgccgcatttgtttagcgctgagatctacgcgtcacaaagtctgacccatccgctccatgtccaccgtgctggaactgctcacgagcggcttgtcgggcaagtgcgcgaacaatggccgaaagtgacgcttctaacggcgtggcgagcggcataggagcaacgggcaaggcggaagatccctgaggccctgtcggcgctgccaccgacctaatcgttccgctctgcctgctgctgcccgtcaccgaaatctcgccagcgtgtttcgaaggcctgaattatcatgtgtctgctatggcttgaaagattgggcaaactgctcggatttgatggcccatgctatgcctgcagctcgtgctacgaggccacagagggccgggtaagctaagcttttagggttgttcaatgccggttgggcaacggcgggccgtagcccgccgttcattttgtgcgcccaagggcacttgttaacggaaggcccgcattcccccatctgctagttcggaaaattgaccgtccgcaaataccttgtatggatcagggcttttcagtcaacatccgtctatgagctatcgcatttccatcgatatcggggccaattcgatcggctggtgcctactttccttggatgaggatggcgagccgagtggcattctcgacatgggagtccgtgttttccctgacgggcgagatccaaaaacgcaaacgtccctcgcagcagaacgtcggttggctcgcggcatgcgccgacggcgggatcgctacgttcagcgtcgaaccgcattgctaaatgccttaacgcgactgggcctcatgcctgagccagacgatgacaggaagaacattgccgggctcgatccttaccaactgcgtcgtgacgctctgttgcggaagctaagtccgcacgaactcggtcgagctatttttcatctcaaccagaggcgaggctttcgcagcaaccgtaagactgaccgcagcaatgaagaagctgggaagatagcgagtgctgccgacaagctccggacagaaatcatccgtgcaaacgcaccgacactgggctcatggctggctgaccgtcacgagcgtcaattgtgggtcagagctaggttggtcggcactggggccaaagccgcttacgacttctatccgacccgcgcgttggtcgaggaggagtttaacgcgatttgggatgctcaattgaaatggtctccaaatctgacgaacgccatgcgcgaaaccctggcgaacatcatttttcaccagcgccctttgaagcagcctcccatcggcaagtgctggcttgaacccgcatgcaccagagcgcccaaagcgctacccagcactcaggctttccgtatagcgcaagatcttgcccaccttgccattcgtcgtgttggagagccggatcaagcgcttgatattgatcagatttcgaggctagcagccaagctgaacaacggatttgatctgtcattccaccatgtgcggaaggagcttgggctcgaccaaggcgtaacttttaacctggaaagcagctcccgagatcagatcaagggagcagaaacggcttccaggctggcaggcaggaagggaccattagcctcgatctggccttcattgcccattgatcagcgcgatgcgatcgcttcagcattgctgaattctgacatgccgttcgagaccatcgacgcactggtttcactgggtatatctgaggcagatgctgaattggcggaacgaattccgctaccggaaggtcacgcatcgctttcaaccaaggcaatcctgaacgtgctgccccacctggaaaggggccttcgatactctgatgcagttattgcagcgggctacgcgcaccattcggatgaccgggacggtgtgatccacgatcgattgccatactacggcgcgatcctcgcatctcgccttggcacaggaagcggcgagccggacgatctggcagagatacgctttggcagggcgcccaatccgacagtccacgttgccctgaaccagttgcggcacgtggtgaacgctctattggaccgatacggccacccaaaggagatcgtcgtcgaggtcctccgtgagctaaaccattcggcattcgaacgccgaaggatttccaaggagcaagagaaaaacgccaggcgccgggaggagtgggccaggcagcttcaggagatcggcgtaaaggtaaacggtgcgaaccttgcgagaatgcgcctgtggacggagcagggtgaagatcctcgcgaacgcctctgcccatataccggcgaacgcatctctctcacccgcctgttctcagctgaggtggaagaggatcacatcctcccgttcgctcagacgctggacgacagttttgccaaccgtgtcgtcgtgatgcgtgaggcgaaccgtggcaaagccaaacaaacgccgcacgcggcgtttcatgcctcgccgcagtggcccgagattcagcaacgagcgaaactgctgccaccttccaaggcgtggcgcttcgccccggacgcaatgcaaaagtggcaaggtggaaactcggatttcctcgctcgccatatgacagacagcgcctatctggcgcggctgacgaggttgtaccttcgcgcagtttgcgaccctgacaaggtctggtgcgttccaggcaggctgacagccatgctccgagatgcacttgggttgaacagcaagaccgtgctcggcaaagggggcgcccgcaaggaccgcacagaccaccgccaccatgctattgacgccctcacgatcggtctgattgaccggtcattgctcaaccgtgtgtctcgcgccgcggggagagcagagaacaacggaaatcggctgctcgataggctggatgaaccctggccagggttcatccaggacgtatcgtgccgagttcgacagattgccgtgtcattcaagcccgatacggctgccgtcggcaggcttcacaacgacaccgcgtatggcgcaattccaggtgccgacggccgcatgccaaatgttcggcatcgagtgcccatacaatctcttgccggctggaaatcggacgaaattgccaaggcgatcgcggatttccgcctggccgccaagatatccagcgtcgtttccgcacatcctaaagtgcccgaccaggccgccgcgctgtcgtcgattgcgcatgatggagcaggtcgtcaggtgcggcgtgttcaggttcgcgaacgcctggagggcgtgcaccccattgccgatcgtcagactggccgcccctacaagctggtgaagctggacgcaaatcactgtgcagaattctggcgtgtccctggtaaggccggtcagaagtccgccgtgcagatgagtgtcgtacctatgctcgaagccgcggccgaggaagttgccaagcacaagcggctcgagatccccgatcgccggcctcatcctgcggccaagcttctgatgcggctgcacaagaacgatgtcctggcgatcggaaccggcaccgaacgtcgcctctatcgtattgttaaatttacgcatggtgttgtgacgtgtgcagaactgcatgagggtggagccttgaaggcgcgagatgccgacagaggtgactctttcaaatacctcaatgcatccaaatctaaattatcagctggaaacgcgagaaaagtgctcgttgacccatctgggcacgtctttgacactggccctctggtatggtgacacccatcggtcgcttcgttgaagtgagcgaggaggggcaatacctctcaaaagagcgtggtttcatgctcgtgtcagccggcacgaaattggtcggcaaagtcccgttggatgacattgcggctgtcatggccactgcccgtggcacgacggtctcagtctcattgctggcagaactggccgagcgcggaacaccttttgttgtgcccggggccaactttgccccgtcggccctgctttggccgattgtgggccatcacgcggtgtctcgtcggatggagtcgcagatcgccaacaaccgcgccttgtccaaggcgctgtggcagcaggttgttgccgccaagatcagacgccagggttgggccgtgtcgcaatctggcggcagctcggcgcccttcgaatttctggcacgccgggtcaagctgggcgacgaaggcaacctcgaagctcaggcggctcggcgctactggccgctgatgtttgggccgcaatttcggcgggatcgtgatgcggcgggcatcaacgctctgctgaactatggttatgcggtgctgcgcgcaattgtggcccgggcgctctgtgccaccggccttcaccccggggttggcatctttcaccgtcacccaagcaatcccatgccgttggcggatgacttgatggaaccatttcggccgatcgtcgacctcacagtcacgcaactggttcgtgatgacattcttgaggttggtccagtcgccaagcgacgtctggttgcaaccctctggcaagaccagaaaaccgcgcagggtacaacgccgttgatgacagccatcttacggaccagccagagtcttgcggacagctatcagagtggcatcgccgaattactgttcccgttcaccgatcttgatggtgacgacaatgtccagaacgctgagtggttaccggatcatgtggatgattctgatgttcgacctgccagtgatgacgaaagcccagcgtaaagctgcatccgggttccgcaattggctgttggataagggctgggagatgagccagttcagcgtctatctgcgctggtgtggcggcaaagagcaggttgaggctcgactgcgggaggttgctcgtcgtgtgcctccggagggtaaggtccatgtcgtcacggtcaccgacagacagttcgaatcgatggcggtcctcaatgggccggccagatcggctggacgaaaggcacgaccagagcaacttctgctcttctagccagtctggtgcagaccttaaacagcatgccagaccaccacactcccatgttttcaatgagatatgtgatgatctggtctagcagatgggggagtgcgggccaaccgcaacttcagcatggatggccagttctcggacctggtctagcagatgggggagtgcgggccaaccgcaacgaaagcgcgttcatcgacgccgacgcgggggtctagcagatgggggagtgcgggccaaccgcaaccttgatctcatcgtgcacatcgcgaccgcggtctagcagatgggggagtgcgggccaaccgcaacaggcgagcgcgctgcccgaccacatggaccggtctagcagatgggggagtgcgggccaaccgcaacgaaagctgatcggtgttggcgaacgccgtggtctagcagatgggggagtgcgggccaaccgcaacagaggtgcggcaacggagttattcgggaaaggtctagcagatgggggagtgcgggccaaccgcaacatgatcacgccgcgataccgcttgccgcggggtctagcagatgggggagtgcgggccaaccgcaacttatgcggtgcgggcggattatccttgccggtctagcagatgggggagtgcgggccaaccgcaacaaagcgcatttacgccattgcctttctcagggtctagcagatgggggagtgcgggccaaccgcaaccatcgcggtccacgccttcgagccgacgtgggtctaggcggtgaactcataaaccgccttccggctcggcctcactcgtgattcaaggtttccgaatctgggagccttggatgacacgccgccgatatgagttgactgaccatgagtggttggtcctttcgcctcatctgccgaacaagccgcgcggcgtgccacgtgttgatgatcggcgcgtgctgaacggcattctctggcggtttcgcaccggctcgccttgggcggaaatccccgagcgctatgggccaccgaccacctgctacaatcgcttcgtccgctggcgaaaagcagggtttgggaccggcttttagaagctgtctcagctgcttacgacggcgacattgtgatgatcgatagcacctgtgtccgcgttcaccagaacgctgccacgggaaaaaagggggtggagatggttgcatgggacgttcccgtgccggccttaccagcaaactccatgcgctcgtcgatgcggaaggtcgtcctgtcacgttgcaactgacggctggccagattgcagattgtcaggaagccgaggcgctgatcgagaccgtgggcgaaggtgatatcgtgttgggagacaagggctacgacaccaacgccatccgcgccaaactcgcagcgaagaaggcttgggcaaacatcccaccaaagaccaaccgccgtggaacgtgcctcttttcaaaatgggtctaccgtcagcgcaatctggtcgaacgcttttttaatcggatcaaacagttccgagggatcgcaacccgatacgacaaagatccggctaacttcccggcctccgtcaagctcgtggcagcaaagggatagtgccagaatttatgagtctgcggcctagttcggaaaattgaccgtccgcaaataccttgtatggatcagggcttttcagtcaacatccgtctatgagctatcgcatttcgatcgatatcggggccaattcgatcggctggtgcctagtttccttggatgaggatggcgagccgagtggcattctcgacatgggagtccgtgttttccctgacgggcgagatccaaaaacacaaacgtccctcgcagcagaacgtcggttggctcaccgcggcgctgatcggcatatccgtcggcggtggctcgttgctcagcacgtggttgaaacttgcctttgatcgccagcgcccagagctcgcgctgcatgcggtcgccgcggcctcggcgagctttcccagtggtcatgcgatgctgtccgcggtcacttatctcacggtcggcggcttgatcatgcgcacgcatgcaagcgctgcggcgaagctgtatgtgtttgcagtggcaatgctgctgactgtggcgatcggtgtcagccgggtttatcttggtgtccattggccgacggacgtgttggccggctggtgcgccggcgccgcctcggcgctgctattcgtgctcatcgacgtctggctggaacgctggcgcaacatccggacggcgagccatccgccttatcgtgccaggtggtgacagcgcctgtggtggcattgcgaagttcggccttaatgaccgatcagcggcagtctgagtaacttccgagcctgcccgcaaagcggccgtgccgttagcgtgtcatggttcggcccttaaaagtcgcaacgttccggggcgcggatgctcgtccgatcagggagagcgcgatgccacaggccgaccccccgaataaatcctggttcaggcgatggatctgggagcttgcggccgggcttgccgtcgctggtctcgcgatccttctgtccgaaacccagggctttggcctgtggcggccacgcgggcccgcacctctcagcctttacggtaatgtcgatatccgcgaggtcagcctcggctttcgcgtcgccgggcgcatgcttgcgatgccgttggacgaaggggaccacgccacgtccggcaccctgctcgccacgctcgacccggacccgtttcgcgaacgcctcgccgcgtcctcggcgaaactcgccgggatgcaggcggcctacgccaaggcgatcgccggcaaccggccccaggacatcgccgccgccgaggcgcagctcgccaaccaggaagccacgctggtgaacgccgaggcgatgtttcgccggcgccaatccctggtgcgcagcggggacgcctcacgcgaggacaccgagacgatggcggccgcctatcactccgcccaggccgcggtcgatcaggcgcgccaggcgctgtcgctgtcacgcgccggcacacgggtggaggatatcgacgccgcccgcgccgacatgcagaccgccgccgccgaccgcgcggccgcgcagaccgagctcgacgacacgcgcctgctcgccccgtcagacggcacgatcaacgtccgcgccaccgagccgggcgcgatcgtcgcggccggtgcaaccgtgttcaccctcaccatcgatcggccgctgcgggtgcgcgcctatgtcagcgagccggaactggggcgggtgaagccgggacaggcagtgcagatccgcaccgatggcggagggcgggcctatgccggcaccatcggtttcatctcgacggtcgccgagttcaccccgaaaaccgtcgagaccaccgatctgcgcgtcgatctggtctaccgtctgcggatcatcgtcaccgatccggacgagcatctgcgccagggccagccggtgacggtgctcgtcgtcgagccgcaagagacgccgaggtgacagacgccgcatcggtcagcgatgtctcaaagcgcttcgccaaatcgccgcaagccgcgctggatcacgtgtcgctcaccgtgcgacccggcgagatcaccgggttggtggggccggatggcgcgggcaagaccacgctgatccgcatcctcaccggcctgctgcaccccgattctggaacggttgcggtgttgggcgcggcaccgggcgcgcggtcggtcgatatcggctacatgccgcaacgcttcgggctttatgaggatctgtcggttcagcagaacctctcgctctacgccgagctgcgcggcctcaaccgcgccgagcgagcggcggcgtttgcccatctgctggaattcaccgatctcaaacggtttcaaacgcgcttggccggcgatctctctggcggcatgaagcagaagctgggtcttgcctgtgctctggtgaaaacgccgcgtctgctgctgctggacgagccgagtgtgggggtcgacccggtctcgcggcgcgaattatgggcgatggtgcagggcctgttgggctcggggatcgccgtgctctgggccaccgcctatctggacgaggccgagcgatgcgcgcgcgtgttcctcctcagcgaaggcaagattgtcttcgcgggcccgccggcggagctcgccaagagctgcgagggtcgcatcatccgcctcaccggcttcgctggcagccggcgcgacctgttggtccgcgccctcgaccaacccgaagtggcggacggcacgatccagggtgacgccgtgcggctgctgctgcgcaaggcaggcgtgccgccggatttcgccaagatcggggcgggcaccgccctacgcagcgagccggcggaggctcgtttcgaagacggcttcatcgatctgctcggcggcggtccgcccggcaccagcgcgctcgcacaggattatgcaaaagtgccggcacaaaccggcccggccatcctcgccgcgcatctgaccaaacgctttggcagcttcaccgcggcagatgacatcaatctcgacatcaggcgcggcgagatcatggggctgctcggccccaacggggccggcaaatccaccacgttcaagatgatgtgcggcttgctgacgccgagctccggcacatccgccgtcggcgggcacagcttcgccggcggtgccgccgcggtgcgcgcaaggcttggctacatggcacagaaattctcgctctacggcgatctgtcggtggcacagaacctcgccttcttcgccggcatctacggcatcaggcgtgatcgccaacaggcacggatcgacgcgttggtgcatatcttcgcccttgaacgctatctggccgacaacgccgccaccctgccgctcggctacaagcagcgcctggccttggcctgtgcggtgatccatgagccgccggtgctgtttctggacgaagcgacgtccggcgtcgacccgatcaaccggcgcgagttctggtgccacatcatggggctggtggcgcgcggcgtgacggtgctggtcaccacccatttcatggacgaggcggaatactgcgaccgcatcgcgctgatctaccgcgcgcgccagatcgccaccggcacgcccgatgagctgaagcgcctggcatcgggtgacgcggatatgacgatggaagacgcgttcatcgccctcatcgccaaggcggacgcggcccgcgaggcaaaggcggcatgaacctgcgccggatcgtggccctgatcgaaaaggagggcgtgcagatcttgcgcgatccctcaacgttgctgatcgccttcgtgctgccgctgatcctgctgttcctgttcggctacggcgtgtcgctcgataccggccacacacggattggcctggtgctcgaaagcagctcggccccggccttggggcttgcgcaaagctttgagaattcggcgtggtttgacgtgcagctggcgcgcagcgtggccgagctgcgccccgagctggtggccggacgcatccgcggcatcgtggtgatcccgctggatttcggcgagaccgaggcccgcgccgtacgcgcatcgccgatcgagatcatcgtcgatggttcgcagcccaacacggcaagtttcgttgccgcctacgccgaaggcgtgcgcgcggcctgggcgcagcccaggccgccggccgtcaccctggatgcgcgcttcaccttcaatcccgagctgcgcagccggttctttctggtgccgggcgccatcgccatcgtgatgacgatgatcggcaccttgctcaccgcgcttgtcatcgcgcgcgaatgggagcgcggcaccatcgaggcgctgttcgccaccccggtgacgatgggggagttcctgatcagcaagttggtgccgtatttcctgctggcactcggctcgatggcgatgtgcacggtcctggcggtgaccgtcttcggcgttccgttgcgtggctctgcgtgggcgttgctggcgatcgccgccacgttcctgacctccgccttggggcaggggttgttcatctcggccgcggtgaagaaccagttcgtcgccagccagatcgcgctgctgacggcgttcttgccggccatgctgttatccggcttcattttcgagatcggctcaatgccgcgcgccttgcaatatctgacccggatcgtgccggcgcgctatctgatcccctcgctgcagacggtgttcgtggccggcgacatctggcgcctgtttctgcccaacatgctggccttgctggggtttggcgcggtgttcgcggccctgacactgcgtgtcacccgcaagagcctggattgatgcagcgcatccgggcgatgatcatcaaagagttgctggccacggtgcgcgacccgcgtgcgcgcctgaccctgatcctgccgccgctgctgcagctggtggtgttcgcactggccacgacgcttgaggtgaagaacttcgatgtcggcgtgttggacacctccggcggggcggcaagtgtcgcgtttgaggaacggctgagcggcagccgcaatgtcgggcgcgtcgtgcggctgcactcggccgacgagctgcgcgcggcgatcgacctgcagacggtgctggcggcggtggtgatcgaccagcgctttgatcgcgatgtcgccgcggcacggccggcgcgcatcggcgtggtgctggatggcaggcggtccaacgccgcccagatcgtggcgggctatctgggcgcgatcgcggcctccgtgggcgccgagctgcggccggacaccgcgccgcaggccgggcccgccagcgtgctgcgcaactggttcaatcccaatctggaatatgtctggttcaccctgcccagcctgatcgtgatcatctgctcggtctcggcgctgtccgtcaccgcgcagtcggtggcgcgtgagcgcgagctgggcacgttcgagcagttgctggtctcaccgctgcgcacgcatgagatcctgatcggcaagatggtgccgccgatgctgtcggggctgttcaacggcacgctctatctggtggcggcggcgacggtctatggcgtgccgttcaccggctcgctgctgctgttctatacaagccttgtggtctatctgctgtcgctgatcggcgtcgggatgctggtctccacgctgtcgcgcacacagcagcaggcgttcctcggcgcgtttctggtgacggtcccggcgaccttgctgtccggctatgccgggccggtggacaacatgcccgcctggctgcagacgatcagcctggccgatccgtgccggcattatctggtgatcgtgctgggcctgttcctcaaggctatgccggcgcgtgaggtctggttgaacacctatccgatggtgatcatcgcggcggtgacgctgtccgccgcgttctggctgttcaaggcgaagaaggagtagacgccttcgcacctcgctccggtaccgacgtccggccagtaagctttaacagccctgtttgcaggtatcggccgcgttccaatggatcagccgaacgatcaacgaacccggctcgcgtgtcggctcgtcgccgatcgccagcaccaggccgtcgctgggggcggtgtattccttcacaacggcgccaaacgcgttcatctgcgtggcgagcgtctggcccttcgttaccttgtcgagcaatttgacgtgcagttcgacgaagccacccgtcgaggccgtgatcgacgtggtctcgttgccaatgaacggtttggtcaattcggcaggcttggccaggggggcgggcagcatgtcgaacgccaccatcgcccggccgacgccgccaaccgcgcgatcgatcaggtcctcctggaacagcttggcgcggccgatctcgaaggtgaccgcggggatcttgatccggtcgaactccgtctcgaccgttcccttctcgcccggatcatatttgatcacatcgggattgatcgcgtctgcgatcttcagcacgccgtccacccgcggatcggcccagacatagagcgggtaggcggtgccggtgctttgggtgtgcaagtcgatcaccagatcgacattgccggcccaaagccggttccacacccggccgtcaaaccgcgcgccattgtcgcccttcgcttcgtcgcccggcatcgcgcggttgagatcaacgagcgagccgccatcggtagacagatacatctgccggttggcgtgcagattgcctgacacgttgaggcccggaatgccgatcaccgtgcccttcagcgcgctgacatcgatcccggccatcaccttctgcaccacgcggatgccgttcagctcgtcgccatggatcgcggaattcagcagcagccttttgccgtcctgggcgccacgcgcgacgatcaccggcacgtaaagccattgcgcatcgttggtttccgcagccttgaaccagtactgcgtgatcttgccgcgcggcagggtgttgacgtcgagcttgtcgatcactggcacgccgctgatcatgtcctgcgccaaggcgggtgcagcgaccgcgaggctcgccaccgtcaagccgatcgccaagcatcgtgtcggacgtgttgttctcgccatgggatgccgctccggttgcgccccaaataggcgcgccccacagcgcgacggcagcgtcggattctacgtgagccggggaggtgctgcgcgtcggcgtcggcagcagccgatcacggtgattggtttcgtgcgaccagcatgcgggcgccgaattcgataagcttatgaattgtatttaataaatattgttacgaaaaaaattatgatcatcgattactttatataggcaagttgtgctctgggt

SEQ ID NO: 711 - DNA, 12433 bp, synthetic construct
  misc_feature 1..12433: note = Synthetic
  source 1..12433: mol_type = other DNA
gccttcacaccgaaagagtgcgcaaactacttcgcccactcaggttatccacggatgatgtgaaaatggtctagagatcctcactcttctttagcagaagaagtttctttacttagaaattatagtgacgaattgagtaggatttgcattgatcttgccgcacgaaggcaaaatagtgatcggtgctatacaataagcaggattgttcatgacgtgcttttgagaagtagcagattacttacaatcgtgtcactatatcgacttatcgatgagagagatcgacagtttcatcatcttgatcatcgtttgggtcatattctacagaatgatgaatactatataagaatgtatataactatgctccaagacatgttgaacaacagaaggtctcttggccaccaattatctactttatcagaaagttctttagcctcttttctcaatattcaacgagttattccagttcttcttaggggctaggctgggtgtaaagtaaattttgtggatttctggaagttctttgcgcgacgcaggggtggctcgaaatgctgccgaacgggtcctctccgacatatattgaatgtgacgttagcttcatctttgcgaaatcgacaagatggcgggtggatccggcgccgcaagctggcctctatgaaggctcggctggcctctatgaaggctcgtgagcgtaaattgacagcataatatttatacatccatcacgatgcaaatatccgctagcgtccggagccaatctgcatctcaagctttgtacatctttatatttcttgtctttttgctttttagaggccaagaggcttacttttctggctgtggatcaacgtcttatacgatctattgtttccgctggaattctcagcgcagatacttcgttcgttgtaatcagaatgtaaatagagagtgccaggattcgatagaattttcaaataatctacagatttgatatatattgacgccatcacttattttctcgtgcgagaaacgatttcaacataatacagctggcggtcaggccaagcgcctcgcgtatgccgattggcgcgcagcggcgtccccaaaaaacggagcgataccagcggtctcggggatcagaaatagcgtccgccgtcaggaggcgcgcccaccccctgatcgagcccggcgcgcagcgcccggccctcggcgctgtcgggggggatcagcccctcgcgcaggaacaggtcgatcagcaccaggttcacgttgaacttcaccgcctccgtctcgcgcacgcattccagcagccggcgggcgggccagagctcgaagcgctccacctcgtcgtcatgcggggcgggggtgaaatcctcgggcagctccaggtcgaagaggtgcagcacgtcgcgccgcagcccctcgggcagggtcagcacataggagacgcggcccacccgccgcgcccgggcggccagcgcgggggggatgctcgcctcctcctcggcctccttcagcagcgtcgcctcgggggtgaggcccgccgagacgccgccgcccaccaggttgtcgagctgccccggcgccacggccttgctgcgggagcgcacgcccacccagacatgcagcccgtcccgccggcgcaccaggccgttgaggtgaaccccatggccgatgacgccgaaggccgggatggccccgcggtcgagccggccgagcaccgggccctcggcggcggcgcggatgtcgaacatctcgccgcggacgcgcagccagccctcggcggccagggcgcggcccgcctcggccagggcggcgctgcgcgattcgggggaatcgagggcctcggccatctccagcccctcgcggccgaggcggaacccctccacccggccggccagcgcctcggccagcccgggcgcgacgcggcccgcctccgccccgcccaggcggaaggggaggagatgatcgagcgagggcgtgttgttgcaggccgcgatgtggcgcaggagcgagaggggcatggcggccatgtaagggcgcgcgccccttttccaaaacgcggcttccgggccatgtggggggcatgagccagccgcccgccgccagccaccgccacgccctgctctccatccttccctatctctggccgcgcggcgaggcggagatgcggctgcgcgtggtgctggccgtggtcttcctggtgctggccaaggcggcgaacgtgctggtgcccatcgcctacgcccgggcggtggacgcgctggcgccgcgcgagggggtgggggcgatgctcgccatccccgtggcgctcgtcatcggctacgggctgctgcgggtgatgagctccgccttcgcggagctgcgcagcgccgtcttcgccaaggtccaggcgcgcgcctcgcgccgggtggcgctcagggtgttcgcgcatctgcacgggctgtccatgcgcttccacctggaccgcgccacgggcggcctctcgcgggtgatcgagcgcggcacgcgcggcatcgccatcgcgctgaacttcctgctgttcaacatcatccccaccatcgtcgaaatcctgctggtggcggcgatcctgtggtggatgttcgccgcctccttcgcgctgacggtgctgctcaccatcgccgcctatgtcgccttcacgctgctgttcaccaactggcggctgcgcttccgccgcgcgatgaacgcgatggacgaggaggcgaacaccaaggcggtggacagcctgctcaactacgagacggtgaagtacttcaacaacgagcgccacgaggcccgccgctacgacgagagcctcgcgcgctacgagcgcgcctacaccaggagcgagaccacgctgaacatgctcaacgccggccaggcgacgatcatggcggcggggctgacggtggtgatgctgctggccggcggcggcatcgcggccgggacgatgacggtgggcgatttcgtgatggtgaacacctacctcatccagctctacctgccgctcaacgtgctcggcttcgcctaccgcgaaatccggcaggggctgacggacatggagcagatgttccgcctgctcgacgtgccggccgaggtgcgcgacgccccggatgccaaggagctgccgcccggtccgggcgaggtggccttcgaggaggtgcgcttccactaccgccccgaccgcgagatcctcaaaggggtgagcttcaccgtgccgccggggcggatgctcgccatcgtcgggcccacgggggcggggaagtccaccatctcgcgcctgttgttccgcttctacgacgcgacgggcggcacggtgcgggtggacggcgaggacgtgcgcgccgtgacgcaggacagcctgcgccgcgccatcggcgtggtgccgcaggacacggtgctgttcaacgacacgatcgcctacaacatcgcctatggccgcccgggcgcgacgcaggaggagatcgaggaggccgcgaagctcgcgcaggtgcacgagttcgtgatgaagctgcccgagggctatcgcacccgggtgggcgagcgcggcctgaagctctcgggcggcgagaagcagcgggtggccatcgcgcgcaccatcctcaagaacccgcgcatcctcatcctggacgaggcgaccagcgcgctcgacacccgcaccgagcaggagatccaggccgcgctgcgcggggtggcgcgcgggcgcaccacgctcgtcatcgcccaccgcctctcgaccgtggtggaggcggacgaaatcctggttctcgacgaggggcgggtggccgagcgcggcacccatgcggaactgatcgcgcgcggcggcctctacgccgagatgtggcgccgccagtccgaggcggtggcggcggccgaggcggcggcccgcgccgaggaggaggcccgcttcggccgtggccggagcgcacgggtcgagggcgaaatgcgcgcatgacgaaggggtaaccttcacccccttcccccgggcgcgcggctgccccatctcgcgcgcagtcgagtgccgggaaacagtcgccatggatcagcagccgcccgaggatctcagccacgccggctcggtggtggacaaggccatcgagtacatgatggagcagggcatcgcgcccatctccgcggcctcggcgctgctgggcggggcgctggggctgctcgcgcgcagcatggacgaccgctccatcgccgcggtgctgcgccaggcgctgaacagcgtggaatcgggcgagctgcgcgaactgccgaccctgccgcgctgagcccgcgcttgactcgcgcggggcgctgacgcaaacagccggcctcgcatgcctccgcgcgcggcccgccgcgcgcgcttttcgttcgggatcaccaccatgtcgcgccgctgcaccatcaccggcaaggccgtcctcaccggcaacaacgtgagccacgcgaacaacaagacgcggcggcgcttcctgcccaacctgcagcagcagtccttctggtccgagacgctgggcacctccgtgcagcttcgcctgacggtgaacggcatccgcaccatcgagcacaatggcgggctggacgccttcctcctcggcacgcccgaccggcgcctgccgcccgaggccatcgtgctgaagcgccgcatcgcgcgcgcccaggccaagaaggcggcctgatccggcggggggcgcgttagcctcccgttcatcactcccagccatggtccgcccatggcgctcgatctctccgacctgattctggcgctgtttgccttcggtctgggcggggcggccattgccgcgcgcgcgcgtctggccgggcgcgcggccgaggcgcacaccgcgcagcgcctcgccgaggagcggggccgcgccctggccctgctggcgcaggaggtccagtccgcctcgctctccctgctcggccgcgcccaggtgctggggggcgagcagggccgtgccttcgaggcggaggcgcgccacctcctctccctctccgaccaggcggccgaggccggcggccagcgcgaggccgcacccagcctgaaggaggagcgcttccctctcgcgcccctgctgcgcgaggcggtggcgctgacggcccagcggctcggccccggccagcgcctctggcgcatcgagccggcgctggaggccgtgaccctgcgcgccgaccgtcgcgcgctgcgcgccgcgctgctgcaggtgctcacgcgcgccgtgcgcgccaccggcgagggcgacgcgatcgacctgaagctggagcgcgcgcgggattccctcgccctggtggtggaggatgaggggcttggcctcgccgcggaggatctctcgccggccgcgcatgacgggggggcgctgcgctcgcgcgggctcggcatcgggctcgtgctcgcccgcgcgctgctgcgcgcccatgggggcgagctggtggtggaggccgccgagggggtgggggcgcgcgccttcctctccctgcccgccgagcgctgggtgggggcctagcccccgcccccctcgtcggggcccagcgttccttccgcctccagcagccggcgcttgttcccgatcccccagcgatagccccgcagcgccccgtccttgcccagcgcgcggtggcagggcagcagcggcgcgagcgggttgcgcgcgcaggcgcgggccacggcgcgggtggcggcgggcgcgccgatcccggcggccagggcggaataggcgcgggtctcgccgggcggaatccggcgcagcgcctcccacacccgccgctcgaaggcggtgccgcggatgtcgagcggaaggtcgagcgcgccgcgaggctcggccagatgcgcggccagccgcgccaccgtcccggccagggccgcgtcctcctccagcgctgcctgcgggaagcgggcgcgcagcgccgcctccagcgcgggaaagggcgcgccgaagccgatgaagcagacccccttcgcggtggccccgaccagcagcgggcccagggcgctgtccccgcgcgcgaggccgatcctctcgcccttcgcgccgcgccgcagcgcgcccggcgtcatgcccagcccggcggcatgggcgcgcgcctcgccgccgaagccggcctccagcgccgcatcggcgacccgcgcgccgcgggccagcgccgccgccagacgccgcgcccgcagcgcctcggcataggcgcggggggtgacgcccgtcacctcgcggaacaggcgcaggaagtggtggcgcgcatagccggcgcgcgcggcgagggcggcgaggctcgggattccctcgctcgcctccatcatggccgcggcggccgccaccgcctcccggtgcagcgcggcgcgcgcgcccgtggggtcgcagcggaggcaggggcggaagcccgcggcctcggcggccggcgcatcggcgaagaagcgcgtgttgcggcgcaagggcggccgcgccgggcagccggggcggcagaacacgccctgcgtcgtcaccgcatagaggaagggcccgcaggcgggggcggcgtcgcgcgccagcacggcctgccagcgctgcgcgtcgagggggaggggcgcgtcatcgggcatggggcgagactgccatgcccggggcggccgcgccttccgcccgttgcgctacaatgctccgatcaccgcgcggcagacgcgctccacctcgccctccgtgaggtaggggtgcatgggcagcgagaggacctggtggcacagcgcctcgctgaccggcagcggcgggggcgcatccgcgtagccggccgcgtgcgccgcggcgtaggcgggctgctggtgcagcggcttcgggtaatagacgccgaaggggatgccctgcgccttcagcccctcctgcacccgcgcgcgctcggccgcatcggcgcagcggatggtgtagaggccccaggcggattccgcccccgccggctgggcctgcagcgccacctggcccgagaggcgctcggcataccagccggcgacgcgggcgcgtgcggagagctcctcctcgaagagcggcagcttgcacagcaggatggcggcctggagcgtgtccagccttccgttcatgccggtgcgcagcacctcgtagcggctgccgccctcgccatgggtgcgcagcgagcggtagagcgccgcgcgctcggcgctgttggtcagcagcgcgccgccatcgccgtagcagccgagcgtcttggtgggatagaagctgagcgccgtcgcctccgcatggccgccgagccggctgccgtgcagccgcgcgccgaaggcctgggcggcgtcgtccagcgcgaacatgccgtaccgggcgcagaggccgcggatggcgggccagtcggccggcaggccgaacaggtccacccccaccacggcgcggggcttgagccgcccctcggccgccacctgcgccacgcgccgggcgaggtcggcgaggtccatgttgaaggtctccgcctccacatccacgaagatcggcgtggcgccgaggacgagcggcacctcggcggtggcggtgtaggtgaaggcgggcaggaacaccgcatcgccggggccgatgccctcggccatcatggcgatctgcagcgcgtccgtgccggaggagacgcccaccgcatgcgccacgccggcgaaggcggcgagcttctcctcgagctccgccacctcggggccgttgatgaagcggccggaatcgagcaccgcggcgatgcgccggtcgagctccgcgcggatgcgggattgctgggcctggatgtcgaaaagggcgatgggcctggtcgtggtcgtcatggcgggggcatcggccaggggggcggcgggatcaagccccccggacggtcagctttcgtgacgctgtgtgacggcgtggccggaaaaggaacggcgggcgaaaaagaacggcgggccggagcccgccgcccatccggtgcgccttgcggcgcttgttaacggaaggcccccattcccccatcggtcagcatcggaacgacgggcttccgcagaagagattgaaaccgcgagtcggcacgcgtcaagctttgcgtgccatgacatacagactcgccctggacctcggcgccaactcgctcggctggtgccttctcgaactggacccggcgggcgcgccctgcggcctgcgcgacatgggggtgcggatcttccccgacggaagagacccgaagaccctcgcctcgctggcggcggcgcgacgcctggcgcgcggcatgcgacgccggcgggaccgatacctgcaacgccgcacggcgctgctcaacgcgctggtccggcgcgggctgatgcccgcggacgcgacggcgcgtgcggccctggcgcgatgcgacccctatgccctgagggccgccgcgctgcaccgccccctcgccccggaggaactgggccgggcgatcttccacctcaaccagcgccgtggctttcgcagcaaccgcaggaccgaccgcgcgaacgacgcggaacagggcaagatcgccgccggcgccgaagccctcaagcgcgagatggcgcgctcgggcgcgcccaccctgggcgcctggctggccgagcgccgcgacgcgggcgaatgggtccgcgcgcgactgaccggcgtcggcgccaaggccgagtatcccttctaccccacgcgggatctggtccgcgccgagttcgacgcgatctgggcggcgcaggccggctggaatcccgcgctgacgcccgaggcgcgggatgagatcgccgggattctcttccaccagcggcctctcaagccggtgacgccgggccgctgctggctcgaacccgatgaggagcgcgcgcccaaggccctgccgacggctcaggccttccgcatccggcaggagctggccaacctcgccatccgccgcatcggcgaacccgatcagcccctcacgcccgagcagcgcgccctgctggccgccgcgctggaacgcggcgaggatctctcctggcatcagatccgcaagcgcctcggcctctcgggcggcgagagcttcaatctggaatcccaggcgcgggagaagctgaaaggggccgaaacggcgcagcggctggtggggaagaaggggccgctcgccgccctctggcccgggctcgacgcggcccggcgcgacgcgctggtccttgcgctgctgcgggccgagacgccggaggcggccatcgccgcgctgatcgaactgggcctgccccgcgccgccgccgaacaggccgagcgcatcgccctgcccgaaggccacgccgcactctcggccaaggccatgcgcgcgatcctcgccgcctggcaggaggggatgacctacgacaaggcgttgcaggcggcgggctacgcccatcactccgacgaccgcacgggcgtgatcctcgaccggctgccctattacggcgcggtgctgcgtgagcgcctgggcacgggggacccgagccggccgcccgaggaagaggagcggcatttcggccgcgcgcccaacccgacggtgcatgtggcgctcaaccagctccggcacgtcgtcaacgccatcctggaccgccacggcccgccgcgggagatcgtggtggaagtgctgcgggagctgaaccactccgccttccagcgccggcagatcgagaaggagcaggccgagaacgcgcgccgccgcgaagtgtgggcgcggcagctcgaacagctcggccagcgcgtgaacggccgcaacctcgccctgatgcgcctctggcacgaacagtcgaaggacggcgacgcgcgggagcgcctctgcccctacacgggcgagcgcatcggcctcgcgcggctgttctcgggcgaggtggaggaggaccacatcctgcccttctcgctcacgctggacgacggtttcgccaaccgcgtgctgtgcatgaggggcgccaaccgccggaagaccaaccagacgcccttccaggccttcggcggcacgcccgaatggccggccatcctggagcgcgcggccctgctgcccgcccgcaaggcttggcgcttcgcccccgacgcgctggagcgctggaagggcgcgcatgagggctttctcgaccgccacctgacggacagcgcctatctcgcgcggctcgcccatctctacctgcgggcgatctgcgatcccaaccgcgtgcgcgtcgtgcccgggcggctgacggcgctgctgcgccatgcgctggggctgaacagcgccgcgctgctcggcaaaggcggcgcgcgcaaggagcgcgacgatcaccgccaccacgcgatcgacgcgctggcggtcgggctgatggaccgcgcgatgctgcagcggctgcagacggcggcgggccgcggggcggagctcggccgcctgctggacgatctgcccccgccctggcccggcttcctggaggaggcgcgaagccgcctcgcgcgcctcgtcgtctccttcaagccggacacggcgccatccgggaagctgcacaacgagacggcctatggcgaaatccccggggccggccccagggagcccaatgtggcgcatcgcgtgcccatccagtccctggccggctggacggcgaaggaggtgcgggccgcgctgggccatcccgccctggcggagcgggtggtgcaggcgctcgcggccgcggagggcaagcccgcccaggcggccgcgctcggcgcgctcgcccatgacgtgaagggcgggctggtgcgccgcgtgcgggtgcgcgaaaggctcgacaacacggcggccatcgccgaccgccgcaccgggcgcccctacaagcgggtgaagctcgacgcgaaccaccgcgtggagttctggcgcctgccgccgcgcgagaggggcgcgccgggcaaggtggtgacgctggtggtcccgttgctggaggcggcgcgcgacgccgaggcggcgcggctgggccgccccctgccggaccgccgcccgcaccccgcggcgcggctgcttctgcggctgcacaaggacgatgtggtggccttcggcctgggcgaggcccggcggcttctgcgggtggtgaagttctccggcggccaggtggttctggccccgctgcatgaggcggggaacctgaaggcgcgcgacgcggacaggaacgacccgttcaaatacgtcaacgccagccggagccgcttcgccgaggaaggggcccgcaaggtgcacgtggaccccgcgggccgcgtgcgcgacccggggcccatcgagtggtgagcccgctcggccgcgtcttggagatcgccgaggagggccgccgcctctccaagcggcgcggcttcctggtcgtcggggcggggcgcgaggaggccggccgcgtcccgctcgacgacctgacggccgtgctggtcaccgcgccgggaaccgaggtctcggtcgcgctgctggcggcgctggcggagcgcggcgtgcccttcctcgtgcccggggccaaccacgccccggtggcgcttctctggccgctggcggggcatcatgccgcctcggcccgcatggcggcccagatcgcgcgcacgcgcgggatggagaagcggctgtggcagcggatcgtggcgcagaagatccgcgcgcagggctgggcgctggcccgcgccggcgcgccggccggggccttcgcgcggctggcgcgcgaggtgaagccgggcgatcccgacaatctcgaagcccaggccgcccgccgctactggcccttgatgatgggcgaggggttccggcgcgatgtcggcgcggcgggcgcgaatgcgctgctcaactacggctatgccgtgctgcgggccgccgtggcgcgggcgatctgcgcggcggggctgcaccccggcctgggggtgttccaccgcaacccgcagaacccgatgccgctggccgacgatctgatggagccctttcgtcccttcgtggacgagacggtgcgcgccctgctggccgagggcgagcaggaggtgagcgtggccgcgaagcggcgcctggtgggcgtgctgtggcgcgacacgccgacggctgcgggccgcagcccgctggccaccgccatcctcagatcggcgcagagcctggcggagagctacctctccggcgtgccggcgctggacttcccgctgctcgaaccagggagccgcgccgatgacgacgctgagcggctatcgcatcatgtggatgatcgtgatgttcgacctgccggtgatgacgaaggcccagcgccgggcggcgacgaggttccgccaatggcttctggatgaaggctgggagatgagccagttcagcgtctatctgcgctgggccgccgggaaggagcaggcggaggcgcgcatccgccgcatcgcgcgcgaagtgccggccgagggcaaggtgcatgtgctgatggtgacggacaggcagttcgagacgatggtggtgttccgcggccggcaacgcgagcgcgggcgaaagggtgtgcccgagcagttggtgctgttctgatggcggatcggatagcggcgaaacccaccggattcgtctgttg

SEQ ID NO: 712 - DNA, 7615 bp, synthetic construct
  misc_feature 1..7615: note = Synthetic
  source 1..7615: mol_type = other DNA
cgcatgggcgacaccggcccctgcggcccctgctcggaaatcttctacgaccacggcgacaaaatccccggcggcccgcccggcagccccgatgaagacggcgaccgcttcatcgagatctggaacctcgtcttcatgcaatatgaagaaggcccgcccggcacccgcaacccgctcccacgcccgtcgatcgacaccggcatgggcctcgaacgcttcgccgccatcctgcaaggcaagcacgacaactacgataccgacactttccgcgccctcatcctcgccagcgccgaggtcaccggccaggacccggacggcccgcacaaaaccagccaccgcgtcgtcgccgaccatctgcgcgcctgcaccttcctgatggccgatggcgtgctgccgtcgaacgaaggccgcggctacgtccttcgccgcatcatgcgccgcgccatgcgccacgcccacatgatgggcgcgcgcgatccggtgatgcaccgcctcgtccccgccctcattcgccagatgggcgcggcctaccccgaaatcgtccgcgccgaaaccttggtgaccgacacgctgaagctcgaagaaaaccgcttcaaatccatgctcgaccgtggcctcggcctgctggcggaagaaacctccggcctcgccgccggccagtccctccccggcgacgtcgccttcaaactctatgacacgttcggtttcccgctcgacctcacgcaagacgccctgcgcgaacaaggccgcacggtcgacaccgaaggcttcaacgccgccatggccgaacaacgccgccgcgcacgcgccgcctgggccggcagcggagaggccgccaccgaacacgtctggttcgaactgcgcgagaaaatcggcgcctccgaattcctcggctacaacaccgaaacggcagaaggcgaaatccaggccctcgtcgtcgccggccaccccgtcgcccgtgccgaagccggcgcgcaggtcgccgtgctgctcaaccaaaccccgttctacgccgaatccggcggccaggtcggcgaccacggcaccatccagggccccggcttcaccatcgtggtgaccgacacgcaaaagaaactcggcgaactcttcgtccatatcggccacgtcaccgaaggtgtggccgaactcggcaaacccgtcgtcgccgtggttgaccacgcccgccgcaccgccatccgcgcccaccactccgccacccatctgctgcacgaagccctgcgccgtcgcctcggcacccacgtgcaacaaaaaggcagcctcaacaccccggaccgcctgcgcttcgacgtctcgcaacccaccccgatcacccgcgaagacctcgcctgggtcgaggccgaggtgaacacccgtatccgcgaaaactccgaagtcaccacccggctgatgaccccggacgccgccgtcgccgaaggcgcgatggcgctgttcggcgagaaatacggcgacgaagtccgcgtcgtcgccatgggaaacaatgggggtgaaggcgacaccgaccgcaaagcctggtcgatcgaactctgcggcggcacccatgtccgccgcaccggcgatatcggcctgctgcgcatcgtcgccgaatccgccgtcagcgccggcgtccgccgcatcgaggccgtctgcgccgacgcggcgctcgccgtcatcgccgaaaacgaccgccgcctgttggacatcgccaccacgctgcgcgccgccccggccgaactgaccgaccgcatcgccaccctgctcgaagaccgccgcaaactcgaacgccaggtcaccgagctacaaaagaaactcgccaccggcggggctgccgccgatatcgaagacctcggcggcatcaaactcgccgcccgcaacctgggcgacgtcgccccgcgcgaactcaaatccctcgccgaagccatcctcaccacaatcggctccggcatcgccgccctggtcagcaccgccgaaggcaaagccagcatcgtcgtcgccgtctccgcggacctcgccgcccaacacagcgcggtcgacctcgtccgcgccgccagcgccgccgtcggcggcaaaggcggcggcggccggccggacatggcccaagccggcggcccagacggcgacaaggccgacgaagccctgcaagccatccgcgccaaactccaagcctaaccccccacaaatccccctctccccccgggagagggccggggtgaggggcctatttattccgaaatcgcaacaaaaaccacgcaaaaaaccctcaacccctcacccccgtttttgcggccaccaatcctcccggatcggccccggcgaccacccaagcagccgccgccgctccgcccgaggtacccgaacccgccccgcgcgcgccgcccgcgccttgcgcacccgcgccacgaccagccccgccgccgccccaaccccgagcatccggcacaacggccgcaaaatccgccccaccgccggcgccgccgccaaaatgccagccatctccggctccgccagcaacgcctcaagctgggagccatagcccgccgcctcataccccagcgcgcgcaccaaccacccccgccccgccggcaaccgcaaccgcgccgcccgcacccgcgccaccgcacccgcaggccccgccaccgccgcagcctcaaccgcccgcacccgcccaggccgagccaccgcccgcccaaaccgctgcaccgaccggttcagccaactccaaagcgccggaatcaccgccacataccgcggctgccgcaacaacccccgcgccaccaacgccgccaacgcccccaaaataatcccaaaccgccgcgccatctcgggcgccgcagcaaaacagggtgggggaggggccgtaacacacatggtagaaaaaataaccgattccaccagcccgctgcaagcaaaatcgcccagcatcccccggaaataggaacggcgggccgtggcccgccgttcattcggtgcgcccgaaagcgcttgttaacggaaggcccgcgtttccccatcggctaaaacaaggcacggtttccgaggtaaaccatccgtgatacgcatcgttctgtcaacgggataatcgccatgccgtaccgtctcgcgctcgatatcggtgccaactccatcggttgggcggcattaaccctctcgcccgatggtcacccaatcggcctggcggatgccggcgtgcgcgtctaccccgatggccgcaacccgaaggatggctcctccaacgccgccgcccgtcgcgccccccgcgccatgcgccgtaaccgagaccgctatttgcagcgccgcggcaatcttctgaacgcgcttacccgcttcggcctcatgccggccgaccccgatgcccgcacacaaatcgcggccttagacccgttcgccctgcgcgccgccgcgctggaacgtccgctgctgcccaccgaactcggccgcgccatcttccacctcaaccagcatcgcggctttcagtccaaccgcaaaaccgaccgtggcgacaacgaatccggcctcatcaaagacgccgccgccaacactgccgccgaacttgcccgcaccggccacctcaccatcggcagttggcttgccgcccgccacctccgccatgccggcgtccgcgtccgcctcgccggccgcggcaaactcgccgcctatgccttctaccccacccgagacatgctgaaggcggaattcgccaccatctgggccgcccaatccgcctggaaccctgccttgaccgatgccatgcgggaagcattgcacggcattatcttccatcaacgcccgctcaaatcccccccagtcggcaaatgctggctggagccggatcaactccgcgccccccgcgccctccctaccgcccagcgtttccgcctcgcccaaaccctcgcccacctgcaactcggccaacccggtcatcccacccggcccttcaatgccaaggaacgtgaactcctcctcggcatcctgcatcgcggctcagacctcaccttcgaccaaatccgcaaaaaactcggcctgtccgccgaaaccgacttcaacagccgggaggacaaaatccccggctgcgccgctgccgcccgccttggcgccaagaaaaacctcggcgccacctggcatgccctgcccctcgccacccaagatgccgccgtcaatatcatcctcgatgccgaaaccgacgccgccgccatcgcggccctcatcgccctcggcctctccccggctgatgccgcctgcgccaacgccatcaacctgcccgatggccgcgccgcgctgtccgcccgcgccctcggcaaaatcctgcctttcctggaagccggggaaatctattccaccgccgtccaatccgccggctacacccatcattcagaccgtcgcaccggcgaaatccgcgaccgcctcccgtattacggtgaaatcctgcacgcccgtattggcaccggcactggggaggcaacggataacgacgaaaaacgcctcggccgcgcccccaaccccaccgttcacgccgccctcaatgaaatccgccgcgtcgtgaacgccattgtcgaacgccacggcccccccgccgaaatcgtcgtcgaaaccctgcgcgaactcggccgttccaaactccagcgccaagccaaggacaaggaaatcgctaccaaccgcgccgccaacgatgccctgcgcgacgaactcgtccgcctcggcgtccccaccaccggccgcaaccaaatgcgcctgcgcctctggaaagaacaagccgcagacccgcgcgaccgctgctgcccctataccggcacaaacatcaccgcccgcaccgcgttgtcggatgcagtggaggaagatcacatcctgcccttcgcgctctcgttggatgacagtaccgccaaccgcatcctcgtcacgcgggaggccaaccgcatcaaatcccgccgcgacccgtttgcagccttcggccacaccccgcaatggtcggaaatcctcgcccgcgtcgccaacctgccggaacaaaagcgctggcgcttccagccagatgcgctggtcaaattcgccgccgatggggacttcctcgcccgtcacctcaccgatagcgccaccatcgcccgctgggcggtggagtatctcgatatcctcgccccggaaaaagttcgcgccgttcccggccggctcacctccttgctacgcaacgctctcggcctgaactcggaatccgtgctcggcaagggccgcgccatgaaagaccgcaccgaccaccgccaccacaccatcgatgccattgtcgtcggcctgatcgatcgctccatgctgcaatccgtcacggccgccgcccagcgcgccgccgatgctggccgccgcctgctaatggatgtggcagaaccttggcccaatttcgtcgctgatgtcgccgcccgcgtcagccgcgtcgtcgtctcccacaagccggataccggctggcaagccgccttgcacaacgataccgcctacggcgaaatcgccaatgccggccccaaagaccccaacgtcgtcgtccgccgcaccatcgacgtgctggccgacaaatcgccagacgacattcgcaaatccgtgcgcgatttcatgctggccgccaaaatcgccgccgccgtcgaaggccgcgaccccaccgcccgcaaagccgcgttggcagacctcacccataccggcggccatcccgttcaccgcgtccgcatggtcgaacggcttgatagcgtccaacccattaccgaccgccgcaccggccagccctataaattggtgaagcgcgacggcaatcatcgggcagaaatctggcggatgccggatggtaaatccaaaatgtgcattgtctccaccttcgcggcggcccagcaggcggaagctgaacgcctcggccggccgtcgccggacgtgcgtcctcatcccgctgcacgcctcatcatgcgtctgcacaagaatgatatcgtggcccttgggcgtgtcggcggattgaggcttgtgcgtgtcgtccaaatgacagaggggcgtttagtacttgcggaccataatgaagttggcgatcttcgtaggcgccacgccgacaaagacgatccattcgcgtatattttcgcaggttgcagtcgattgatcgacgatcaggcgcgcaaagttcaagttacggctaacgggcgggttcgcgatccaggcccgccaaggtgacaacctctcccctcggccgcatcatcgaaatcgctgaggatgggcgttatctgtcgaagtcgcgcggctttctcacggtggccgagcatggcaccgaactcggccgcgtgccgctcgatgatatcctagccgtcatcgcgtcttcacccggcacctcggcgtcgtgttcgcttctgtcagacctcgccgagcgcggcattcccttcgtcctctgcggccgcaactacgcccccaccgctttgctctggccgctcgccggccatcacgcccagcaacgccgcatggaagcccagttggatgcgacccgcccattggccaagcggctttgggcccaaatcgtcgctgctaaactccgccgccaaggctgggctttggcccaacacggccggcccgccggtgccttcacccgcctcgcccgtctggtgaaatccggtgatccggacaatctggaagcccagggcgcccgccgctattggcccctgctgctcggcccggaatttcgccgcgacaccaatgccgaaggcgccaacgcgctgctaaattatggctacacaatcttgcgcgctgccaccgcccgcgccatcgtcgccgccggcctgcatcccggcctcggcgtcttccatcgccacccgcacaacgccatgcccttggcggacgacctgatggaacccttccgccccttggtagacctgctagtctgcaccctgctgcaagagggtgtcaccgaagtcactccaaccgccaagcggttcctcgctgctgtgttgcagcaagatcaagccaccgccgccggcaccactccggttgcgacctgcatgcaacgcctcgccgccagcctcgcggaaagctatttgcaacaaaccccgagcttagaatttcccttcctcgatctggctgtcgaaaccgacccgtccgatgcggaaaacgcctgaaaacccaattttatccgggtatcgcctcatgtgggtcgtggtaatgttcgatcttccggtgggcaccaaggccgaacgccgcgccgccaccaaattccgccaatggctgttggatgaggggtatgagatgagccagttcagcatctaccttcgcctgtgcgccggtaaggaagcggtggaccgtcgcgttaccgccatcgccaaagcccgcccaaccaaaggctccgtccatattctcgccgtcaccgaccgtcagtttgaaaacatggtcattttccgcggtgctaaacggagtcgcggcccctccaccccgaaccagttaaccctgttctgatgcatttttcgccactccgcttcatggaaatcattgtattatcaatggtttccatgaatacggattatagccgatggggaaacgcgggccaaccgcaacgagttggagccagtaaacccgatccccggtattatagccgatggggaaacgcgggccaaccgcaacgaga

SEQ ID NO: 713 - DNA, 23372 bp, synthetic construct
  source 1..23372: mol_type = other DNA
  misc_feature 1..23372: note = Synthetic
agaccaatcggagacggttcccgtcacattaaggacacaccgattaaatatgaggataggatgtgcaaatattccttgaggcagtttattcggcagttccgcaataaaggggttacccaaattcacagataaggagatgtaaaaatgacaaaacaaaaggagaagaagaaagcttcaattgtcaagaaaatgatgattgccgttgtcgcaggttttgtagtcggctttatatgtctgctgattaaaagtgcggtaatgggaacagacggcgaaggagcctggaaagttgttgaggcaattttattccaggatatcaccgcaacaaaagatatcgaaggactcggcttgttctacatcgtaggtcagctgtttatgaagggacttcagatgatgattgttcctctcgtcctttgttcgctgacacttgcactttgcagccttgcaaacccaaaaaagctcggtcgaatcgcaggtaaaacatttgtgtcctacctttgcttctatatcgtagcagcagctcttgcaggcgcagcagcttatcttgcaaagagtcttggttggttcacagtcaatcttccggcacaacaggctcaggacatcgttacaatggagggttacaatccgctcgtaacaattgtaaacgctgttccgagcaatatgattaacgcaatgtcatctaacaacacaattctttgcgttgttgttatcgcaattatctttggtctttgtatgacaaagatgggcgaaaaagcagatccgctcaagaaagtttttgaaaacatcaacgatatcgttcagatgttcctcaacttccttatcaacaagattgctcctatcgcaattttctgtatgatcgtaagagcactcgccgtttacggaattgagtacatttcaccgacaatgatgtggattgttgtaacaattgttgtaagccttcttcttgtttgcacaatttacccaatcggtattttcattacaacaggacttaatccgtttatcttccttaaaaaggcggcaaaaatcggtatgtttgcagcagcaacaaactcgtctgccgcaacgcttccgcttaataaggaaacctgtattaacgaactcggctgttccgaagaaatcagcagctttgttcttccaacaggtatgacaatcaatatgaacggtacaaccgcaatgcatatgattgccattacattcatcgccacagccgcaggcgtcaacattactcctgcaaccctttgccttacagcattcctctcaatctgcacagcagtcggtactccggcaatccctgttgcaggtacaacaatggtttatgttgtaatgatgggacttggcttgaactcggatctttgtatgattggctactcgcttattcttgccatgaactacctcccgggtatggctgttatcacacttaatgttatcggtgacgccgctaccaatgttatagtttgtgcaaaagaacattgccttaacaaagaaatctataacagcaaaacccctaaaaacaactgatttcagtaagataacttccggaaaccccttgtaaaaccaaaccgccctcgacagcgcatgcactgccgagggcggcttagttttacggtgagccaccgttcccagttcgtgaagatagtatggtataaaaaatgacatattatgcccgagcgaaaggtttaattaaatgtaaaattgaaaattgaaaatggaaaattgaaaatggaaaattacggtgagccgccttgcccagttcgtgaagatagtatggtataaaaaatgacatattatgcccgagcctaacattgcaaccgttcgcacaattccgtatgggcggatattatccgcccgcaggtaattgcagaaaatttatgatgaaaataaactgtataaatgggatacatttacataaataatgtagcagtcagttacaactaaacttcattatttatcagccaaaaattccttgccggctttatcggttgcaagaattgcattgatgaatgcgtcctcggtcggattacccgggacatacttccactcaacaacgcttgcggctttgtgcgcaattgcaggcacatcatccggagtaagtgcaatttcgccgagagtgcaaggaagtccgatactgtggttaaattcaaaaattctgtttcgttcctcaaattgtccgtcatatgtcagcagacacagcacaccgaatgaaacaatttcgccgtgcagatgttgccgttcacattgcggaaagagtgacgcaccgtaataaacacaatgtgcgagcgatgaattgtagtaataatcctcctcgggattcggattgttttcgtgtacggtaaaatttgaaacaagtcccgccgtgataataatgtcaagcgcaacctgctcaattgcctctgtcggcacattgtttttgcagtcctcaagagcttttttgccaaagcttatgagcggttcggtacttgcggaggcaattgccttgccaagcaacggtgtgtgaatcatattcttttcacgacacgcaaaaattacttcatattcctttgaaagtgcgtcaccgattcctgcccacatgagcttttcgggtgattcggcaataatttttgtgttgataaatgtgtgaattgcaggggctttgtggtacgaatattccttgaaagtaccgtcgggattgtacattaccgaaagcgaggtgcatgacgcgcagtttgatgcaattgtcgggaatgtgaacaacggtttgttatataaagcacaataggtttttgccgtgtcaacagctcgtccgcctccgataccgaacaccatatcagccttttgtacagatggattgttctttattttttcaacattttcatagctggagtcaccgccgtaccatacaaaatcaatgatttcaatgtcagagcctttgatgccttcaagcaaagccttttttgatttttccatagctgttttaccgccgactgcaaccgcctttttgccgtacggctttacaatttcgggaatcgccttgtagcaatcaactcccacgctgtaactcggtaaaaattcgctgtatgtgtgtgacataatttatccctccgaaaacaatacttataaataaattatatcaccgcagtctgtgtatttcaatacattagcacaataaattgttaaaattattattgcctgacagatgaaaatatgcacacatcttatgcaatttagcaaaaaattgcgaagaatattcgtgaaaaatacttatggaaatggcttttgcaaagtgctataatcttgtaaatatatataagaagggcggtgcttttatgcaggaaatatacggacagaaaacagacagacagcttgcagcaaagcagagaataattgcagttgcggcaggcagggaaaaggcagaccttgttttaaaaaacgcaaagtatcttaatgtgttttcaaatgagtttttgagcggtgacatagccgttgcaaacggactgattgcgggagtcggaaaatatgacggtaaaacagagattgatgtcagcggaaaactcgttctcccgggctttatcgatgcacacattcaccttgaaagttcaatggtgactcctgctgaatttgcaaaggcagttgttgcccacggtacaaccacagtcataaccgaccctcacgaaatcacaaatgtaatgggtattgacggagttgaatatatgattcaggcatcgcaaaatttgccgattgatgttcattttatgatgccgtcatgtgtgcctgccacagaaattgacgagagcggtgcggagcttgactgcaaggatattgacttgtacttggataataaaaaggtactcggacttgcagagatgatgaactatgtcggtgttatcaacggtgataaaaatgtgctttcaaaaattgttacctcgcaggctcatcacaagaaaattgacggtcacgctcctgagctttcgggcaatgacctcaacgcatacattgcagcaggagtgtattccgaccacgagtgttccacctttgaaaatgcccttgaaaagctgagaaaaggtcagtttattatgataagagagggtactgccgctcataatctcaaggcgcttatgccgcttttgactcagcagtattactcaaggtgtatgtttgcaacagatgataagcatccaagtgatttgctctacggcggtcatattgactacattgtaaaacaggcgctgaaaaacggtgcagatccgattgttgctctcaaaacagcaacccaccatgccgcaagatactttttgctcaataacaaaggtgcgattgcttcgggttatcttgccgatattgttgttgtcaataatcttgaagatttcaatgttgaaactgttttcaagcgtggcaagcttgtttttgacggcgaagttaaggacttttctgctcccacagttgatgaaaagcttgccgaaaaatgctttgacactttccaccttgacagcgtaacgccgagcagtttcaaggttgacggaaaactcgggcttatcggtcttgtcggcggtgaattgctcacacgcaatctcggcacagcagataaaattgatgtggaaaacgatattctgaaaattgcctgcattgagcgtcacaaaggcacaaatcatatcggtgtcggctatgttaaaggctattcgctgaaatcgggtgcagtagcaacctcggttgcccacgattcgcacaacattatcacagtcggctgtaatgatgaagatattgccgttgccgtgaacgcaatcaaggacagcaagggcggtatcgcagttgttgaaaacggcaaaatcaaggctctgctcgaactcccgattgcaggcttgatgtccgatgaaccgctgacaaccgtaaacgaaaagcttgaaaacgcaaagttatctgcatatgaactcggtgcggataaaagcattgatccgtttatgactctctcgtttctaagtctgcccgttatcccaagcttgagaataaccaccaaaggtgtgtttgatgcagaaaattggaaaatgctctgatgtgcggaagcttttaataatacaatgaaatatcaaataatttaaacaggaaaacaaagtgcgtattgtcactttgttttcctgttttattttgtaaaagggctatagtcattttacagtcactttgcatttgtataatttgaatataaaagaaattggttgattaaaacaaatagcaaataaattaagaaatcggcatattcattgtaattgttcaagtcaaaaaatgtgtttagtaaaaattgaggtgaaaaatatgtcatattatattacccggatatttaataacaaacttaaattaggagttatactttttatttttgtagctccgattttagatatattgatggctcttgtggatgtgttcaaaggagcatctgttcctgttcccggattagttacttttttgggatctttcatgacggcaggacttcaaggcgtgttgacagggtatttaccgttgttcttggcaattattgttgcggatgattgcattgaagattacagaataggatacaaaaatattcttatcacaaaaagaggtaagaataaatattttgcattaaatatgcttaaaagttttactgtttcattttttgtgcttataattcctctcttactcaatctccttatggtgcatattgtttttgcgggaggtacatatattcctgatgatgtggaaatgctgaaatctgaacccaatctacttcagtcttacagcaatccgatgttttataacatactttatattcttgttttctcattcattggcggtattgtgggaagcggtgcaacggcacttgcaatggcatttccaaacagatttattctttatccgttagctttcatattatggtatatatcgactgccatcaaaccgtctatcataggagcattaaccccgtttactgtggattctttatcacattatacttttacaattatttttgtagtagcaataaatatagttgctgttctgttttcgttctttaaggtgactaagtatgatcaggtgtaaattaaaaaagtatgcaatcatacttccgctttgtgcagtgtttttcactatgctttgcacatacacatatttgcgattttataattattttaattcggattatgctgagaagttaagcccaaaaggtgttttttgcagagttgcaggtaacggagattttaatgcatcaggtaatgttgcttgcattttcatagtagtgtttgttctgtttttgttttacatatttaccgatgataatgtaagttacattgtaagactgaaatcgagagcctcttttgttacaagaagaattgctgattgtgcggtatttgcttttctgttttcatttttgatagaaacagtcagcgtagttgcggcactcatctgctttgacattaacctgattttagaatcgaattttctgcaatattcggcacttgaacttttgactttgtttttgttttatttcagagcaggactcgttatgctctcgttcggaataatcatttctacaaaagttgctccaattatcaccatagctctgatttttacagagttttttgcagatgtagcttttatgataagcagggtgtggcttccgttcagagatgccatagtggtgtcaaaacttatgaacggcgaaatggttctgtcggatatgtggggcattatattaagagcattgcttatgatgtttatgcttatcttctcttcctactttttgtatcagaaaaaggatgttttgagtaatgttaaaaagtaagcttgttttgtcgataatactgattgttgcgtgctttgctcaattgttcagttgtgtatttcagggagattttcaaaatgcctttatgattggtttagctccaagcgattacggtcttgaaattacaaaatttctgccgcttttgctgcccgtatgttttattctcttctttacaagcggctcaattgagaaccttaaacaaggctacggcaagatgttgattgtacgcaattattcaaaaacagtgctgattttaaagcgttgtcttaacaattttatagcattgatttgcattgttttgttccagttcataatcttttttgttgcaagagaaagtatgactcccgttgaaagcggaactcttaaatctttgattatgtactttctgacaattttttcgctgatagttattcagtctttgcttgaaatcagtattcctgcacacgttgtgaacataggaattttcacctattgctttattgcgtactatttggttcagaattttgttgacgcaccgattttgaaaatgattctcttcccgagcttgatgttcggaatgcagaacggtgctgtgtcgggcgagagcatttactacggatacctgttattcatagttgcgttaaatgctttgtgcatttttattctgaatttgagatttaagaaaaccgatattttttgaggtgatattatggtagaaataaaaaattattgtaaaagtatcaaatcaagaccgattttaaataatgtaagttacaattttgagtacggcaaaatctacggaatttacggacacaacggttcgggcaaaactatgcttttgagagcaattgcaggcttgcttgttcccgacagcggctctgttgtgattgacggaaaggttttgcacaaggatatgtcgttccctccgagcataggcatcgtgattgaaaatatgaacctgttgccccagtacaatgcttttgacaatctgaaaatcctcggcaaaatcaagaaaaccgccaccgatgaagatattaaaacagcgcttgagcgtgttggattaaagtctgatttaaaggtgaaaaagttttcgcttggtatgaaacagaggctgaatattgctcaggctgtgtttgaaaagcagaaaatcatcctgcttgatgaaccgacaaatgcacttgataatgacggtgtacagctgatttacaagcttcttaaagaagaaaaagaaagaggtgcgctcgtagttatcacaactcatcacaaagaggatttggaagaagtttgtgatgttgttttgaaaatgacagaaggtgagctgcatgaaaagtaaactgtttattcataaatttttcgttgttctttgcatctcggttgccgctttgctcggattgtctttccttgccagagcaacaatcgtaaataacagatttgaacaaatggctgttgatgaaaaatatcgtctaaaaccttctgccgacggtcagtttttaattcaatttcaagatgataaaaacggaaatttttatgccactgtcggcttgtttcagggcggatattacggcttggacgatgcgtatattcctacttcatatgatgaaaatacaaaaataaccgctattgaaaaggaagctttcagcgaatttgattgtctgaaaaaagttgttatccccaacggcatttgtgaaatcaaggatgacgcatttaaggattcaaaaaatataacggaaatttatattgctccctccgtaaataagattgcaaaaaccgcttttgacggcattgacaaccttacgatatatgccgaaaagggttcttatgctgaaaaatttgcggttgaaaataaaatcaattataaaaactatacgaccgagcctgaaaatccggaggctaaaaataccgattattcaaaaatcagaaacggtgcgtattacggcgaatattataattatgatgttatctatgatgacggcaagcccgtgtgcgtaataactaaatataacccaatgtcgtcagaggaaaagcttgaaattcctgcacatattgacggcttggatgtgatttcaattgcagatgacgcaataaattacggcggtgcaaaggaaacagtcgttcccgatacagtaaaattcattgccgataatgcgttcaaagaatcctactcccttgaggatatctacctgaccaaaaatgtgtcctacataggaaaatctgccttcaaagactcaaaagacctaacaatccacgccccgacagattcctatgcacacacctttgcgaccgaaaataaaataaatttcaaagctacagacgattaaatctgataagcaatgaataaatctttaaatttacagccctgtacccatttgcagggctgtttttgcaagcaaatggtagataatgggacagtgacctttggtataatgttgataacaggttgaaagatttataaatttaaaaatgcaggaggattttatcatgccaaaacagaaagcatatgtgcgtatcaacagttctgaaagatgttggtatgagattgttgagttcgaggtttcggatgatttgtatgcaaaaataaatgaggcagttgagaacaatattccgttggcggattgcgattttgccgatgaattgtacgagcttgcagtcaatttttcttgagtatgacaatgaaaaatacgaaacttatcgtgttgacattacattcaaagaaaacggcataattacagacataaccattgatgcaatgggtttacagtatcatgatttccgttccgataactatgccgaatgttatccgaattacgaatatatcgaagacgccttgcaggatgcggtggaaatgtaatcattttatgctgtattcaatgtaatgattttatgctgtattcaaaattacccccaaaaaatcacagaaaaaataccccctaaaacaacaaaagctgaggataattttcatatcctcagcttttgttgttttaatcggtccatagtacgacaatgggacaatgctttgtgttataataaatttactataaattgctgaatatgttgtaataaaatgtgatatatgataaaataagagacgagaagacaataaaaaagacaaccctaaggttgtctttagtatgtggtgcaaaggggtttccactaccctacggcatattgccttatcttagaactctgatgaatattgataaacttataaaaaatggtttattgtgtttgttttgatgaatattgataaacctatacatcaaatttctaagttctaatttaattataatattgaaaaatatatttgtcaatagaaaggtgagaattatgaaatatataattggacttgatattggaatcggttcagtgggctgggctgttgtaagaaatgacgatgattgcaaacgattggaggattttggtgtccgcatatttgaatccggagagatcattgaaagtaataaaaatatacgaaaaagtcaaagaagaagaaaatacagaggtatgcgaagaagaattaggagaaggaatcatcgaaaggaacgattgaagaactatcttgaaaatattggatttgtaagtagggcggaactttccgagttctttgctaaaaacaatcatgatattatagatatacgggttcgtgccctcgatgaaatggtgactcctgttgaacttactgcggcattgttgcatatagcaaagcgtcgcggatataaagctttttacgagttgagtgatgaaaataataacgcaaaagataaaaaagccaaagaagaagaagaaaaagatatctacaaggcattaacgaatactgcagatgttataaaaaatggtggttatcgctcaattgcagaagctataatgaaggattctgaacatttttctgataaaatttccggaagatacaagtatagaaatataaaagaaaaagatgaaaagggaaagaaaaaatcagatagcaaaataagtgaaaatgacatactgtttcctaccgaaatgtttgaagatgaggtaagaaaaattttaggcaaacagaaagaattctactctcaacttacagatgaaagtatagataaaatatttgatataatattttcaaggcgagatttcgaagatggacccggaaatactgacgatgaaaacagaccatataagggctttgttgattcgataggcaattgcccctactataagaatgagaaaagaggacaccgttatacggtaataggagatttatttgctttggcaaacaaactttctcaatataaatatgttgagaaaaacacaggcgaagtagtaaaactacctcgggatttgatgagaaatatcgtgaatcagtccttacaaagcggtagcattacgaaaacaaaaatcaatgaactcgcaaaagaatttaacattgtaattcttaatactaagactgctaaaaatgaaaatattgcagattgtattaaatacctcaaagctgtgaagccaatttttgaatcatacggtttcgattgggataaattgatatcggaggaatatacagatcaaaattctttgcttaacagggtaggtgatacaatatctttcaatataactcccaaaagaagaattgatgctttaaacaaaattgatgaactaaaaggaaaagatgaactgataaaaaagctctctaaacaaaatttttcaggaacagcaaaagtttcagataaatatatgattgatgcaatcaatgccttttttgatggaacattagtaggtgaatttcaggcgaatgtacaacaagatgagttttcagtaagtataaaaacagaaaaattgttaaaattaaaaccttttgataataatagtgagtatgcacaaaatcctgtggtgtttagagctatcaatgaaacaagaaaagtggttaatgcaattgttcaaaaatatggcgcaccaaatgcaatgaatattgaaatcgcaagtgaactcaataagagttttgacactcgtcaaaaaatatccactcaacaaaataaaaatgaaaaggaacgaaaaaatgcaataaaacaaatatcattgattacaggtcttgatgaaagagaaattaggccacagtacattgaaagatatcttcttggagaactccagggttggagatgtatgtattcaaatgaagaaataacaaataagaaagaagcaatattgaataaaggaaaacaatatgaaatcgatcatattgtcccattttcgagaattcttgatgatacactaaacaataaagctcttgttcttgcaagagaaaatcagaaaaaaggagcaagaactccgttgatgtatctatctgctgaaaaggaaaaagagttcaagcagcgtgtcaataagttgtttaaaggcaataaaatcaccgagaaaaagtataggtattttatgcttgaatctcttgtaggcgaagatgctgaaaaaattctcggcgattggaaaacaagaaatcttaacgatacacgatatattgcaaaatttttggttaagtattttaatgataatctctactttgcaagggaaaagggtgacgataagagaccggtagtttatgcagtcaagggtgcaataacgtcatctcttcgcagacagtggctcaacaaagaaacatggggaagatatgataaaggcgaactgaagaagataacatattttgatcatgcagttgacgcaatagtaatagcaaactgtttaccggcctatgttattatagctgccgaaaaccacaagcttagagatatatactattctgcaggtaaaattaaaacagaggagtatagaaaaagtcttgacaattgtgttgataccttaatgaaatattatggaatgtctcccgctgtttcaagaaaattacttgaaaaggttaaggaaacaccgtcattactgaagaatattcgttttgaagttgaataccgtgtccgtgattacgagttaatgaagtatttctttaactatgatactaaagtaggtgaagatactcttgatcaaatatttagaaatgatttgtacaaaatatatgatcaccaatttgcagactcaattgagatgccgattgtatcaattaagcctgaaagaaaatattcaggtcagatggttaaggatcgtttcataaaaaagaaagatgcaatttcaggaaaaaacagtgtcaaaactattggtgagaataatagtacggtgttaaatgattcacgcttttattgtgtagatgtatatagaacttgtaatgatgaaacaaacctaaatttcattaaatataccgacttattaaaaagaaataatcatttatatcttcgttcggattatagatatcctgatgattatgctatgcacgaaatgtacctttttcgtggcgactacatcgaaattacaaagaaaaatataattcgttgtggatactacttttcattaaaggacagttcaaaaaatgaactgtatatatcaaaaggaaatacgagacgaaaacttaacaatatgaaggaaaaagaggcgtgttcaataactaaaaaggatacagtaaagaaatttgaaatagacatacttggtaaaaagcttggggaggtaaagaaatatggcgaaccgttatcgttgcttccggagaaaaattgaacataaaggacaactggcttatagtatcaagtgcagaaggcgaaagtagggttccggtttcagacatatactcacttgtaatagaaaatcgtgcagcaatgcttagcgtaagtgtgttgaccacacttacgcaggcaggtgcacatataatactttcgatgaaaaacatcttccggtgtctgcaacattaccaattaacactcattacagaccatttaatgtaataaagaagcaaattgatatgacatatgaatttaaaaatttattgtggcagaaaattattgaaagaaaaatacacagccggtatttatgcttgaaataccgtgaaattaacaaagaaaaatgtgatgaaattgatgcgttatccaaaagcgtgaagcccggggatacaacaaaccgagatgcggttgcggcacgaaaatattttgttgcatttgaaaattgtgatacactttttgaaacacttacatatagcaatcgcaagagcttgattgatttgccaaaccaaattattttgcaatcagataaaagaaagcaatattcgcaatttagaaaaaatctgattaaatcaggttttatcatgatgcagttttctgtatatgcgagaactgtcagaaataatgatgatgcaaaaaagtattcaaaaatagttaaaagtattttgcccccatcgggttcggtacgattgctgataataaccgatcgtcagtatgattctatggaaattttgataggagaaaagtatgcagaggaaaactatcttgacaaaagagatatcattgaattataatatgcttgtgtttgaattgtcaaaaccgcctacattctacaagatgtagtggttttggctctctgatgaatattgataaccttatacttgacagcataggtgctttagtgtctgaggttttggctctctgatgaatattgataaacttataccgtgagcggcatacaaataacctacatcaagttttggctctctgatgaatattgataaacttatacccgttacgacggatgttaactggattgcgggttttggctctctgatgaatattgataaacttatacacttgacctttcgggagttgccacacagggttttggctctctgatgaatattgataaacttatacagagccttgaaaatcagcttgcgaactttagttttggctctctgttgaatattaaattaaaagaaacagcttgtggaattctgttctgcaagttgcttttttataaccaaaggggagatagagggacagcgttctttggtataatatagtggacagtttggaacatcggacgaaaataaaattttttttgcaaattgcaatagcaagtgaaaacagttttttgtggatgaaattgcaaccataggcacaaagcatatgcacattttcatttactcaaaatcgccgattcgcttttcaacattgaagaacagattccctgttgcacatattgataaagctaacggcagtgtaatggaaaatcgtgactatctccgcaaggagggcaagtggcagggttctgataaggaacagacgaatcttattgatacttttgaagaggttggtgatgttccaaagcctgttgatgaaaattctcccgatatgtctgctctgattgaagaaatcgaaaacggactcgatacctgcgaaattatcaagctccatccaaaatatgcctttaggataaaagagattgacacactcaggcaaacagttcttgaacttttatgctcatgttgataaaacaagcaaactgaacatttcacgcactcttgatacaaagctgaaaattgatttgtaattccgtgaataaattttcattttccggaaaatttactgtatttttagaacagattttgcggttaaaaaggtgcgaaaatcctgatgattactgatatcttgtgccgttaattttcaagtttaaaatcacaatttaaatttttagaaaatccgaaaaaagttgccgacagagaaaatttctgcaaaaagaaaaagtctcaaaaacggcttatctaagccatttttgagacatcataccttggcaggggcagaaggacttgacccctcggcacgcggttttggagcggctcagaagtggtattatcttgcatcacccaatgccacaaagttcaaaaaatgcagtaaccatcagcaatctcaggattttgcagcattaaacaatatttaatatattgccttttattttctaaaaatcagaaagttttttagaaaaatttttagaaaacccttacaagatttcatcagttaaaaaactgccaatgcataatattcaaaattcacacaaaaatcatcgaaaaatcccccctaaaacaaccaaaagctgaggacaatttccatatcctcagctttaattttgcctgctatttgaccgtttataaagactgtctaaacaccaaaagcaaacgctttatctgtttatcatcaatactttcattgaaaattataacccataaatgctttgttactcagttcaataacttccataattctttgcacaagttcgtaaaaagtggataatgaaaaatgaccttctatggtagaattaaagaaactacaataggaggttttattatgacaagagaatattgacatatacagcaatataaaaaattattgggcctgaaaagaagaaggattcacatatcggaaaatcagtgataatcagttggaattcagttttctacctttgggatagcgtactaaaatattttgtactttatctgtatagctaatttgttaaggtaatggtaaagaagttctttgcaatggtagtattccatattgaaagcttttaccgttatgcctttaaggatatcttctttatcaatgtcagtttctttcataaattgtcctagtccataatgtgcaaggcaatttctaatatttctgtttttaagagaactatttaattccaacttggtgtttagtaattcgttcatttcccttataaagtcgcaaaggtaataatattgtaaataggcaaatttgaatttgtggagagatttcctgaactttccttattttacaggcttttcagccccttagatagtgaaatgatatgtattttcccttatttttgcccttatgcggaacccgcaagggaaataagggaattttttatttagtcgttgcctgctactttatcaagaagtctggcggagttccgctttgcctttcttgtagagtgggcatagacattcattgtggtactgacatcagagtgtcctaacagttcctgcacatcttttggggcagctccgtttgagaggaggttgcttgtgtaagtgtgtcgcaactggtggaaatggaaattctcaaatccgtccagtcgtttcgcaactgaccggcaggcaatgctgagtgtgcttggcagttccagacatccgtccggtctcaggcagacaaaagaaatttccttgtaatctgccgggatttcttcggttctgtccagatgataatattcataatacactctgtttttgtcttgcacttccttgtagaaattgcggtggtaaaattcaccatactgcatccggcttttaagctgttcttttctgacggttttcagtatttcggtcagagtattaccaaaatcaacaatccttactttctttcgcttggtcggtccgatgatgtttttatgttttgtgccatcgtagcggatacttcttttaatggtcaggcattgttcttcaagattgatgtcctgccatgtcaatccgcaaacttcaccgatacgaagtcccgcatagtatgcgatctggattggcaggattgcaggtggattctttactttgaggtattctatcagtctctcataatcttcatgtgaaataggctgtatgccttcttctacttcatcatcggagaataaatccacatcctctgcctgctttttcagcttaatatactgcatgggattaaaagtaatcaactgttttggaaatactgcaaaccggaaagcctgctgtaatactgccgaaaaggaatggatgtaatctttgctgtatcattttctcacttttccatctggaaattccccaccgaatgtcagcagatcgagaaatgtctgtaaatgttcagcggtaacggatttcaatttgcgttctgcaatcggatgtttcttgatacaacggattgcaccaagataattttccactgtaccattgctgagtgttccgactttcagttcttcttctgcccacatatcaagaagttctcctacagtaagattatctgtctttgcgacaaatttcttgctttcgtaatcatccattgcctgacggagcagtttttccgtttcacttttactttctgttccagcgtattctttctgaaccagattgccgcttgcatcttctacatagaagcggtagtaccatttctttcctttttttcttacagatccttttgccataattgtatgtctcctttcgacatcggacaatcggaactgatgaaatgcttcttgcgtgtaggcatcttatggacaagtccataagccaattcgccgctcgtcaaatctgtaaacagcctgactcgctcgtgctcattatatcataactctggttgtcgttctataccgaatcggaatcctcatacaaaacttctgataatagatttgcaagcctttgttctgcagtttccggtttcttggaatagagtcttacgatatctgccatgtcattaaaggcattaacagtatgggtgatctcccggagaaacataatctcattatattcatcattcgattcaaaccccattacttttgcaatatcagcttcattcgtgttgcccttgtaattcttgcgggcaaactggaatgattccagaaacaggttatattgctttaacatcaacaaatggatggaatggaaacggcaaggattctgcgtcagaaaaatgaaaaaatggtattgatatttgtaactgctgtggaggagtatgtttttcaggcatttgatgttgcagcatttcattatttggtgaaaccattttcagatgaaaaatttgaggaagttgtgaaatgtgcagtcagaagcattgaaaaatactctgaaaatcaatcggatgaaaaatacatgatggtgcagtccggaggaagctgatgtatttgcatcccgcaaaaaagccagcatgagactgctttctacaaaatgtatggtaagaagacattttcctcccacacgaccaatcacgctatccatttgtacaatggtcgtttccgggtttgctcccagatatttttgaaagtcagcgtagcttcgttcaatacggcagccccggtcaactttaaattcaggcttcttataacggggacggtatttcactttacggggcagatcaatgttcctgatatcaaagagctgggcatccacgtagttatacaatgtcttttcactgcacatcagttcatctacatgagcaagatagatttgatgaagcgactgcccgtttttaactaaaggactgatgatcccgttaattcttgcaatatcatcttcgttggacatgataccggttctggcttccgaaacagcatgatgtgcactctcatgtgcatctgccggatcataaatacgttttaataacgtgcatttcggcagctgactgcagccattacaaacataaggtggcttatttttgacagaacagacatcttctacaaaatcagaacaatgtaaggtgcattcagagcacaggctgcatttgtaagcagattggtgtgtacagcttgttccgcaaatcctttttgctttgcatgtagcacggaatttacaaggattatacggatatccaggacgaccgcttttcttatcataggaatactttttaatctccttggcaatggttgtacggtcctttcctaactctttgccaattgccccaaaggatgcattctcctgaaggcgttgagcaataatcattcgatcttcataagataaaaactttgacatggtgactcctttccagccgccagaaatcaaagcataacagaaaagagaccaactatccagtcagtctcaattcatttgtaaaagaaaatccatacctttcttttacactgataactattaacttttacacttatccaagatagcgggtatggaatcttggattacaattgaggagattgtataatacttaaaaacattgcttgttcatagctataaactatgacaaatgattttccagaatcattttccggaattgtcgggcggctgagttcagcggatgttggcaatcgtatagcatgcatatatttctttccggaatgttttcttttagtgatatctggacaatttctcttttttgaatagaatcatgtgccattgcttctggaagaaaagccaggcccagctcacatttgacaagagggagaatctgatcggtcgtggcggtttcgatatcaggggcaagttcgagtccgtgagagagaaagagtgcatgataaaactgaaacgtcgttgtttcacgtccaagcgaaatcagcggatagttttttaattctgcgagagataattcctggcagccgagtgcggtaaaagttgtaccaccgacaaggatttcctgaaaaggctgcagcataatctgtctgagtggtgattccacggaagctggagttgaaacaatagcaaagtcgatttttccactttttacggcatcaattgcctgtggggtggagtaattgtacagtttcaggcggatgccgggataggtcatatgaaatgctttaagtttattaaaaagaaaaatatttaatgcggtctcgctgacaccgatcgcaatgcttccatgtgacagccccgtactatccgatagctcctcttctgcggcaaaaatctgtgacattgcagcggaaatatgggtataaagtttttccccttccggggtaagctgaatgccccggttggtacgtacaaacaaagttgtattaatctgctgctccagacagttcatggcccttgtcacatttggctgactgctgccgagtgtatgtgcggctttggtaaagttgtggtattttgcaacataataaaaaattcgatagtattcaaaatttacattcatcgatagaaccccctctgacatatcaaaatgttatttataacatatcaattatagtttttacttatccataatgcaagagtataatcaaagaagatgaaaaaagcaagaaaggaagcgcatgaagcatgaaggaacagacgatttttccacgagaggaaaaggcagaggttttgtttcagaaaatattaaatgatcattgggcatgtgaaaagttacaggaaacattttgtaactgtttattttgcaatgatgattcggatgccgaaatttctccggcagaattttcactggctttgttcaatgcgtatacgaaccgggacctgtcggccttccttatgggcatatgtcagaatacattgtttgacctgttgagaaattcatttctgattccctatcgttttgatgcagacggaaagcaaaatccagtcattatgacggatgaaaatgggcaattacttcctgcatacaaaggcacagctcatgaaaaagaataccggcattttcatgaggtatacaaagatctcggcaatcagaaaaatatatattttgcacaggcataccgttacagccatgaatatcagtcggattacatggatgtgaaacaaaagattcttgaaaaaaatatgggtgtgctgctcattcgtgaactgccggataccgtaaaggagaaggagacagaggcagaagtatattctgccgtgtgggatcttatgattgagctggaaaagaatcttccaatggcttacgtattttatggacaggattcgctggtggagaataacaaccgatatgatgaaattggaattttccttccgaattctatcttcctgaaaaatctcgaacgtcatgttgcaaaagcggaggagatcatttatggcgaaaaatgattatatagaaatcatggaaaaaaatcatatggagattccgtggcacgattatacagagaatgacggtgaagtgctgattcagcaggcaggactgattgaaaaggcatcggttgtcggccgggttggtctgattatgctttcctgtggaaccggagcatggcgtgtgcggacttctatgaacaggctttccaaggaacttggagtaacctgtacagtggatgtgggactgatgtccatagagtttaattgttttgatggaaaagagtgtgtttcacagtctcttagtattgcaaataccggagtaaatacttccaagctttatcggatggaacagtttgtaaatagttttccatctcaggaagcgcatttgaccggagaagaaatccataagcggctggatgaaatcgagcagatccatgaactctattctccggtaaaactcggattggcagcggcacttgcatgttgtggatttacatttctgctgggtggtggcccggtggagatgatatttgcatttattgccgctggtgttggtaaccttatccggatgaagctgatcaaacatcattacacattgtttttaaacattgcggtatctatttcagctgcatgtctgacgtatgctgtctgtctgcatatggcagagctgttgttacacgtttccgcagtgcatgaggccggatatatctgttccatgttgtttattattccgggatttccgtttatcacaagtggaattgacttggcaaagctggatttgcgatctggtctggagcggcttacctattccattattattgttctgggtgcaacggtgtttgcatggatcatggcacttttgttaaagcttcagccacaggattttgtagctttgcatctaggaagtatgatgcatctggttttacgtctgatcgcaagtttttgcggagtatttggattctcgattatgtttaacagttcagtctgtatagcagcaacggcggcatgtatcggtgccgttgcaaatacattgcggctggaactggtcgattatgcagggatgccatctgcggcagcagctttcataggagcactgactgcaggtctgcttgcatccatcataaagagaaatcatggatatccgagaatttcactgacagtgccatccattgtaattatggtgccaggattatatttgtatcgtgcgatttataattttggaattatgtcactaacagaggcagttttgtggcttgcagcagcgatcatgattattgtatcgttaccgcttggacttatttttgcgagaatacttaccgaccggacattccggtattgctcataacagattatgcatgggtttatgttcaaagacagtgtcaatagaaggagaataaaatatgcttacagctgtaacaggaattaactggggagacgaaggaaaaggtcgtgtgatcgatctgcttgcggagaatgcagatgttgttgtccgctatcagggcggcaataacgctggtcatacagtggttgccaaacagcagaaatttgtcttaaatctgctgccatccggtattctgcatgagaatgtaatatgcgtactcggcgatggtatggtggtagacctgaaacatctgacaaacgaaattgcacagatcagggaaaaaggtgttgtggtcacaccaaacaacttaaaactttccaaacgggcaacaatctctatgccttggcacaaaattcaggatgaactcgaagaaacacgtcttgcaaaaacaggagcagcgtttggttccacaaaaagaggcattgcctatgcatacagtgacaaatacagaaagaagacactgcgtcttggggatctgcttcatctaaaagaggaatccgtacagaatcgtttgaaaatgatgctcgaggcaaagaatctggagcttgcaggatgctattatcaggaaccgatgtcctatccggcactgctttcctggtgtgaagctcaggcagcagagttatggccatatatagtagaca

SEQ ID NO: 714 - DNA, 23366 bp, synthetic construct
  source 1..23366: mol_type = other DNA
  misc_feature 1..23366: note = Synthetic
gcatagaaattatttttgttattattggatagtattgttaaatctgagttgaattttaaacatagtaattattttatatatcactatggaaattctattaattacggttatttttgcagacgggagaccaatcggagacggttcccgtcacattaaggacacaccgattaaatatgaggataggatgtgcaaatattccttgaggcagtttattcggcagttccgcaataaaggggttacccaaattcacagataaggagatgtaaaaatgacaaaacaaaaggagaagaagaaagcttcaattgtcaagaaaatgatgattgccgttgtcgcaggttttgtagtcggctttatatgtctgctgattaaaagtgcggtaatgggaacagacggcgaaggagcctggaaagttgttgaggcaattttgttccaggacatcaccgcaacaaaagatatcgaaggactcggcttgttctacatcgtaggtcagctgtttatgaagggacttcagatgatgattgttcctctcgtcctttgttcgctgacacttgcactttgcagccttgcaaacccgaaaaagctcggtcgaatcgcaggtaaaacatttgtgtcctacctttgcttctatatcgtagcagcagctcttgcaggcgcagcagcttatcttgcaaagagtcttggttggttcacagtcaatcttccggcacaacaggctcaggacatcgttacaatggagggttacaacccgctcgttacaattgtaaacgctgttccgagcaatatgattaacgcaatgtcatctaacaacacaattctttgtgttgttgttatcgcaattatctttggcctttgtatgacaaagatgggcgaaaaagcagatccgcttaagaaagtttttgaaaacatcaacgatatcgttcagatgttcctcaacttccttatcaacaagattgctcctatcgcaattttctgtatgatcgtaagagcactcgccgtttacggaattgagtacatttcaccgacaatgatgtggattgttgtaacaattgttgtaagccttcttcttgtttgcacaatttacccaatcggtattttcattacaacaggacttaatccgtttatcttccttaaaaaggcggcaaaaatcggtatgtttgcagcagcaacaaactcgtctgccgcaacgcttccgcttaataaggaaacctgtattaacgaactcggctgttccgaagaaatcagcagctttgttcttccaacaggtatgacaatcaatatgaacggtacaaccgcaatgcatatgattgccattacattcatcgccacagccgcaggcgtcaacattactcctgcaaccctttgccttacagcattcctctcaatctgcacagcagtcggtactccggcaatccctgttgcaggtacaacaatggtttatgttgtaatgatgggacttggcttgaactcagatctttgtatgattggctactcgcttattcttgctatgaactacctcccgggtatggctgttatcacacttaatgttatcggtgacgccgctaccaatgttatagtttgtgcaaaagaacattgcctcaacaaagaaatctataacagcaaaacccctaaaaacaactgatttcagtaagataactccaggaaaccccttgtaaaaccgaaccgccctcgacagcgcatgcactgccgagggcggcttagttttactgtgagccaccgttctcagttcgtgaagatagtatggtataaaaaatgacatattatgcccgagcctaacattgcaaccgttcgcacaattccgtatgggcggatattatccgcccgcaggtaattgcagaaaatttatgatgaaaataaactgtataaatgggatacatttacctaaataatgtagtagtcagttacgattaaacttcattatttatcagccaaaaattccttgccggctttatcggttgcaagaattgcattgatgaatgcgtcctcggtcggattacccgggacatatttccactcaacaacgcttgcggctttgtgcgcaattgcaggcacatcatccggagtaagtgcaatttcgccgagagtgcaaggaagtccgatactgtggttaaattcaaaaattctgtttcgctcctcaaattgtccgtcatatgtcagcagacacagcacaccgaatgaaacaatttcgccgtgcagatgctgccgttcacattgcggaaagagtgacgcaccgtaataaacacaatgtgcgagcgatgaattgtagtaataatcctcctcgggattcggattgttttcgtgtacggtaaaatttgaaacaagtcccgccgtgataataatgtcaagcgcaacctgctcaattgcctctgtcggcacattgtttttgcagtcctcaagagcttttttgccaaagcttatgagcggttcggtacttgcggaggcaattgccttgccaagcaacggtgtgtgaatcatatttttttcacgacacgcaaaaattacttcatattcctttgaaagtgcgtcaccgattcctgcccacataagcttttcgggtgattcggcaataatttttgtgttgataaatgtgtgaattgcaggggctttgtggtacgaatattccttgaaagtaccgtcgggattgtacattaccgaaagcgaggtgcatgacgcacagtttgatgcaattgtcgggaatgtgaacaacggtttgttatataaagcacaataggtttttgccgtgtcaacagctcgtccgcctccgataccgaacaccatatcagccttttgcacagacggattgttctttattttttcaacattttcatagctggagtcaccgccgtaccatacaaaatcaatgatttcaatgtcagagcctttgatgccttcaagcaaagccttttttgatttttccatagctgttttaccgccgactgcaaccgcctttttgccgtacggctttacaatttcgggaatcgccttgtagcaatcaactcccacgctgtaactcggtaaaaattcgctgtatgtgtgtgacataatttatccctccgaaaataatacttataaataaattatatcaccgcagtttgtgcatttcaatacattagcacaataaattgttaaaattattattgcctgacagatgaaaatatgcacacatcttatgcaatttagcaaaaaattgcgaagaatattcgtgaaaaatacttatggaaatggcttttgcaaagtgctataatcttgtaaatatatataagaagggcggtgcttttatgcaggaaatatacggacagaaaacagacagacagcttgcagcaaagcagagactaattgcagttgcggcaggcagggaaaaggcagaccttgttttaaaaaacgcaaagtatcttaatgtgttttctaatgaatttttgagcggtgacatagccgttgcaaacggactgattgccggtgtcggaaaatatgacggcaaaacagagattgatgtcagcggaaaactcgttcttcccggctttattgacgcacatattcaccttgaaagttcaatggtgactcctgctgaatttgcaaaggcagttgttgcccacggtacgaccacagtcataaccgaccctcacgaaatcacaaatgtaatgggcattgacggagttgaatatatgattcaggcatcgcaaaatttgccgattgatgttcattttatgatgccgtcatgtgtgcctgccacagaaattgacgagagcggtgcggagcttgactgcaaggatattgacttgtacttggataataaaaaggtactcggacttgcagagatgatgaactatgtcggtgttatcaacggcgataaaaatgtgctttcaaaaattgtcacctcgcaggctcatcacaagaaaattgacggtcacgctcctgagctttcgggcaatgacctcaacgcatacattgccgcaggtgtctattccgaccacgagtgttccacctttgaaaatgcccttgaaaagctgagaaaaggtcagtttattatgataagagagggtactgccgctcataatctcaaggcgcttatgccgcttttgactcagcagtattactcaaggtgtatgtttgcaacagatgataagcatccaagtgacttgctctacggcggtcatattgactacatcgtaaaacaggcgctgaaaaacggtgcagatccgattgttgctctcaaaacagcaacccaccatgccgcaagatactttttgctcaataacaaaggtgcgattgcttcgggttatcttgctgatattgttgttgtcgataatcttgaagatttcaatgttgaaactgttttcaagtgtggcaagcttgtttttgacggcgaagttaaggacttttctgctcccacagttgatgaaaagcttgccgaaaaatgctttgacactttccaccttgacagcgtaacgccgagcagtttcaaggttgacggaaaactcgggcttatcggtcttgtcggcggtgaattgctcacacgcaatctcggcacagcagataaaattgatgtggaaaacgatattctgaaaattgcctgcattgagcgtcacaaaggcacaaatcatataggtgtcggctatgttaaaggctattcgctgaaatcgggcgcagtcgcaacctcggttgcccacgattcgcacaacattatcacagtcggctgtaatgatgatgatattgccgttgccgtgaatgcaatcaaggacagcaagggcggtatcgcagttgttgaaaatggcaaaatcaaggctctgctcgaactcccgattgcaggcttgatgtctgatgaaccgctgacaaccgtaaacgaaaagcttgaaaacgcaaagttatctgcatatgaactcggtgcggataaaagcattgatccgtttatgactctctcgtttctaagtctgcccgttatcccaagcttgagaataaccaccaaaggtgtgtttgatgcggaaaattggaaaatgctctgatgtgcggaaacttttaacaatacaataaaatatcaaataatttaaacaggaaaacaaaatgcgtatttgtcgctgtgttttcctgttttattttgtcaaaaaaactatagtcattttacagtcactttgcatttgtataatttgaatataaaaggaatcggttgattaaaacaaatagcaaataaattaagaaatcggcatattcattgtaattgttcaaatcaaaaaatgtgtttagtaaaaattgaggtgaaaaatatgtcatattacattacccgaatatttaataacaaacttaaattaggagttatactttttatttttgcagctccgattttagatgtattgaaggctcttatagatgtgagcaaaggagcggctgttccttttccggcattggctgctttcttggggtcttttatgacgacaggacttcaaggcgtgttgaaagggtatttaccgttgttcttggcaattattgttgcggacgattgcattgaagattacagaataggatacaaaaatattcttgtcaccaaaagaggcaagaataagtattttgcattaaatatgcttaaaagttttactgtttcatttttgatacttgtaatccctcttttgcttaatcttcttatggtgcatatcgtttttgcaggaggtacatatttatttatggatccggaatctataaaggtaataccaagtatggctgagcagttcagtcacccgatgttttataatctgctttgtattttcctattttcatttgttggtgcttttttgggaagcggtgcaacggcacttgcaatggcgtttcctaacagatttatcctttatccgttagatttcatattgtggtatataccgtgtattatggaatcgtcggtcagaggtgcttttcaaccatttaccgaatatcccctgtcaaaatatttccccggagttattttagtgttagccataaatgtgattgctgttctgttttcgttctttaaggtgactaagtatgatcaggtgtaaattaaaaaagtatgcaatcatacttccgctttgtgcagtgttttttactctgctttgcacatacacatatttacgattttataattattttaattcggattatgctgagaagttaagcccaaaaggtgttttttacagagttgcaggtaacggagattttactgcatcaggtaatgttgtttgcattttcatagtagtgtttgttctgcttttgttttacatatttaccgatgagaatgtaagctacattgtaagactgaaatcgagagcctcttttgtgacaggaagaattgctgattgtgcggtatttgcttttttgttttcgttttttatagaagcagtcagcgtagttgcggcactcatctgctttgacattaacctgattttagaatcgaattttttgcaatattcggcacttgaacttttgactttgtttttgttttatttcagagcaggactcgttatgctctcattcggaataatcatttctccgaaagttgctccaattatcaccatatctctgatttttacagagttttttgcagatgtagcttttatgataagcagggtgtggcttccgttcagagatgccatagtgttgtcaaaacttatgaacggcgaaatggttctgtcggatatgtggggcattatattaagagcattgcttatgatgtttatgcttatcttctcttcctactttttgtatcagaaaaaggatgttttgagtaatgttaaaaagtaagcttgttttgtcgataatactaattgttgcgtgccttgctcaattgttcagttgtgtatttcaggggaactttcaaaatgcctttatgattggtttagccccaaacaattacggctttgaaattacaaaatttatgctgcttttgttgcccctatgttttattctcttctttacaagcggctcaattgagaaccttaaacaaggctacggcaagatgttgattgtacgcaattattcaaaaacagtgctgattttaaagcgttgtcttaacaattttatagcattgatttgcattgttttgttccagttcataatcttttttgttgcaagagaaagtatgactcccgttggaagcggaactcttaaatctttgattatgtactttctgacaattttttcgctgatagttattcagtctttgcttgaaatcagtattcctgcacacattgtgaacataggaattttcatctattgctttattgcgtactatttggttcagaattttgttgacgcaccgatttggaaaatgattctcttcccgagtttgatgttcggaatgcagaacggtgctgtgtcgggcgagagcatttactacggatacctgttattcatagttgcgttaaatgctttgtgcatttttattctgaatttgagatttaagaaaaccgatattttttgaggtgatattatggtagaaataaaaaattattgtaaaagtatcaaatcaagaccgattttaaataatgtaagttacaattttgagtacggcaaaatctacggactttacggacacaacggttcgggcaaaactatgcttttgagagcaattgcaggcttgcttgttcccgacagtggctctgttgtgattgacggaaaggttttgcacaaggatatgtcgttccctccgagcataggtatcgtgattgaaaatatgaacctgttgccccagtacaatgcttttgacaatctgaaaatcctcggcaaaatcaagaaaaccgccaccgatgaggacattaaaacagcgcttgagcgtgtgggattaaagtccgatttaaaggtgaaaaagttttcgcttggtatgaaacagaggctgaatattgctcaggctgtgtttgaaaagcagaaaatcatcctgcttgatgaaccgacaaatgcacttgataatgacggtgtacagcttatttacaagcttcttaaagaagaaaaagaaagaggtgcgctcgtggttatcacaactcatcacaaagaggatttggaagaagtttgtgatgttgttttggaaatgacagaaggtgagctgcatgaaaagtaaactgtttattcataaatttttcattgttctttgcatctcggttgccgctttgctcggattgtctttccttgccagagcgacaattgtaaataacagatttgaacaaatggctgttgatgaaaaatatcgcctaaaggcttcagctgacggtcagtttgtaattcaatttcaagacgatgaaaacggaaatttttatgccactgtcggcttgtttcagggcggatattacggcttggacgatgcgtatattccgacttcatacgatgaaaatacaaaaataaccgctatcgaaaatgaggctttcagcggctttgattgtctgaaaaaagttgttatccccaacggcatttgtgaaatcaaggatgacgcatttaaggattcaaaaaatataacggaaatttatattgcgccctccgtaaataagattgcaaaaaccgcttttgacggcattgacaaccttacgatatatgccgaaaagggttcttatgccgaaaaatttgcggttgaaaataaaatcaattataaaaactatacgaccgagcctgaaaatccggaggctaaaaataccgattattcaaaaatcagaaacggtgcgtattacggcgaatattataattatgatgttatctatgatgacggcaagcccgtgtgcgtaataactaactataacccaatgtcgacagaggaaaagcttgaaattcctgcacatattgacggcttggatgtgatttcaattgcagatgacgcaataaattacggcggtgcaaaggaaacagtcgttcccgatacagtaaaattcattgccgataatgcgttcaaagaatcctactcccttgaggatatctacctgaccaaaaatgtgtcctacataggaaaatctgccttcaaagactcaaaagacctaacaatccacgccccgacagattcctatgcacacacctttgcgaccgaaaataaaataaatttcaaagctacagacgattaaatctgataagcaatgaataaatctttaattttacagccctgtacccatttgcagggctgtttttgcaagcaaagggtagataatggtacagtgacctttggtataatgttgataacaggttgaaagaattataaatttaaaaattcaggaggattttatcatagcaaaacagaaagcatatgtgcgtatcaacagttctgaaagatgttggtatgagattgttgagttcgagatttcggatgatttgtatgcaaaaataaatgaggcagttgagaacaatatcccgttggcggattgcgattttgccgatgaattgtacgagcttgcagtcaatttttcttgagtatgacaatgaaaaatacgaaacttatcgtgttgacattactttcaaagaaaacggcataattacagacataaccgttgatgcaatgggtttacagtatcatgatttccgttctgataactatgccgaatgttatccgaattacgaatatatcgaagacgccttgcaggatgcggtggaaatgtaatcattttatgttgtattcaatgtaatgattttatgctgtattcaaaattacccccaaaaaatcacagaaaaaataacccctaaaacaacaaaagctgaggataattttcatatcctcagcttttgttgttttaatcggtccatagtactgacaatgggacaatgctttgcgttataataaatttactataaattgctgaatatgttgtaataaaatgtgatatatgataaaataagagacgagaagacaataaaaaagacaaccctaaggttgtctttaatatgtggtgcgaaggggtttccactaccctacggcatattgccttatcttagaactctgatgaatattgataaacttataaaaaatggtttattgtgtttgttttgatgaatattgataaacctatacatcaaatttctaagttctaatttaattataatattgaaaaatatatttgtcaatagaaaggagagaattatgaaatatataattggacttgatatcggaatcggttcagtgggctgggctgttgtaagaaatgacgatgattgcaaacgattggaggattttggtgtccgcatatttgaatccggagagatcattgaaagtaataaaaatatacgaaacagtcaaagaagaagaaaatacagaggtatgcgaagaagaattaggagaaggaatcatcgaaaggaacgattgaagaactatcttgaaaatattgaatttgtaagtagggcggaactttccgagttctttgctaaaaacaatcacgatattatagatatacgggttcgtgccctcgatgaaatggtgactcctgttgaacttactgcggcattgttgcatatagcaaagcgtcgcggatataaagctttttacgagttgagtgatgaaaataataacgcaaaagataaaaaagccaaagaagaagaagaaaaagatatctacaaggcattaacgaatactgcagatgttataaaaaatggtggttatcgctcaattgcagaagctataatgaaggattctgaacatttttctgataaaatttccggaagatacaagtatagaaatataaaagaaaaagatgaaaagggaaagaaaaaatcagatggcaaaataagtgaaaatgacatactgtttcctaccgaaatgtttgaagatgaggtaagaaaaattttaggcaaacagaaagaattctaccctcaacttacagatgaaagtatagataaaatatttgatataatattttcaaggcgagatttcgaagatggaccaggaaatactgatgatgaaaacagaccatataagggctttgttgattcgataggcaattgcccctactataagaatgagaaaagaggacaccgttatacggtaataggagatttatttgctttggcaaacaaactttctcaatataaatatgttgagaaaaacacaggcgaagtagtaaaactacctcgggatttgatgagaaatatcgtaaatcagtccttacaaagcggtagcattacgaaaacaaaaatcaatgaactcgcaaaagaacttaacattgtaattcttaatactaagactgctaaaaatgaaaatattgcagattgtattaaatacctcaaagctgtgaagccaatttttgaatcatacggtttcgattgggataaattgatatcggaggaatatacagatcaaaattctttgcttaacagggtaggtgatacaatatctttcaatataactcccaaaagaagaattgatgctttaaacaaaattgatgaactaaaaggaaaagatgaactgataaaaaagctctctaaacaaaatttttcaggaacagcaaaagtttcagataaatatatgattgatgcaatcaatgccttttttgatggaacattagtaggtgaatttcaggcgaatgtacaacaagatgagttttcagtaagtataaaaacagaaaaattgttaaaattaaaaccttttgataataatagtgagtatgcacaaaatcctgtggtgtttagagctatcaatgaaacaagaaaagtggttaatgcaattgttcaaaaatatggcgcaccaaatgcaatgaatattgaaatcgcaagtgaactcaataagagttttgacactcgtcaaaaaatatccactcaacaaaataaaaatgaaaaggaacgaaaaaatgcaataaaacaaatatcattgattacaggtcttgatgaaagagaaattaggccacagtacattgaaagatatcttcttggagaactccagggttggagatgtatgtattcaaatgaagaaataacaaataagaaagaagcaatattgaataaaggaaaacaatatgaaatcgatcatattgtcccattttcgagaattcttgatgatacactaaacaataaagctcttgttcttgcaagagaaaatcagaaaaaaggagcaagaactccgttgatgtatctatctgctgaaaaggaaaaagagttcaaacagcgtgtcaataagttgtttaaaggcaataaaatcaccgagaaaaagtataggtattttatgcttgaatcgcttgtaggcgaagatgctgaaaaaattctcggcgattggaaaacaagaaatcttaacgatacacgatatattgcaaaatttttggttaagtattttaatgataatctctactttgcaagggaaaagggtgacgataagagaccggtagtttatgcagttaagggtgcaataacatcatctcttcgcagacagtggctcaacaaagaaacatggggaagatatgataaaggcgaactgaagaagataacatattttgatcatgcagttgacgcaatagtaatagcaaactgtttaccggcctatgttattatagctgccgaaaaccacaagcttagagatatatactattctgcaggtaaaattaaaacagaggagtatagaaaaagtcttgacaattgtgttgataccttaatgaaatattatggaatgtctcccgctgtttcaagaaaattacttgaaaaggttaaggaaacaccgtcattactgaagaatattcgttttgaagttgaataccgtgtccgtgattacgagttaatgaaatatttctttaactatgatactaaagtaggtgaagatactcttgatcaaatatttagaaatgatttgtacaaaatatatgatcaccaatttgcagactcaattgagatgccgattgtatcaattaagcctgaaagaaaatattcaggtcagatggttaaggacaactttttgaaaaagagagtcgcaaattcagaaaataaatatgttaaaactattgataaaaataacgatgcagtgttagataattcgtattattattgtgtcgaagtatacagaacgaggagtggtaatattgatttgcagggaattaagtatacagatttagttaataaaaataaaaaattatacttgaagccatgttataagtatcctgaaaattattataaatatataatgtatttgtttaaaggcgattatttaagaataaaaggtcctaagtctacaagacttggcttttataaggcggtaaataatataaatcaaaattcaataaaaatcacacgttataacagcaaatacacgagggcattccgagaagaatcaacaacaataagtgcagatgcagagatagaaaaaatatatgtagacattcttggaaaaaaaggaaaggtgttaacaaaacatggcgaaccgttatcgttgcttccggagaaaaattgaacataaaggacaactggcttatagtatcaagtgcagaaggcgaaagtagggttccggtttcagacatatattcacttgtaatagaaaatcgtgcagcaatgcttagcgtaagtgtgttgaccacacttacgcaggcaggtgcacatataatactttgcgatgaaaaacatcttcaggtgtctgcaacattaccaattaacactcattacagaccatttaatgtaataaagaagcaaattgatatgacatatgaatttaaaaatttattgtggcagaaaattattgaaagaaaaatacacaaccggtatttatgcttgaaataccgtgaaattaacaaagaaaaatgtgatgaaattgatgcgttatccaaaagcgtgaagcccggggatacaacaaaccgagaggcggttgcggcacgaaaatattttgttgcatttgaaaattgtgatacactttttgaaacacttacacatagcaatcgcaagagcttgattgatttgccaaaccaaattattttgcaatcagataaaagaaagcaatattcgcaatttagaaaaaatctgattaaatcaggttttatcatggtgcgattttctgtatatgcgagaactgtcagaaataatgatgatgcaaaaaagtattcaaaaatagttaaaagtattttgcccccatcgggttcggtacgattgctgataataaccgatcgtcagtatgactctatggaaattttgataggagaaaagtatgcagaggaaaactatcttgacaaaagagatatcattgaattataatatatttgtgtttgaattgtcaaaaccgcctacattctacaagatgtagtggttttggctctctgatgaatattgataaacttatacacggttataagattgtaaacccgcagccgtgttttggctctctgatgaatattgataaacttataccgattttcgatattgacgtgaaggcgcaaagttttggctctctgatgaatattgataaacttatacagcaaggttaggttttagcgtcgtaactttgttttggctctctgatgaatattgataaacttatactgtcggcttacgctcatcctacaacctctggttttggctctctgatgaatattgataaacttatacacgacattgtatatttgcatcacgaatcgagttttggctctctgatgaatattgataaacttatacctcttggtggcatttgtgtaagcaaccgaagttttggctctctgatgaatattgataaacttataccgccccaagcggcaagctgttttgtgtctggttttggctctctgatgaatattgataaacttatacacctttggtaaccgtggcagcacttacggagttttggctctctgatgaatattgataaacttatacagagccttgaaaatcagcttgcgaactttagttttggctctctgatgaatattaaattaaaagaaacagcttgtggaattctgttctgcaagttgcttttttatatccaaaggggagatagagggacggcgttctttggtataatatagtggacagtttggaacatcgggcaaaaataaaattttttttgcaaattgcaatagcaagttaaaacagttttttgtggatgaaattgcaaccacaggcacaaagcatatgcacattttcatttactcaaaatcgccgattcgcctttcaacattgaagaacagattccctgttgcgcatattgacaaggctaacggcagtgtaacggaaaatcgtgactatctccgcaaggagggcaagtggcagggttctgataaggaacagacgaatcttattgatacctttgaagaggttagtgatgttccaaagcctgttgatgaaaattctcacgatatgtccgctctgattgaagaaatcgaaaacggacttgatacctacgaaattatcaagctccatccaaaatatgcctttaggataaaagagattgacacactcaggcaaacagtgcttcaacttttatgctcatgttgataaaacaagcaaactgaacatttcacgcactcttgatacaaagctgaaaattgatttgtaattccgtgaataaattttcatttttcggaaaatttactgtatttttagaacgaattttgcggtaaaaaaggtgcgaaaatcctgatgattacagatatcttgtgccgttaattttcaagtcgaaaatcacaatttttagaaaatttttagaaaatccgaaaaaagttgccgacagagaaaatttctgcaaaaagaaaaagtctcaaaaacggcttatctaagccatttttgagacatcataccttggcaggggcagaaggacttgaaccctcggcacgcggttttggagaccgctgctctaccaactgagctatacccctatattaatttaaaccgatgaaattatgaaggtcggttttgcaaacttactcataaatttcaacgcaagatagattatatcaccgttcagtcgatttgtcaacacatttttgtgaaatttgacattttgagccgagcggtgatttattctgcaaaataatttgtttgactattcgccgaaattttttcctgtaataaggtagtcaattgaaacattgaaataatcggacagttttacgagcatttcgaggtttgggcaacgcagaccgttttcgtaataagagatagcctcacggcttatgctcaaatccatagcgactttaagctggctgtatccctttttctttcttatggcatgaagtccgaccattttcatcaaaatatcaatccctgtttgcatttggttattgacactattgtaacaatctgttacaatatttatgtaacagattgttacgtaatttcaatagcgaggagagattttttatgtattgtgaaaagtgcggtaagttaaacaacgattctgcgcagtattgtgtttcgtgcggaaatcctttaaattttggtgaatcaactcaaccaaacggagcaaataatgccgaacctgtaagcaacggcggaaatgtatatcaatttaatcaaaatgcaaatactacaagcaacgctccgaatattaagatgtcttttgataagaaaaaagttatcggaattgtgactgttgtgcttgcgtgtctgtgtcttatacttccgttttgcacttgggcagatgtaccgttggcggacaatttgtattcgtatttcggtggaagcggaagtatttcaagttattccctgttttcatatgtatttacaagcgtaggaagcacaggcagtagcttttcaatattcttgttaattactttgattttggtaattgcgggaatggcattgaatctcgcatacattattaagtttttaaccaaaaagaagggtgagggattttatcttgcaggtgcaattatgctgctggtaggaacactcatttttgcactttttatcggtcttacctcggctgtttctttcggcacaatccatatgacggctataggttggtttatggtcattgtttcaattgcaaacatagttctcagcgttgtaagaaagaaaatttagtttgtgagaggggcggttaatatgaggagtaaaaaacagattataaaaattatgataagcaccctactgcttttaagctgtatgattttatttgtcggttgcggtaacagcaaaccgcagtcggcggcgaacaattcaacagatacaccacagaatgataatgccgacagtaatgcgaatggcagtgacaacgagccggctcagaatacatcaaaattcacacttaaacaggttgaatttaatgcaaaagggcatttcgaatttgtaggtgactccgattacggaagatttagatataatgataaatacggtataattgatattgacggaaatattgttatagaaccgatttatgaagatatgtcgttcccatccgaaaatctcgttgttgctgaaaaatctgacggaaattttgtaattctcgatataacatcgggaaaggaagtcggaagtgttgagggtagtgaagacattcctgctaatcaaatttataaaataagcaatccctcgatattgtatggtgatgacggtgatgattatataggtttttctgatggttatattttcatgagagtaacctcgtgggcaaatgatcgtctggaagaaaattacaattctatatgtatggataaaacaggaaaagaaaagtttgccacaaaatataatataacaagtaattacaattctggtattgcgattggttattattctgataatttcatgcagcccaaaactttggcaggtcttgataaagacggaaaagaactttggacggttgaaaatgtaaatgagtacgaaagtcaaagtgacggtgtaataatctatcaggatagggattcttcgttatacggtgcagttgacctcaaaggcaataatgtgttagaatgtgaatatgaaaaattgacccgtgcaggcaacggattgattggatttaaaaaatacggcttgtggggatatcttgattacaaaggtaatgaagtaataaaaccgcaattcagtaatgcacagaaatttagcggcggtattgcacttgttgaaaaagacagtaagcagtatataataaatacaaagggcgaaaccgtaattgataatgtcggtgaaggggcaagctattacggtaacggtttagtaattctcaactatgtatccgtatatgattttgaaggcaatcctgtttcattaaatgatcaatcggttgactcaaatgacagagtaagtaacgcactcaattataatggtggtaaaatactcaaagagggtgcaaccggcagtcagaaattttatcaggttatcaaatctgaataaacgaaaggttttgaaaatgaaatgagaattaaactaatgtctgctttggcgattattgtctgtgttttgatgattgcaacggctttttacggttgcagtgatgaagatacggcgacagcagatacagctacaaaaatttcaactcctgacactcccgacactgtgcagacaacggtggctgttgcaacagttgaatcaacaacaaaatctcatgatgaatacggaattgattatcctgaatatgctgtgaatctggcaaaaatgagtttgccggaagtaatagagttgatgggcggagattttgaggttaaatttgcaagtcctgaggataacattatctatgctccaaattgcagggtgtatatttgcaacgaagctaatatcccgggtgaatggtttttctttgaagaagcatcggataaacttatcggcggagaatacggaagcaatcgagatgaagcattgctgaaaatcaaggatgatattcttgacggagtttataccgactttgattacataaatgttcgtgaatttggttctgttgagagaagcgtttatgcaggaatgaagtataacgattttatgaagtttgccaaaaatccaaaccctgtaactgtaggcggtgttggcggaatcggtcaatatgtgtatgactatacggacggtattgattttgtgttggctttttatgacggctacggaattgagcctgacagtgacggcacagtttctgcttctgttatggaatcagaaaatccgcctgttacgcaatttatagttaaagcaaaaaagtaaaatcaaaaacaaaagcgaaagtcgaatacacggctttcgcttttttgtgatgcttatttaattgaattacattaaaatcagacaaatcaagctaattaaaatcactcagtttctctgatttcctgcggattttcggggaagccttcaatttggaaacggagtccgcaggtggggcattcaaggtacggcttgccgttgttgaggttgtcctgaataatcatcatttcgctttcgcagaatgggcagagtttattattttcgctgttcatatttttacctccgagtggattgttttcgatataacttaattatacctttaagcggtaaaatgtcaaccgagatattaaaaatgtataggcaagagggttggatttttacggcttttgtgcaaattccgctttacaaattgacgaaaaaagactaaactatatctatgcttctgcgttgcagaatatacaatctcattcaaggtgattattatgaaaaaagaaaatatggctatgctgtgtgacttctacgaatttacaatgtcaaacggctattttaaaaacggtttttataaaaagaatgtctattttgatgtgttcttccgcaaagttcccgacaacggcggttttgcgattatggcaggtcttgaacaggctattgagtacatcagggaacttcattttgaagacgaggatatcgaatatctcaagagcaagggcatttttgacgagcagtttcttgagtatttgagaaatttcaaattcagcggtgatgtttatgcaattcccgagggaactccgattttcccaaacgagcctgttatgacaatcaaagcgcctgcaattgaagctcagcttgttgaaacattccttctcctcacaatcaatcatcagactctcattgcgacaaaggctaacagaattgtccgtgccgctcagggcagagccgtacttgaattcggttcacgccgtgctcagggtgcaaatgccgcagttgacggtgcaagagctgcatatatcggtggctgcaagggtacagcctgcacacttacagacgagctttacggtgttcccgccggcggtacaatggcacattcatgggttcagatgttcaacagcgagtatgacgcttttaaaacctactgcgagatgtatcccgataatcctactctccttgttgatacatacaacacattaaagagcggtgtcccgaatgccattaaggtgttcaaggaggttcttcttccgcagggtaagaccaagtgtgcaatccgacttgactcgggcgatatttcgtatctttcaaagaaagcaagaaaaatgcttgatgacgcaggtcttactgaatgtacaattactgcgtcaaatgctcttgacgagtaccttattcgtgaccttatgatgcagggcgctcaggttgacacattcggtgtcggtgaaagactcatcacttcatcaagttcgcctgtattcggcggtgtttataagcttgttgccgttgaaaatgatggcggtgaaattgttccgaaaatcaaggtcagcgaaaatacaaccaagattacaaatccgcacttcaaaaaggtttaccgctactttgacaaggacagcggcaaggctattgccgatgagctttgcatttatgatgaggttgttgacgattcaaaaccgagaacaattttcgatccgaatgcagtttggaaaacaaaaatgcttgataactacaccgcaaaggaacttcttgtgccaatcttcaagaacggcaagtgcgtgtatgagtcaccgtcaattgaggaaatcgcaacctattgccgtgagcagattgaccttctctgggacgaggttaagcgttttgaaaatccgcataactattatgttgacctctcaaagaaactctatgacatcaaggctcttttgctcaatatctatgaaaagtgatttttgattgatttttaattataaatctgaaaattgaaaagtaaaatttacggtcgggtagttcgtctatccgactgtttttatatgtatggatattgcttgccgttacaattttgcaattgcttaaaaaattgtcttatttggataattctgtgaacgaaatataattttatttccaattattttggggcaaaaataaacggcggtttttgaccgcccgacacactatatttaatttaacttatatacccttattaccaaccgatttattattgcaaatcaattctttaatcaaatttcgttctaaaataaaaaaggcggatactctccgcttacatcttactatatattacgcagtatcacgcatctgccattgttttaattctttcatcaattcggattttgttttcgtaggtcagttgtctgaaatgttcaatcaaatcggcttcgttcggtgtaatttgtgagttgctgtatggatttttgatatctgacatgccgataaggtagtcaaccgtaacgctgaaaatttccgccaaatttttgagcgtgtcaatagacggctgtgtaatgcccttttcatattttgaaatcgcactcgcctttaaattcagcttttcagcaagctcagtctgtgacatatcgttgtcaacacgcaattcttttaatctgactgaaaactccataataacacctttgcctgtaatttagtttctttgatttattataccatttgtttcataaataataaaaataatagccaaatcagattaaaatatgttgacaattgcaaattaggaatatataattatcttaataagataattattttattaaaaattcttgttaggaggaaagaaaatgaaaaaattattatgtgcagtcctttcgggtataatggcattttcaacttttgcggttgccgtgccgattacagcctcagccgccgaatcacaggaaagcgtaagtgcaacctacggcgattttgaatatacccttgcagatgattatacatgcacgattacaaagtacaatggtcatgcgactaatgttactatcccgtcaacgatttatggcaataaggtttgtaaaattggaaatgactcattttgtgataacaacaatattataagtgtaacaattcccaatactgtaaaggaaattggtggttctgcttttgcagattgctattcgttaagtactgtaacattttcaaatagtttaaagtcaataggcggcggagcatttgaaaaaactaatttgaaaaaagtaacaataccaaattctgttacagagattgatgattatgccttttcagggtgtgaaaatctatcgagtttgacactctcaaacaaattagaaagtataggctatgctacctttagatattgtaaaagcttaacgagcattactttgccaaatagtttgaaatatttggactggtatttgtttagtggttgtacttctttaaaaacagtttcaatcggaagtagtttgcaagagtgttataatcaaggtagttatggatttatatttgaggattgtacagctctcgaaagcattacagtaagttcctcaaataacaactacagtagtgctaatggcattatgtatgataaaaagaaaaccgaaattttagtatatccacaagcaaaaaaagatacaacatatactgtgccaagtacaattaatactctttatggagtaagcaccaataacaacccctatttaaaaacaattaccattccggcaagtgtcacagacattagagatcatgccgttggatatattgaggacggttgggattataacaaagtaagcggtcttacaatcaaaggttacaagggtacagccgcagaaagatatgcacgaaataatgattttaattttgtgcaattgcagattgttccaacctcggttgcccttaacaagacaactttaacacttgataccggaaaaacctcaaatctcaaagcaacagtatacccatcaaatgcgtcaaataaaaaatgcacttggagaagttctaacacaagtgttgcgactgttgacggcaacggtaaagtaaccgccaaagcgtcaggtacggcaacaatcacggtaaaaacttcaaacggcaaaaccgcaacttgcaaagttaccgtaaatcttcccgctccgcagattacaggtctttcaaacataacaggcggtatcaaaatttcgtggaacaaggttgacggcgcttacggctacagactttattacaagcctgcgtcgggtggttggaaacgctttaaagacacaacagccacatcgttcaccgattcgggagtagtaccgaataaaaccgaaacatatacaatccgttgtattgataagaacggcaaaaccgtcagtggctttaactcaaagggttggtcgaagaaatacactcctgttgct

SEQ ID NO: 715 - DNA, 21905 bp, synthetic construct
  misc_feature 1..21905: note = Synthetic
  source 1..21905: mol_type = other DNA
ggtttatgttgtaatgatgggacttggcttgaactcagatctttgtatgattggctactcgcttattcttgctatgaactacctcccgggtatggctgttatcacacttaatgttatcggtgacgccgctaccaatgttatagtttgtgcaaaagaacattgcctcaacaaagaaatctataacagcaaaacccctaaaaacaactgatttcagtaagataactccaggaaaccccttgtaaaaccgaaccgccctcgacagcgcatgcactgccgagggcggcttagttttactgtgagccaccgttctcagttcgtgaagatagtatggtataaaaaatgacatattatgcccgagcctaacattgcaaccgttcgcacaattccgtatgggcggatatcatccgcccgtaggtaattgcagaaaatttatgatgaaaataaactgtataaatgggatacatttacctaaataatgtagcagtcagttacaattaaacttcattatttatcagccaaaaattccttgccggctttatcggttgcaagaattgcattgatgaatgcgtcctcagtcggattacccgggacatacttccactcaacaacgcttgcggctttgtgagcaattgcaggcacatcatccggagtaagtgcaatttcgccgagagtgcaaggaagtccgatactgtggttaaattcaaaaattctgtttcgctcctcaaattgtccgtcatatgtcagcagacacagcacaccgaatgaaacaatttcgccgtgcagatgttgccgttcacattgcggaaagagtgacgcaccgtaataaacacaatgtgcgagcgatgaattgtagtaataatcctcctcgggattcggattgttttcgtgtacggtaaaatttgaaacaagtcccgccgtgataataatgtcaagcgcaacctgctcaatcgcctctgtcggcacattgtttttgcagtcctcaagagcttttttgccaaagcttatgagcggttcggtacttgcggaggcaattgccttgccaagcaacggtgtgtgaatcatattcttttcacgacacgcaaaaattacttcatattcctttgaaagtgcgtcaccgattcctgcccacataagcttttcgggtgattcggcaataatttttgtgttgatgaatgtgtgaattgcaggggctttgtggtacgaatattccttgaaagtaccgtcgggattgtacattaccgaaagcgaggtgcatgacgcacagtttgatgcaattgtcgggaatgtgaacaacggtttgttatataaagcacaataggtttttgccgtgtcaacagctcgtccgcctccaataccgaacaccatatcagccttttgcacagacggattgttctttattttttcaacattttcatagctggagtcaccgccgtaccatacaaaatcaatgatttcaatgtcagagcctttgatgccttcaagcaaagccttttttgatttttccatagctgttttaccgccgactgcaaccgcctttttgccgtacggctttacaatttcgggaatcgccttgtagcaatcaactcccacgctgtaactcggtaaaaattcgctgtatgtgtgtgacataatttatccctccgaaaacaatacttataaataaattatatcaccgcagtttgtgcatttcaatacattagcacaataaattgttaaaattattattgcctgacagatgaaaatatgcacacatcttatgcaatttagcaaaaaattgcgaagaatattcgtgaaaaatacttatggaaatggcttttgcaaagtgctataatcttgtaaatatatataagaagggcggtgcttttatgcaggaaatatacggacagaaaacagacagacagcttgcagcaaagcagagaataattgcggttgcggcaggcagggaaaaggcagaccttgttttaaaaaacgcaaagtatcttaatgtgttttcaaatgaatttttgtgcggtgacatagccgttgcaaacggactgattgccggcgtcggaaaatatgacggtaaaacagagattgatgtcagcggaaaactcgttctcccgggctttatcgacgcacatattcaccttgaaagttcaatggtgactcctgctgaatttgcaaaggcagttgttgcccacggtacaaccacagtcataaccgaccctcacgaaatcacaaatgtaatgggcattgacggagttgaatatatgattcaggcatcgcaaaatttgccgattgatgttcattttatgatgccgtcatgtgtgcctgccacagaaattgacgagagcggtgcggagcttgactgcaaggatattgacttgtacttggataataaaaaggtactcggacttgcagagatgatgaactatgtcggtgttatcaacggcgataaaaatgtgctttcaaaaattgtcacctcgcaggctcatcacaagaaaattgacggtcacgctcctgagctttcgggcaatgacctcaacgcatacattgccgcaggtgtctattccgaccacgagtgttccacctttgaaaatgcccttgaaaagctgagaaaaggtcagtttattatgatacgagagggtactgccgctcataatctcaaggcgcttatgccgcttttgactcagcagtattactcaaggtgtatgtttgcaacagatgataagcatccaagcgatttgctctatggcggtcatattgactacattgtaaaacaggcgctgaaaaacggtgcagatccgattgttgctctcaaaacagcaacccaccatgccgcaagatactttttgctcaataacaaaggtgcgattgcttcgggttatcttgccgatattgttgttgccgataatcttgaagatttcaatgttgaaactgttttcaagtgtggcaagcttgtttttgacggcgaagttaaggacttttctgctcccacagtagatgaaaagcttgccaaaaaatgctttgacactttccaccttgacagcgtaacgccgagcagtttcaaggttgacggaaaactcggacttatcggtcttgtcggcggtgaattgctcacacgcaatctcggtacagcagataaaattgatgtggaaaacgatattctgaaaattgcctgcattgagcgtcacaaaggcacaaaccatatcggtgtcggctatgttaaaggctattcgctgaaatcgggtgcagtcgcaacctcggttgcccacgattcgcacaacattatcacagtcggctgtaatgatgatgatattgccgttgccgtgaacgcaatcaaggacagcaagggcggtatcgcagttgttgaaaacggcaaaatcaaggctctgctcgaactcccgattgcaggcttgatgtccgatgaaccgctgacaaccgtaaacgaaaagcttgaaaatgcaaagttatctgcatatgaactcggtgcggataaaagcattgatccgtttatgactctctcgtttctaagtctgcccgttattccaagcttgagaataaccaccaaaggtgtgtttgatgcagaaaattggaaaatgctctgatgtgcggaagcttttaataatacaataaaatattaaataattaaacaggaaaacaaaatgcgtattgtcactttgttttcctgttttattttgtaaaagggttatagtcattttacagtcactttgcatttgtataatttgaatataaaagaaattggttgattaaaacaaatagcaaataaattaagaaatcggcatattcattgtaattgttcaaatcaaaaaatgtgtttagtaaaaattgaggtgaaaaatatgtcatattatattacccgaatatttaataacaaacttaaattaggagttatactttttatttttgtagctccgattttagatgtattgaaggctcttatagatgtgagcaaaggagcgactgttccttttccgccattggctgctttcttgtggtcttgtatgacgacaggacttcaaggcgtgttgacagggtatttaccgttgttcttggcaattattgttgcggatgattgcattgaagattacagaataggatacaaaaatattcttgtcaccaaaagaggcaagaataagtattttgcattaaatatgcttaaaagttttactgtttcatttttgatacttgtaatccctcttttgcttaatcttcttatggtgcatatcgtttttgcaggaggtacatatttatttatagatccggaatctataaaggtaataccaagtatggctgagcagttaagtcacccgatgttttataatctgctttgtattttcctattttcatttgttggtgcttttttgggaagcggtgcaacggcacttgcaatggcatttcctaacagatttatcctttatccgttagatttcatattgtggtatataccgtgtattatggaatcgtcggtcagaggtgcttttcaaccatttaccgaatatcccctgtcaaaatatttccccggagttattttagtgttagccataaatgtgattgctgttctgttttcgttctttaaggtgactaagtatgatcaggtgtaaattaaaaaagtatgcaatcgtacttccgctttgtgcagtgttttttactctgctatgcacatacacatatttacgattttataattattttaattcggattatgctgagaagttaagcccaaaaggtgttttttacagagttgcaggtaacggagattttactgcatcaggtaatgttgtttgcattttcatagtagtgtttgttctgcttttgttttacatatttaccgatgagaatgtaagctacattgtaagactgaaatcgagagcctcttttgtgacaggaagaattgctgattgtgcggtatttgcttttctgttttcgttttttatagaagcagtcagcgtagttgcggcactcatctgctttgacactaacctgattttagaatcgaattttttgcaatattcggcacttgaacttttgactttgtttttgttttatttcagagcaggactcgttatgctctcattcggaataatcatttctccgaaagttgctccaattatcaccatatctctgatttttacagagttttttgcagatgtagcttttatgataagcagggtgtggcttccgttcagagatgccatagtgttgtcaagacttatgaacggtgaaatggttctgtcggatatgtggggcattatattaagagcattgcttatgatgtttatgcttatcttctcttcctactttttgtatcagaaaaaggatgttttgagtaatgttaaaaagtaagcttgttttgtcgataatactaattgttgcgtgccttgctcaattgttcagttgtgtatttcaggggaactttcaaaatgcctttatgattggtttagccccaagcgatcacggccttgaaattacaaaatttatgctgcttttgctgcccctatgttttattctcttctttacaagcggctcaattgagaaccttaaacaaggctacggcaagatgttgattgtacgcaattattcaaaaacagtgctgattttaaagcgttgtcttaacaattttatagcattgatttgcattgttttgttccagttcataatcttttttgttgcaagagaaagtatgactcccgttgaaagcggaactcttaaatctttgattatgtactttctgacaattttttcgctgatagttattcagtctttgcttgaaatcagtattcctgcacacattgtgaacataggaattttcatctattgctttattgcgtactatttggttcagaattttgttgacgcaccgatttggaaaatgattctcttcccgagcttgatgttcggaatgcagaacggtgctgtgtcgggcgagagcatttactacggatacctgttattcatagttgcgttaaatgctttgtgcatttttattctgaatttgagatttaagaaaaccgatattttttgaggtgatattatggtagaaataaaaaattattgtaaaagtatcaaatcaagaccgattttaaataatgtaagttacaattttgagtacggcaaaatctacggactttacggacacaacggttcgggcaaaactatgcttttgagagcaattgcaggcttgcttgttcccgacagcggctctgttgtgattgacggaaaggttttgcacaaggatatgtcgttccctccgagcataggtatcgtgattgaaaatatgaacctgttgccccagtacaatgcttttgacaatctgaaaatcctcggcaaaatcaagaaaaccgccaccgatgaggacattaaaacagcgcttgagcgtgtgggattaaagtccgatttaaaggtgaaaaagttttcgcttggtatgaaacagaggctgaatattgctcaggctgtgtttgaaaagcagaaaatcatcctgcttgatgaaccgacaaatgcacttgataatgacggtgtacagcttatttacaagcttcttaaagaagaaaaagaaagaggtgcgctcgtggttatcacaactcatcacaaagaggatttggaagaagtttgtgatgttgttttggaaatgacagaaggtgagctgcatgaaaagtaaactgtttactcataaatttttcgttgttctttgcatctcggttgccgctttgctcggattgtctttccttgccagggcgacaattgtaaataacagatttgaacaaatggctgttgatgaaaaatatcgcctaaaggcttcagctgacggtcagtttgtaattcaatttcaagacgatgaaaacggaaatttttatgccactgtcggcttgtttcagggcggatattacggcttggacgatgcgtatattccgacttcatacgatgaaaatacaaaaataaccgctatcgaaaatgaggctttcagcggctttgattgtctgaaaaaagttgttatccccaacggcatttgtgaaatcaaggatgacgcatttaaggattcaaaaaatataacggaaatttatattgcgccctccgtaaataagattgcaaaaaccgcttttgacggcattgacaaccttacgatatatgccgaaaagggttcttatgctgaaaaatttgcggttgaaaataaaatcaattataaaaactatacgaccgagcctgaaaatccggaggctaaaaataccgattattcaaaaatcagaaacggtgcgtattacggcgaatattataattatgatgttatctatgatgacggcaagcccgtgtgtgtaataactaactataacccaatgtcgacagaggaaaagcttgaaattcctgcacatattgacggcttggatgtgatttcaattgcagatgacgcaataaattacggcggtgcaaaggaaacagtcgttcccgacacagtaagattcattgccgataatgcgttcaaagaatcctactcccttgaggatatctacctgaccaaaaatgtgtcctacataggaaaatctgccttcaaagattcaaaagacctaacaatccacgccccgacagattcatatgcacacacctttgcgaccgaaaataaaataaatttcaaagctacagacgattaaatctgataagcaatgaataaatctttaaatttacagccctgtacccatttgcagggctgttttttgcaatcaaatggtagataatgggacagtgacctttggtataatgttgataacaggttgaaagaattataaatttaaaaatgcaggaggattttatcatgccaaaacagaaagcatatgtgcgtatcaacagttctgaaagatgttggtatgagattgttgagttcgaggtttcggatgatttgtatgcaaaaataaatgaggcagttgagaacaatattccgttggcggattgcgattttgccgatgaattgtacgagcttgcagtcaatttttcttgagtatgacaatgaaaaatacgaaacttatcgtgttgacattacattcaaagaaaacggcataattacagacataatcgttgatgcaatgggtttacagtatcatgatttccgttctgataactatgccgaatgttatccgaattacgaatatatcgaagacgccttgcaggatgcggtggaaatgtaatcattttatgctgtattcaaaattatcccaaaaaaatcacagaaaaaatacacccctaaaacaacaaaagctgaggataattttcatatcctcagcttttttgctttaatcggtccatagtactgacaatgggacaatgctttgtgttataataaatttactataaattgctgaatatgttgtaataaaatgtgatatatgataaaataagagacgagaagacaataaaaaagacaaccctaaggttgtctttaatatatggtgcgaaggggtttccactaccctacggcatattgccttatcttagaactctgatgaatattgataaacttataaaaaatggtttattgtgtttgttttgatgaatattgataaacctatacatcaaatttctaagttctaatttaattataatattgaaaaatatatttgtcaatagaaaggtgagaattatgaaatatataattggacttgatatcggaatcggttcagtgggctgggctgttgtaagaaatgacgatgattgcaaacgattggaggattttggtgtccgcatatttgaatccggagagatcattgaaagtaataaaaatatacgaaaaagtcaaagaagaagaaaatacagaggtatgcgaagaagaattaggagaaggaatcatcgaaaggaacgattgaagaactatcttgaaaatattgaatttgtaagtagggcggaactttccgagttctttgctaaaaacaatcatgatattatagatatacgggttcgtgccctcgatgagaaggtgactcctgttgaacttactgcggcattgctgcatatagcaaagcggcgcggatataaagctttttacgagttgagtgatgaaaataataacgcaaaagataaaaaagccaaagaagaagaaaaagatatctacaaggcattaacgaatactgcagatgttataaaaaatggtggttatcgcacaattgcagaagctataatgaaggattctgaacatttttctgataaaatttccggaagatacaagtatagaaatataaaagaaaaagatgaaaagggaaagaaagaatcaggtggcaaaataagtgaaaatgacatactgtttcctaccgaaatgtttgaagatgaggtaagaaaaattttaggcaaacagaaagaattctaccctcaacttacagatgaaagtatagataaaatatttgatataatattttcaaggcgagatttcgaagatggacccggaaatactgacgatgaaaacagaccatataagggctttgttgatttgataggcaattgcccctactataagaatgagaaaagaggacaccgttatacggtaataggagatttatttgctttggcaaacaaactttctcaatataaatatgttgagaaaaacacaggcgaagtagtaaaactacctcgggatttgatgagaaatatcgtgaatcagtccttacaaagcggtagcattacgaaaacaaaaatcaatgaactcgcaaaagaacttaacattgtaattcttaatactaagactgctaaaaatgaaaatattgcagattgtattaaatacctcaaagctgtgaagccaatttttgaatcatacggtttcgattgggataaattgatatcggaggaatatacagatcaaaattctttgcttaacagggtaggtgatacaatatctttcaatataactcccaaaagaagaattgatgctttaaacaaaattgatgaactataaggaaaagatgaactgataaaaaagctctctgaacaaaatttttcaggaacagcaaaagtttcagataaatatatgattgatgcaatcaatgccttttttgatggaacattagtaggtgaatttcaggcgaatgtacaacaagatgagttttcagtaagtataaaaacagaaaaattgttaaaattaaaaccttttgataataatagtgagtatgcacaaaatcctgtggtgtttagagctatcaatgaaacaagaaaagtggttaatgcaattgttcaaaaatatggcgcaccaaatgcaatgaatattgaaatcgcaagtgaactcaataagagttttgacactcgtcaaaaaatatccactcaacaaaataaaaatgaaaaggaacgaaaaaatgcaataaaacaaatatcattgattacaggtcttgatgaaagagaaattaggccacagtacattgaaagatatcttcttggagaactccagggttggagatgtatgtattcaaatgaagaaataacaaataagaaagaagcaatattgaataaaggaaaacaatatgaaatcgatcatattgtcccattttcgagaattcttgatgatacactaaacaataaagctcttgttcttgcaagagaaaatcagaaaaaaggagcaagaactccgttgatgtatctatctgctgaaaaggaaaaagagttcaaacagcgtgtcaataagttgtttaaaggcaataaaatcaccgagaaaaagtataggtattttatgcttgaatctcttgtaggcgaagatgctgaaaaaattctcggcgattggaaaacaagaaatcttaacgatacacgatatattgcaaaatttttggttaagtattttaatgataatctctactttgcaagggaaaagggtgacgataagagaccggtagtttatgcagtcaagggtgcaataacatcatctcttcgcagacagtggctcaacaaagaaacatggggaagatatgataaaggcgaactgaagaagataacatattttgatcatgcagttgacgcaatagtaatagcaaactgtttaccggcctatgttattatagctgccgaaaaccacaagcttagagatatatactattctgcaggtaaaattaaaacagaggagtatagaaaaagtcttgacaattgtgttgataccttaatgaaatattatggaatgtctcccgctgtttcaagaaaattacttgaaaaggttaaggaaacaccgtcattactgaagaatattcgttttgaagttgaataccgtgtccgtgattacgagttaatgaaatatttctttaactatgatactaaagtaggtgaagatactcttgatcaaatatttagaaatgatttgtacaaaatatatgatcaccaatttgcagactcaattgagatgccgattgtatcaattaagcctgaaagaaaatattcaggtcagatggttaaggacaactttttgaaaaagagagtcgcaaattcagaaaataaatatgttaaaactattgataaaaataacgatgcagtgttagataattcgtattattattgtgtcgaagtatacagaacgaggagtggtaatattgatttgcagggaattaagtatacagatttagttaataaaaataaaaaattatacttgaagccatgttataagtatcctgaaaattattataaatatataatgtatttgtttaaaggcgattatttaagaataaaaggtcctaagtctacaagacttggcttttataaggcggtaaataatataaatcaaaattcaataaaaatcacacgttataacagcaaatacacgagggcattccgagaagaatcaacaacaataagtgcagatgcagagatagaaaaaatatatgtagacattcttggaaaaaaaggaaaggtgttaacaaaacatggcgaaccgttatcgttgcttccggagaaaaattgaacataaaggacaactggcttatagtatcaagtgcagaaggcgaaagtagggttccggtttcagacatatattcacttgtaatagaaaatcgtgcagcaatgcttagcgtaagtgtgttgaccacacttacgcaggcaggtgcacatataatactttgcgatgaaaaacatcttcaggtgtctgcaacattaccaattaacactcattacagaccatttaatgtaataaagaagcaaattgatatgacatatgaatttaaaaatttattgtggcagaaaattattgaaagaaaaatacacaaccggtatttatgcttgaaataccgtgaaattaacaaagaaaaatgtgatgaaattgatgcgttatccaaaagcgtgaagcccggggatacaacaaaccgagaggcggttgcggcacgaaaatattttgttgcatttgaaaattgtgatacactttttgaaacacttacacatagcaatcgcaagagcttgattgatttgccaaaccaaattattttgcaatcagataaaagaaagcaatattcgcaatttagaaaaaatctgattaaatcaggttttatcatggtgcgattttctgtatatgcgagaactgtcagaaataatgatgatgcaaaaaagtattcaaaaatagttaaaagtattttgcccccatcgggttcggtacgattgctgataataaccgatcgtcagtatgactctatggaaattttgataggagaaaagtatgcagaggaaaactatcttgacaaaagagatatcattgaattataatatatttgtgtttgaattgtcaaaaccgcctacattctacaagatgtagtggttttggctctctgatgaatattgataaacttatacagcaaggttaggttttagcgtcgtaactttgttttggctctctgatgaatattgataaacttatactgtcggcttacgctcatcctacaacctctggttttggctctctgatgaatattgataaacttatacacgacattgtatatttgcatcacgaatcgagttttggctctctgatgaatattgataaacttatacctcttggtggcatttgtgtaagcaaccgaagttttggctctctgatgaatattgataaacttataccgccccaagcggcaagctgttttgtgtctggttttggctctctgatgaatattgataaacttatacacctttggtaaccgtggcagcacttacggagttttggctctctgatgaatattgataaacttatacagagccttgaaaatcagcttgcgaactttagttttggctctctgatgaatattaaattaaaagaaacagcttgtggaattctgttctgcaagttgcttttttatatccaaaggggagatagagggacggcgttctttggtataatatagtggacagtttggaacatcgggcaaaaataaaattttttttgcaaattgcaatagcaagttaaaacagttttttgtggatgaaattgcaaccacaggcacaaagcatatgcacattttcatttactcaaaatcgccgattcgcctttcaacattgaagaacagattccctgttgcgcatattgacaaggctaacggcagtgtaacggaaaatcgtgactatctccgcaaggagggcaagtggcagggttctgataaggaacagacgaatcttattgatacctttgaagaggttagtgatgttccaaagcctgttgatgaaaattctcacgatatgtccgctctgattgaagaaatcgaaaacggacttgatacctacgaaattatcaagctccatccaaaatatgcctttaggataaaagagattgacacactcaggcaaacagtgcttcaacttttatgctcatgttgataaaacaagcaaactgaacatttcacgcactcttgatacaaagctgaaaattgatttgtaattccgtgaataaattttcatttttcggaagatttactgtatttttagaacggattttgcggtaaaaaaggtgcgaaaatcctgatgattacagatatcttgtgccgttaattttcaagtcgaaaatcacaatttttagaaaatttttagaaaatccgaaaaaagttgccgacagagaaaatttctgcaaaaagaaaaagtcccaaaaacggcttatctaagccatttttgagacatcataccttggcaggggcagaaggacttgacccctcggcacgcggttttggagcgactgttgaaagctcaaaactgcatagacaagccactatttaagccaaattcatagcatcaaaattacattttcgtggttttgatgcttttttgatgctattggtatttttaagcttacaatataatagctgatgacttttttattctatagaaatttcaaatgctgacggtatgctaaaataacatcctttattgcagtgtatggtaacatgctaaaatcaatctgtcaatcaattcataactcaaattttgcgccgctgtaaacaaagaatacaaagcggaaacagattcgttttattttttcagtatattaaactatatgtttttgctgatttttatatattctcgcagatatttgaatgggaaaggtacaacggtatattgaccgttgcgtacaaattcaacggagagaagtggtagcaggtccttgaattccattttcttttctgatattattttacgaataatacaagctctgctgacaccggatcttctaagcgatttttctcctgcataatagtacacttcttcaccctcttcaagaacaaaatcctttttaaaacagcatatatttacgatattactcataaggtattcgtcattttttagactttggattctcggatgcatccacacaccatatttatcgcgcatatactgatttagatcaatagcatactttttttgcatattcataaatctgcgaatttcatactttgtaagaacaggttgctgctctcttataattgctataagattgtttgtttcatcagcgtactgtggatattctgatgaaaatgcattaatcatattaattagattttcttttcgtactgctgtgtttgggttggtttctttaagtgccatgttgagtttgtaaatgtcaggaatggtaaattcgcaggtcctcacaattgcgtgtatattattaatatcagaaaacacaagaccttcaacactgttacataccctgctgttttctttgttgtattctgaatacataagcattattcgttctttatcagtactttctgtgggttcaatatcattaaaggtttcaaaattcaaatcacctgttggtgttactgtcatcatattgtattcaaagtgagaatcagggtatgtatatccttctatcttttctcttgttacaaacgaccaggttttgtctgtctttagttgtgtccaatcataaatagagagtttacgactataaatatcccctttaattattaattcctggactaccttttttaccatgttttttaatttttcctcgctatggttttcaactataatatgttgaacaatcagaccgttgttatcatctttgtgtgggtccggtaacttattattttcatagtattcctcaccatagataatacggatattgtaaccgctttctgaggttgtatctatcagagggtgtatattgtaatcactttcaagaatgcgaacaatgctgtcaagcattgattcggactgtttgtccttgcagtagtcggatatggtaacgtctttttcactaagcatttttccgaattcttttacgctgatttcagtctttttgctttttttaatttccgttttatcagcagcatcgtatgagtcatattcaagtgttaagtaatcagacagttttagctttacatcttcaagaaacttattcattatacccagtttgcttctggaaaatttttctgggttttcataacataaaaattctaccgtattgtgggaatttttatatgaacccggcgcaaaggtgtccttcaggtcaactttgtcacttttcagtttttttctgaaagctcctgtttcggcgtctattatgtagaaactgccctgttttgaataactgtttttcctgaatgtcttgacatcaagggttaagtacattcccggcttaagtgaaatctggaggaatcggaacatatatatttctttagttgatttgtctcttatcggggatgtgctgtcgccatagtataacttacctgtaagattattataggagaacaactcgcctttaggagttttcatagaatttataagcagttgcgcaagaagtctgtcattgtaatagaaaaccctgtttctttcagccttatccagcacattgattttttctacggcaacatttggatactgctcttttatctttctgctaaaattgagattatattctttgcctttttgaaaaagaacaagtgcttcttttccaaaagaatgttgtactgcaagtgctttgtattcagcggtaggaatatcaagaatatttgtattgtataaacctgttgtgcctttgacaaagtaaatgtcaaaatccctttctatattttcatagttgtattctgctcgaaacttgttggtaagtatcataaaaaatcttcactccttatcatattaatatttgtggttataggttttccgtcttggtcaatcaatcccggaatctctacaatttttccgtcacagcttatagtaggtttcgtattgttgtttcctacaaggttgattatatatgcccttttgcccttaatagtatcaagcttttgccgtattctttcagtagtgctttctctgtcctgcaggtaagtaggcttccagtttttgaagtcaacataaataccgtcattaagttcaaaatcaaagaactcaaatctatcagggtcattaattggctttaatttcattccccgttctctgcttagtataaactcgccgcagacttctcctaatgcacctttatagatgttgtggaaaagcacagggctcatcatatacatatttttttcaaaagttgttgcataacctaatttaatgaagtgttctctcatactgctatatttcatcgcgtatggaagataagagtttttctctcctgcctcataaataatagtttcgtttgttatacccttcatttttgctctgccactgttttgaaagtcaattttacttgtaccaaaatcaataattacatcatcaaaatcatagtactgagagtaaaggtatttgttgatttttttaccggcagtaatataaagcattttcaaattatagtcagcattatattggctttgatttgcagtaggaaaagtcaacaccagctctcttaattcatgccatatttgcatactcctttcgttccattttctgtaaagcaagcctttaatagtccacattccggttgaagatattttttctgcagtattaaggatgcgctgccgttcatccgaataatcacttccaagagtttctctcaaaacagcaatagcctccagctcaggcgacattattcttttccgtagttcaccgctatatatcttttcaagcagcttgtcctcaatgtaaatattaatgtttctgcttttcacaaatgtgcggcacattctgcctactgcctgaatgacttctcttgttgcctgcatacggatacttttaattttatatagttcattattttcataggtatgccctgtagagtaggaattaaaggctgttctaataagactattaagttgtgaacgcttgatttctccgttttcatacagactttctatttgtaccaacatacttatcagctggttaactgtaattttttcatctgtataaatattggtagtaagatttgtaatatttccaagatacagagcatcaatatcctttgtaaagtggcgtttatcctttggatttttacattcggcaagttcaatatagtttgttttgtctgtaactgcatattgcagattttgccctgcgccgattgtactgtaagaagaaattataagaattttttctccttgctccaatttattaatcagaacttttttatcctcttcaaaatttttgcttttaagcacaaacagtgtatctgttgcgttatagtttagtccgcaaaataaaattgccttttccattaatcctaaaagcagaatatagttcatagatgctttgttttcctcaggaagagccattccaaggtaaagcatggattttagtgttgtatttttaaggaaggataccatagcatacagaatattgcagtacctgattcggtaatatatttcttcgcactcattgtcaataatattaccgcataccattgcaaaatcattgtttccaaataattctctgcaaatatcttcacttctgctttcactgtactcagtactgataacttcggtgctaagactaattcctttgtccttgtatggttcataaagactgaacatctgttttttaactctgtctttcatatcttcaggtgtagaatgaaagtcgttctccagatagtttctgagataatcaagattgtagctgccgacaacagtaggtatttcagcggtagctgaaagtccgatgacagcattgtgctttgaaatatatcctataattttttcaggtgtatcatatagttttataaaacggagatttgtaaagtcaaagtgtgagtcgctatcttcaaattcaaagatttcaattcctttttggtagaaagaatcgtctggaatattgtgtttttctttctgacttattttctgctcacataattcgccaagcaggagtttgctttggttactgctaagctcaagctttttcataatagtagatatagcattttcaatagtcatagcatcagcaataaacggtctttccttgttgatgatgttcatatattcattagcccagtgaaaaagaaatcttctgaagtgaagtaaaaatctgttaatatctcttaaaaagctataaattacaatatcgtcttttttgcggttttcaaagaatgtttttttatcctcaaagaaaaccttaacaatgttttcctccttatcctttgttgcgcgaatatactttgcatttccatttagtatagagtggtaggtagcatccttgaacaggaaattttgttttctgtcaatatgattttcgtttacctttatactcagattagtgtgatatttattggcaatttcatccgcctcttttttcaactttgcaaaggtaattattttacctttactatagtcaattgagtcaatagcctttttaagattgtttgaaaaataatccgtgttaaaagttcttaatatctgcctgaaaacagaaatataatcttctcgaactgaaacagctctttcaatcagctcattttcaatagtggattttgtcgcatcaaattcatcaacaataatgattgaatcggtaaataaaggagattttataaattcataactaggttctactataacagaatttcgcttcataaatttgctgatactcataagaataatctttctttcatcagtaaatactgcaggataaagtgcacctatccacttgtaatttgcatcattctttattgcttttagcttgtcttttttatttgaaaacctctttttcagtgcatcggaaacaaagtgcctgaaatttctttctgccctgttaacattatcaactaacatctgttgatattgagtatcgtttatattgctgttttttatttttgtgtaatttcttattgctttttcaagttcataatattcagcggatataaattcttcaggaatatcaagaacagggattttatctacaacttcatcaaaatttgaacgtattcgcagtacctctttattgtataatttttcatcattatatgctatttttaaatcctcttccggaagatttttgttgagggttgtaaggtatattatttttcttgtgttattaggatttgcggcgtattctcgcatacaatttgtgattgtgtaagtttttccgtatcctgtgggaagttcacaaagaaaaaggccgtttacattgtcgtttaaaactgagtctatgtattgtttcgtagttatcacctcgttaagatttgtcactatatagtataacataataaaaaggataaataagggcatatagtaccccctatttatccttgacataaatctatattcttttttaaaagttcgatcatttttgatttcacattatcgggctgtaaaatctctacattaccaagaccaattatccatcctaaaaatatattagacggaacagcataaaaggaaacctgtaaatattctgtttgctcgtcatcacaaatttcaatgtttgtaccaaattggtcaagaaatgcacctaccaagtattcggggatttttacagtaatacattcttctttcccggaaaacatgccgattcttcgggatacatatgtatccggattgaattctgaaaactgttcctttcctcttatttcaaattccaactgttcaatatggtagagtttgtcaactctgtaaactctttctttaagaataccatcagtttccttggtgtcatatccataaagataatatctaccgtctgcccaaataagtgtaaacggatttaatgaatatgattttccatttctgtttttcaggaccttatccttagtccaatgacggtattcaaaggaaatctgctttttattatttattgcgtgcacaatattatttatgttgattagtattctcttgttttcactttttgcaatattgatacctaaaatactcctgtctaatgcttctgcatcatatatgctgacggtgcttctcaacttctttgatatactatccgcaatgccgtttggaataatattagaggcataaatagagtctaacaataattttatttcggcgttttgtaaaagacggtctccgataaagtaggtagcatttctacctctgcctgaaattatttctacgccaaaatcttcacgcagtaatttaatatctctttttacagagtcatgttcacattcaaatcctttgtcgtagagcttttgtaaaatctcctccatagataattgatgatcttcatcagtgtatttttccagtattctgtatagcattaatattctgctcttatttctgctcaaagtatcctccataatattttggtaagtatattctttatgtttagtatatcacctgaaaatagtgtgttcaaggaaaaaataacttttacaaaagaaagtgagttttttcttatggataaagtacatagatctgaattttcttttttatataaaaatagtattgctattattccagaattagaatataataaaaacagtaatattcgaggtgatagaatgcttgcttatatgactgctggtgaagccgcaaaaaaatggagtatatcccataggagagttataactttgtgtcaggaaaacagaattcccgatgtagctatgctcggaaatatgtggataataccaaaggacgctgtaaagcctgttgacggaagaacaataagatatgacaagaaaaatcctgcaaaaccctttgtgaaatgggcaggcggtaaaggacagctgttgcctacaatcagaaaattctatcctgccggaatgggaacaaccatacgcaaatattgtgagcctatggtcggagcaggagctgtgctgttcgatattctcaatacatatgaaatggacgaggtctatatatgcgacacgaatgccgagcttatgaacgcttacagaacagtaaaagaaaatgtaactcagttaatagaattgctgatgaagtacgaaaacgagcaccttaaaagaaatgacgagggcagaaaagaatactactatcagcagagagagcggttcaacgcagaaattcagaaaccggatgaaaacaattcgttgttgagggcagcattgtttatctacctgaacaagacctgtttcaacggtttgtatagagtca

SEQ ID NO: 716 - DNA, 17326 bp, synthetic construct
  misc_feature 1..17326: note = Synthetic
  source 1..17326: mol_type = other DNA
ccgtcaaggagagccgggggcggctttcctacctcacgccggacaggacaaagccaattaccgcccggaagctgggcgacgattttgaccgcgccgctgtctttgccgttttagagcaaaacgccgccagagcagccgaagcgccagccagatcccccgatcccccacgcaccataaaagaccgcttgcaggttgccagagccgagatagccgccccgaaacaggacggagtgcagcggcttgtggacattgagcagaaaatggccgagggcaaaggccggggctatgaacgctgggcgaagatacacaatctgaagcaggccgccaaaacgctgtccgtctaccagcaatacggctttacttccccggagcagttagaagccgccgttgacaccgcctatcagaaaatgcgccagaccagcggcgaactgaaagcactggaaacgaagctgcaagggaaaaagaagttgcagcggcaggtgttggcctacgcccagaccaaggccgcccgcgacgggctgcgggcacagaaatccgagaaagcccgcgccgcataccggcaggcccatgagagcgattttatcatagccgacgcagcagcccggtatttcaaggcgcatggcattaccaagctgcccgcccggaaagcgttgcaggccgagatcgagcagcttatctccgagaaagacggcctgtataacacctatcacgaacagaaacagcggttcaaggagttgcagaccgtcaagcggaacatcgaccagattttgcgccgggacgagccgcaccgcagaaaggagcagagccatgagcgataacctgccccacatggactaccgccagcaccggcgggcgcggcggctggtacatgagtgctgtaactacgatgaggggaactgcctgctattggacgacggggagccttgcgtgtgcgtccagagcatttccttttccctcatgtgccactggttccgtgtggctgtcctgccccttgacggggagctggccgcagccctcttgtgccggggaagccggaaacggtgtgccgtctgcggggcggcctttgtccccaaatccaaccggggaaaatactgccccgactgcgccgggcgcatgaagaaaatcaaagccgccgagagaaagcggaaacaaaggcagagatgtcacgctttagagcctttcaaacccgcataaatcaaggcttttttcgtgggtgtcaaagggtacgcgatacatttatccttttcccccggaaacggcgttttaatgcgtgacaatacgccaaaatcaacccgaacacagggaggtgatcctatcgctgattatatcagggcagacacgcggctgcccgcctatctgccgtatccccgtttcctgctgaaaatggagatttcacagaccgccaagctgctgtattcgctgctgttagaccgttccaccctctcccagaaaaacaagtggctggacgacgagggcaggatttatattatctatcccatcgcggagatagcagaaatactggataaaggcagcaccaccatcaagggggcgcttaatgaactggacacggcggggctgttggaacgggaacggggcggcttctccgcaccgaaccggctttatgtcaaagtaccgccagtgccacaggtacagttttcagaccaactgatggccggaagtccgcccctcatagagccggaaaaccgtcctactgatggtcagaaaaccgaccttatgatggtcggaaaaccgtcccctaaccaaactactataaacaaccttacagagagccaaacaaagggagtgagtggggggccgtccgcgccctatggccgatatggaaatatttttctgtcacagaccgaatacgacgagttgcaggcagagtaccctgacaggctggaacggttcatcgaggaaatgagccgctaccttgccgccaacgggaaaagctaccagaactatgccgccgccctgcggatatgggcggggaacgacaaaaaggaagcccctaaaaagggcataccagactactcatgcaaggagggcgagagtttatgaagaatgaaatcaacgcggttttggagaatatgacgaccaccatcccggagccggaggactacaccggcgaggacggtttactgtactgcggcaagtgccgcaagccgaaagaagcctattttgcgccggataaggccgctatcttcgggcgcgaccgccacccggcagagtgcgactgccagagaaccgcccgcgaggaacgggaagccgccgaaaagcggcgcagacaccttgacaccgtggaagaactgaaacgccggggctttaccgaccccaccatgcgggactggacttttgagaacgacaacggcagaaatccgcaggccgggattgtccgccggtatgtggaacactgggaggatatgcgagccgacaatatcggctgcctgttctggggcggcgtgggaaccgggaaaagctaccttgcgggctgtatcgcaaacgccctcatggagaaagaaatccccgtccacatgacgaactttgcccttatcctcaatgaccttgccgccagctttgaggggcgcaacgagtacatttcccgcctttgtcgttatccgctgctgatccttgacgacttcggcatggaacgcgggacggaatacgggctggaacaggtgttcaatgtgattgacagccgttaccgcagcggcaagccgctgatcgtcacgaccaacctcacgctggacgacctgcacaacccggaggacaccgcccattcccggatttatgaccgcctgctttccatgtgcgtcccggtacgctttaccggcgacaacttccggcaggaaaccgccaagcggaaaatggagagcatgaagaaactgattaccgactgaaaggagtattgcctatggcagataacaagcagcacgacacccgcaccacccgccgccctgactgtgtgacggaaatccgcatgggcaattccgtccttgtcgtgtccggctatttcaagaaagacaccacaaccacagccgccgacaaaatggcgcgggtactggaagcggaagccgctgctacacaggagccgacttatccggcgtgaaccggggcatggaaaagcggccatgccagggagcatgaccgctggaacgaaaatcggaagtgctttagcaattcttaatctcattctctataaaataatttgcaatttcaaaggcttttattcttctctttgccaatgtgatttgtgatttataacgctcggaattatcctttgattcaaatgtttttactgtttctcttagcttgtgcagagttgaatcaatttgccttttggccgcggttaattcatctattgtatacttcatgttttctcctttaacttctgatttttttgttaaatcagagtataccacggagttatgaacttttctactgcaaatatgggacgacaacccataccataaaaatcggaaaattgaaaagctgtaaagaagcaaatttaacgcttttgccgctgtacagcccccgccgttccgtggtacaatgaaaccacggaatagtggggctggctgtcggaaacggaggattttatgttaagacaagccacccaaaacctcattaccgccctttatccgagattgtcccatgaggacgaattgcaaggcgagagcaattccatatcgaaccagaaaaggattttggaaacctacgccaagcagaacggctttaccaatctgcgctggtacaccgacgacggcttctccggcgcaaactttcaaagacccggttttcaagccatgcttgcagacattgaagccgggaaagtgggtacggtcatcgtcaaggacatgagccggttagggcgaaactacttgcaggtagggttttacacggaaatgctgttccctcaaaagggtgtgcgttttatcgctgtcaacgataatgtggacagtgccagcgagggcatggacaacgattttaccccgctgcgaaatctgttcaatgaatggctggtgagagatacgagcaagaaaatcaaggcagtgaaaaagtcaaaaggcatgagcggcaagcctgttaccagcaagccggtttacggctatgtgatggacgaggacgagaattttattatagacgaggaagccgccccggtggtgcagcagatttaccagctttgccttgccgggaacggcccgaccaagattgcccgtatgctgacggagcagcaaatccccacgccggggacgctggaatatcagcggacaggcagcacccgccgttatcacccaggctatgagtgcaaatgggcgaccaacaccgtcgttcatatcctcgaaaaccgagagtacaccggatgtctggtgaacttcaaaacggaaaagccttcttataaggtcaagcacagcatagagaaccccgtcgagaagcaggccattttcgagaaccaccatgagccgatcatcgacaaggaaacatgggaacgggtgcaggagttacgcaaacagcgcaaacgcccgaaccgctacgatgaagtggggctgttctccgggattttgttctgcgccgactgcggccatgtgctgtatcagcagcggtatcagaacaaagaccgcaaacaggactgctacatctgcggcagctacaagaagcgcacccgcaactgtacggcgcactttatccgcaccgatctgttgaccgctggtgtcctggcaaatctccggcaagtgaccgaatacgcagccaagcatgagagccggtttgtgaaactacttgtccagcagaacgagatcggcggcaagagaaagaccgccgcagccaccaagcagcttgaacaggcgcaggaacgcatttctgaaatcagccgcattatcaagcggctgtatgaggacaatgtaaacggcaaaatcagcgatgagcgtttcatggaactgtcggctgactacgaagccgagcaagcggagctgaaaaagagagccgccgccctgcaagccgaactggacaagtcacaggcagctaccgtcaacgccgagaaatttatgggcattgtccgcaagcaccttgcctttgaagaactgacccccactctcttgcgggaaatgatcgagaaaattgtggtgcatgagtgcagctatgatgagaacggcacccgcaggcaggacattgagatttattacagctttgtcggcaagattgacttgcccgaataaccgcccgacctatccgacacaatggccaagtgtcggataggaacggcaaaattttttgcacttctattgcttctttatcacacataagcaaagaattgatgctttaaacaaaattgatgaactaaaaggaaaagatgaactgataaaaaagctctctaaacaaaatttttcaggaacagcaaaagtttcagataaatatatgattgatgcaatcaatgccttttttgatggaacattagtaggtgaatttcaggcgaatgtacaacaagatgagttttcagtaagtataaaaacagaaaaattgttaaaattaaaaccttttgataataatagtgagtatgcacaaaatcctgtggtgtttagagctatcaatgaaacaagaaaagtggttaatgcaattgttcaaaaatatggcgcaccaaatgcaatgaatattgaaatcgcaagtgaactcaataagagttttgacactcgtcaaaaaatatccactcaacaaaataaaaatgaaaaggaacgaaaaaatgcaataaaacaaatatcattgattacaggtcttgatgaaagagaaattaggccgcagtacattgaaagatatcttcttggagaactccagggttggagatgtatgtattcaaatgaagaaataacaaataagaaagaagcaatattgaataaaggaaaacaatatgaaatcgatcatattgtcccattttcgagaattcttgatgatacactaaacaataaagctcttgttcttgcaagagaaaatcagaaaaaaggagcaagaactccgttgatgtatctatctgctgaaaaggaaaaagagttcaaacagcgtgtcaataagttgtttaaaggcaataaaatcaccgagaaaaagtataggtattttatgcttgaatctcttgtaggcgaagatgctgaaaaaattctcggcgattggaaaacaagaaatcttaacgatacacgatatattgcaaaatttttggttaagtattttaatgataatctctactttgcaagggaaaagggtgacgataagagaccggtagtttatgcagtcaagggtgcaataacatcatctcttcgcagacagtggctcaacaaagaaacatggggaagatatgataaaggtgagctgaagaagataacatattttgatcatgcagttgacgcaatagtaatagcaaactgtttaccggcctatgttattatagctgccgaaaaccacaagcttagagatatatactattctgcaggtaaaattaaaacagaggagtatagaaaaagtcttgacaattgtgttgataccttaatgaaatattatggaatgtctcccgctgtttcaagaaaattacttgaaaaggttaaggaaacaccgtcattactgaagaatattcgttttgaagttgaataccgtgtccgtgattacgagttaatgaagtatttctttaactatgatactaaagtaggtgaagatactcttgatcaaatatttagaaatgatttgtacaaaatatatgatcaccaatttgcagactcaattgagatgccgattgtatcaattaagcctgaaagaaaatattcaggtcagatggttaaggatggtttcataaaaaagaaagatgcaatttcaggaaaaaacagtgtcaaaactattggtgagaataatagtacggtgttaaatgattcacgcttttattgtgtagatgtatatagaacttgtaatgatgaaacaaacctaaatttcattaaatataccgacttattaaaaagaaataatcatttgtatcttcgttcggattatagatatcctgatgattatgctatgcacgaaatgtacctttttcgtggcgactacatcgaaattacaaagaaaaatataattcgttgtggatactacttttcattaaaggacagttcaaaaaatgaactgtatatatcaaaaggaaatacgagacgaaaacttaacaatatgaaggaaaaagaggtgtgttcaataactaaaaaggatacagtaaagaaatttgaaatagacatacttggtaaaaagcttggggaggtaaagaaatatggcgaaccgttatcgttgcttccggagaaaaattgaacataaaggacaactggcttatagtatcaagtgcagaagtcgaaagtagggttccggtttcagacatatactcacttgtaatagaaaattgtgcagcaatgcttagcgtaagtgtgttgaccacacttacgcaggcaggtgcacatataatactttgcgatgaaaaacatcttccggtgtctgcagcattaccaattaacactcattacagaccatttgtaataaagaagcaaattgatatgacatatgaatttaaaaatttattgtggcagaaaattattgaaagaaaaatacacaaccggtatttatgcttgaaataccgtgaaattaacaaagaaaaatgtgatgaaattgatgcgttatccaaaagcgtgaagcccggggatacaacaaaccgagaggcggttgcggcacgaaaatattttgttgcatttgaaaattgtgatacactttttgaaacacttacatatagcaatcgcaagagcttgattgatttgccaaaccaaattattttgcaatcagagaaaagaaagcaatattcgcaatttagaaaaaatctgattaaatcaggttttatcatggtgcagttttctgtatatgcgagaactgtcagaaataatgatgatgcaaaaaagtattcaaaaatagttaaaagtattttacccccatcgggttcggtacgattgctgataataaccgatcgtcagtatgattctatggaaattttgataggagaaaagtatgcagaggaaaactatcttgacaaaagagatatcattgaattataatatacttgtgtttgaattgtcaaaaccgcctacattctacaagatgtagtggttttggctctctgatgaatattgataaacttatacccgtccttgtaacactaccctgttaagcatgttttggctctctgatgaatattggtaaacttataccaatacttgacaatgttgtcactcagtctagttttggctctctgatgaatattgataaacttatactcgtagctgtcagcgtatgtcggagctgatgttttggctctttgatgaatattgataaacttatacaaaagcggcattcttcaatcgttaactgctgttttggctctttgatgaatattgataaacttatacattaagcgaaaataaaaccgccctgacctggttttggctctctgatgaatattgataaacttatacagatgctgtcttttgtgtatatagtttttagttttggctctctgatgaatattgataaacttatacaaggtcagcatagtttccgtcttggtagagttttggctctctgatgaatattgataaacttataccgaatgatgcaagcaacggagcgagtgcgggttttggctctctgatgaatattgataaacttatacaaaacaaagataacagatatgagttttacgttttggctctctgatgaatattgataaacttatactacacaggctacagcaagaggtacaagattgttttggctctctgatgaatattgataaacttatacagagatgcggcataattgttaattgtggatgttttggctctctgatgaatattgataaacttatacaaattatcagcaatgtaataagtaatcgtggttttggctctctgatgaatattaaattaaaagaaacagcttgtggaattctgttctgcaagttgcttttttatatccaaaggggagatagaggaacagtgttctttggtataatatagtggacagtttggaacatcggacgaaaataaaattttttttgcaaattgcaatagcaagttaaaacagttttttgtggatgaaattgcaaccacaggaacaaagtatatgcacattttcatttactcaaaatcgccgattcgcttttcaacattgaagaacagattcactgttgcacatattgacaaggctaacggcagtgtaatggaaaatcgtgactatctccgcaaggagggcaggtggcagggttctgataaggaacagacaaatcttattgatacttttgaagagattggtaatgtttcaaagcctgttgatgaaaattctcccgatatgtctgctctgattgaagaaatcgaaaacggactcgatacctacgaaattatcaagctccacccgaaatatgcctttaggataaaagagattgacacactcaggcaaacagtgcttgaacttttatgctcatgttgaaaaaacaagcaaactgaacatttcacgcactcttgatacaaagctgaaaattgatttgtaattccgtgaataaattttcatttttcggaaaatttactgtatttttagaacggattttgcggttaaaaaggtgcgaaaatcctgatgattactgatatcttgtgccgttaattttcaagtcgaaaatcacaatttttagaaaatttttagaaaatccgaaaaaagttgccgacagagaaaatttctgcaaaaagaaaaagtcccaaaaacggcttatctaagccatttttgagacatcttaccttggcaggggcagaaggacttgacccctcggcacgcggttttggagcgactgttgaaagctcaaaactgcatagacaagccactatttaagccaaattcatagcatcaaaattacattttcgtggttttgatgcttttttgatgctattggtatttttaagcttacaatataatagctgatgacttttttattctatagaaatttcaaatgctgacggtatgctaaaataacatcctttattgcagtgtatggtaacatgctaaaatcaatctgtcaatcaattcataactcaaattttgcgccgctgtaaacaaagaatacaaagcggaaacagattcgttttattttttcagtatattaaactatatgtttttgctgatttttatatattctcgcagatatttgaatgggaaaggtacaacggtatattgaccgttgcgtacaaattcaacggagagaagtggtagcaggtccttgaattccattttcttttctgatattattttacgaataatacaagctctgctgacaccggatcttctaagcgatttttctcctgcataatagtacacttcttcaccctcttcaagaacaaaatcctttttaaaacagcatatatttacgatattactcataaggtattcgtcattttttagactttggattctcggatgcatccacacaccatatttatcgcgcatatactgatttagatcaatagcatactttttttgcatattcataaatctgcgaatttcatactttgtaagaacaggttgctgctctcttataattgctataagattgtttgtttcatcagcgtactgtggatattctgatgaaaatgcattaatcatattaattagattttcttttcgtactgctgtgtttgggttggtttctttaagtgccatgttgagtttgtaaatgtcaggaatggtaaattcgcaggtcctcacaattgcgtgtatattattaatatcagaaaacacaagaccttcaacactgttacataccctgctgttttctttgttgtattctgaatacataagcattattcgttctttatcagtactttctgtgggttcaatatcattaaaggtttcaaaattcaaatcacctgttggtgttactgtcatcatattgtattcaaagtgagaatcagggtatgtatatccttctatcttttctcttgttacaaacgaccaggttttgtctgtctttagttgtgtccaatcataaatagagagtttacgactataaatatcccctttaattattaattcctggactaccttttttaccatgttttttaatttttcctcgctatggttttcaactataatgtgttgaacaatcagaccgttgttatcatctttgtgtgggtccggtaacttattattttcatagtattcctcaccatagataatacggatattgtaaccgctttctgaggttgtatctatcagagggtgtatattgtaatcactttcaagaatgcgaacaatgctgtcaagcattgattcggactgtttgtccttgcagtagtcggatatggtaacgtctttttcactaagcatttttccgaattcttctacgctgatttcagtctttttgctttttttaatttccgttttatcagcagcatcgcatgagtcatattcaagtgttaagtaatcagacagttttagctttacatcttcaagaaacttattcattatacccagtttgcttctggaaaatttttctgggttttcataacataaaaattctaccgtattgtgggaatttttatatgaacccggcgcaaaggtgtccttcaggtcaactttgtcacttttcagtttttttctgaaagctcctgtttcggcgtctattatgtagaaactgccctgttttgaataactgtttttcctgaatgtcttgacatcaagggttaagtacattcccggcttaagtgaaatctggaggaattggaacatatatatttctttagttgatttgtctcttatcggggatgtgctgtcgccatagtataacttacctgtaagattattataggagaacaactcgcctttaggagttttcatagaatttataagaagttgcgcaagaagtctgtcattgtaatagaaaaccctgtttctttcagccttatccagcacattgattttttctacggcaacatttggatactgctcttttatctttctgctaaaattgagattatattctttgcctttttgaaaaagaacaagtgcttcttttccaaaagaatgttgtactgcaagtgctttgtattcagcggtaggaatatcaaggatatttgtattgtataaacctgttgtgcctttgacaaagtaaatgtcaaaatccctttctatattttcatagttgtattctgctcgaaacttgttggtaagtatcataaaaaatcttcactccttatcatattaatatttgtggttataggttttccgtcttggtcaatcaatcccggaatctctacaatttttccatcacagcttatagtaggtttcgtattgttgtttcctacaaggttgattatatatgcccttttgcccttaatagtatcaagcttttgccgtattttttcagtagtgctttctctgtcttgcaggtaagtaggcttccagtttttgaagtcaacataaataccgtcattaagttcaaaatcaaagaactcaaatctatcagggtcattaattggttttaatttcattccccgttctctgcttagtataaactcgccgcagacttctcctaatgcacctttatagatgttgtggaaaagcacagggctcatcatatacatatttttttcaaaagttgttgcataacctaatttaatgaagtgttctctcataccgctatatttcatcgcgtatggaagataagagtttttctctcctgcctcataaataatagtttcgtttgttatacccttcatttttgctctgccactgttttgaaagtcaattttacttgtaccaaaatcaataattacatcatcaaaatcatagtactgagagtaaaggtatttgttgatttttttaccggcagtaatataaagcattttcaaattatagtcagcattatattggctttgatttgcagtaggaaaagtcaacaccagctctcttaattcatgccatatttgcatactcctttcgttccattttctgtaaagcaagcctttaatagtccacattccggttgaagatattttttctgcagtattaaggatgcgctgccgttcatccgaataatcacttccaagagtttctctcaaaacagcaatagcctccagctcaggcgacattattcttttccgtagttcaccgctatatatcttttcaagcagcttgtcctcaatgtaaatattaatgtttctgcttttcacaaatgtgcggcacattctgcctactgcctgaatgacttctcttgttgcctgcatacggatacttttaattttatatagttcattattttcataggtatgccctgtagagtaggaattaaaggctgttctaataagactattaagttgtgaacgcttgatttctccgttttcatacagactttctatttgtaccaacatacttatcagctggttaactgtaattttttcatctgtataaatattggtagtaagatttgtaatatttccaagatacagagcatcaatatcctttgtaaagtggcgtttatcctttggatttttacattcggcaagttcaatatagtttgttttgtctgtaactgcatattgcagattttgccctgcgccgattgtactgtaagaagaaattataagaattttttctccttgctccaatttattaatcagaacttttttatcctcttcaaaatttttgcttttaagcacaaacagtgtatctgttgcgttatagtttagtccgcaaaataaaattgccttttccattaatcctaaaagcagaatatagttcatagatgctttgttttcctcaggaagagccattccgaggtaaagcatggattttagtgttgtatttttaaggaaggataccatagcatacagaatattgcagtacctgattcggtaatatatttcttcacactcattgtcaataatattaccgcataccattgcaaaatcattgtttccaaataattctctgcaaatatcttcacttctgctttcactgtactcagtactgataacttcggtgctaagactaattcctttgtccttgtatggctcataaagactgaacatctgttttttaactctgtctttcatatcttcaggtgtagaatgaaagtcgttctccagatagtctctgagataatcaagattgtagttgccgacaacagtaggtatttcagcggtagctgaaagtccgatgacagcattgtgctttgaaatatatcctataattttttcaggtgtatcatatagttttataaaacggagatttgtaaagtcaaagtgtgagtcgctatcttcaaattcaaagatttcaattcctttttggtagaaagaatcgtctggaatattgtgtttttctttctgacttattttctgctcacataattcaccaagcaggagtttgctttggttactgctaagctcaagctttttcataatagtagatatagcattttcaatagtcatagcatcagcaataaacggtctttccttgttgatgatgttcatatattcattagcccagtgaaaaagaaatcttctgaagtgaagtaaaaatctgttaatatctcttaaaaagctataaattacaatatcgtcttttttgcggttttcaaagaatgtttttttatcctcaaagaaaaccttaacaatgttttcctccttatcctttgttgcacgaatatactttgcatttccatttagtatagagtggtaggtagcatccttgaacaggaaattttgttttctgtcaatatgattttcgtttacctttatactcagattagtgtgatatttattggcaatttcatccgcctcttttttcaactttgcaaaggtaattattttacctttactatagtcaattgagtcaatagcctttttaagattgtttgaaaaataatccgtgttaaaagttcttaatatctgcctgaaaacagaaatataatcttctcgaactgaaacagctctttcaatcagctcattttcaatagtggattttgtcgcatcaaattcatcaacaataatgattgaatcggtaaataaaggagattttataaattcataactaggttctactataacagaatttcgcttcataaatttgctgatactcataagaataatctttctttcatcagtaaatactgcaggataaagtgcacctatccacttgtaatttgcatcattctttattgcttttagcttgtcttttttatttgaaaacctctttttcagtgtatcggaaacaaagtgcctgaaatttctttctgccctgttaacattatcaactaacatatgttgatattgagtatcgtttatattgctgttttttatttttgtgtaatttcttattgctttttcaagttcataatattcagcggatataaattcttcaggaatatcaagaacagggattttatctacaacttcatcaaaatttgaacgtattcgcagtacatctttattgtataatttttcatcattatatgctctttttaaatcctcttccggaagatttttgttgagggttgtaaggtatattatttttcttgtgttattaggatttgcggcgtattctcgcatacaatttgtgattgtgtaagtttttccgtatcctgtgggaagttcacaaagaaaaaggccgtttacattgtcgtttaaaactgagtctatgtattgtttcgtagttatcacctcgttaagatttgtcactatatagtataacataataaaaaggataaataagggcatatagtaccccctatttatccttgacataaatctatattcttttttaaaagttcgatcatttttgatttcacattatcgggctgtaaaatctctacattaccaagaccaattatccatcctaaaaatatattagacggaacagcataaaaggaaacctgtaaatattctgtttgctcgtcatcacaaatttcaatgtttgtaccaaattggtcaagaaatgcacctaccaagtattcggggatttttacagtaatacattcttctttcccggaaaacatgccgattcttcgggatacatatgtatccggattgaattctgaaaactgttcctttcctcttatttcaaattccaactgttcaatatggtagagtttgtcaactctgtaaactctttctttaagaataccatcagtttccttggtgtcatatccataaagataatatctaccgtctgcccaaataagtgtaaacggatttaatgaatatgattttccatttctgtttttcaggaccttatccttagtccaatgacggtattcaaaggaaatctgctttttattatttattgcgtgcacaatattatttatgttgattagtattctcttgttttcactttttgcaatattgatacctaaaatactcctgtctaatgcttctgcatcatatatgctgacggtgcttctcaacttctttgatatactatccgcaatgccgtttggaataatattagaggcataaatagagtctaacaataattttatttcggcgttttgtaaaagacggtctccgataaagtaggtagcatttctacctctgcctgaaattatttctacgccaaaatcttcacgcagtaatttaatatctctttttacagagtcatgttcacattcaaatcctttgtcgtagagcttttgtaaaatctcctccatagataattgatgatcttcatcagtgtatttttccagtattctgtatagcattaatattctgctcttatttctgctcaaagtatcctccataatattttggtaagtatattctttatgtttagtatatcacctgaaaatagtgtgttcaaggaaaaaataacttttacaaaagaaagtgagttttttcttatggataaagtacatagatctgaattttcttttttatataaaaatagtattgctattattccagaattagaatataataaaaacagtaatattcgaggtgatagaatgcttgcttatatgactgctggtgaagccgcagaaaaatggagtatatcccataggagagttataactttgtgtcaggaaaacagaattcccgatgtagctatgctcggaaatatgtggataataccaaaggacgctgtaaagcctgttgacggaagaacaataagatatgacaagaaaaatcctgcaaaaccctttgtgaaatgggcaggcggtaaaggacagctgttgcctacaatcagaaaattctatcctgccggaatgggaacaaccatacgcaaatattgt

SEQ ID NO: 717 - DNA, 13191 bp, synthetic construct
  misc_feature 1..13191: note = Synthetic
  source 1..13191: mol_type = other DNA
tagcatgggcttatagccctggagcaaaccacccgttggacgggtggttttgatttaattggtccatagtactgacaatgggacaatgctttgcgttataataaatttactataaattgctgaatatgttgtaataaaatgtgatatatgataaaataagagacgagaagacaataaaaaagacaaccctaaggttgtctttagtatgtggtgcaaaggggtttccactaccctacggcatattgccttatcttagaactctgatgaatattgataaacttataaaaaatggtttattgtgtttgttttgatgaatattgataaacctatacatcaaatttctaagttctaatttgattataatattgaaaaatatatttgtcaatagaaaggtgagaattatgaaatatataattggacttgatatcggaatcggttcagtgggctgggctgttgtaagaaatgacgatgattgcaaacgattggaggattttggtgtccgcatatttgaatccggagagatcattgaaagtaataaaaatatacgaaaaagtcaaagaagaagaaaatacagaggtatgcgaagaagaattaggagaaggaatcatcgaaaggaacgattgaagaactatcttgaaaatattgaatttgtaagtagggcggaactttccgagttctttgctaaaaacaatcatgatattatagatatacgggttcgtgccctcgatgaaaaggtgactcctgttgaacttgctgcggcattgttgcatatagcaaagcgtcgcggatataaagctttttacgagttgagtgatgaaaataataacgcaaaagataaaaaagccaaagaagaagaaaaagatatctacaaggcattaacgaatactgcagatgttataaaaaatggtggttatcgctcaattgcagaagctataatgaaggattctgaacatttttctgataaaatttccggaagatacaagtatagaaatataaaagaaaaagatgaaaagggaaagaaaaaatcagatggcaaaataagtgaaaatgacatactgtttcctaccgaaatgtttgaagatgaggtaagaaaaattttaggcaaacagaaagaattctaccctcaacttacagatgaaagtatagataaaatatttgatataatattttcaaggcgagatttcgaagatggacccggaaatactgacgatgaaaacagaccatataagggatttgttgattcgataggcaattgcccctactataagaatgagaaaagaggacaccgttatacggtaataggagatttatttgctttggcaaacaaactttctcaatataaatatgttgagaaaaacacaggcgaagtggtaaaactacctcgggatttgatgagaaatatcgtgaatcagtccttacaaagcggtagcattacgaaaacaaaaatcaatgaactcgcaaaagaacttaacattgtaattcttaatactaagactgctaaaaatgaaaatattgcagattgtattaaatacctcaaagctgtgaagccaatttttgaatcatacggtttcgattgggataaattgatatcggaggaatatacagatcaaaattctttgcttaacagggtaggtgacacaatatctttcaatataactcccaaaagaagaattgatgctttaaacaaaattgatgaactaaaaggaaaagatgaactgataaaaaagctctctaaacaaaatttttcaggaacagcaaaagtttcagataaatatatgattgatgcaatcaatgccttttttgatggaacattagtaggtgaatttcaggcgaatgtacaacaagatgagttttcagtaagtataaaaacagaaaaattgttaaaattaaaaccttttgataataatagtgagtatgcacaaaatcctgtggtgtttagagctatcaatgaaacaagaaaagtggttaatgcaattgttcaaaaatatggcgcaccaaatgcaatgaatattgaaatcgcaagtgaactcaataagagttttgacactcgtcaaaaaatatccactcaacaaaataaaaatgaaaaggaacgaaaaaatgcaataaaacaaatatcattgattacaggtcttgatgaaagagaaattaggccacagtacattgaaagatatcttcttggagaactccagggttggagatgtatgtattcaaatgaagaaataacaaataagaaagaagcaatattgaataaaggaaaacaatatgaaatcgatcatattgtcccattttcgagaattcttgatgatacactaaacaataaagctcttgttcttgcaagagaaaatcagaaaaaaggagcaagaactccgttgatgtatctatctgctgaaaaggaaaaagagttcaaacagcgtgtcaataagttgtttaaagacaataaaatcaccgagaaaaagtataggtattttatgcttgaatctcttgtaggcgaagatgctgagaaaattctcggcgattggaaaacaagaaatcttaacgatacacgatatattgcaaaatttttggttaagtattttaatgataatctctactttgcaagggaaaagggtgacgataagagaccggtagtttatgcagtcaagggtgcaataacatcatctcttcgcagacagtggctcaacaaagaaacatggggaagatatgataaaggtgagctgaagaagataacatattttgatcatgcagttgacgcaatagtaatagcaaactgtttaccggcctatgttattatagctgccgaaaaccacaagcttagagatatatactattctgcaggtaaaattaaaacagaggagtatagaaaaagtcttgacaattgtgttgataccttaatgaaatattatggaatgtctcccactgtttcaagaaaattacttgaaaaggttaaggaaacaccgtcattactgaagaatattcgttttgaagttgaataccgtgtccgtgattacgagttaatgaaatatttctttaactatgatactaaagtaggtgaagatactcttgatcaaatatttagaaatgatttgtacaaaatatatgatcaccaatttgcagactcaattgagatgccgattgtatcaattaagctgaaagaaaatattcaggtcagatggttaaggatcgtttcataaaaaagaaagatgcaatttcaggaaaaaacagtgtcaaaactattggtgagaataatagtacggtgttaaatgattcacgcttttattgtgtagatgtatatagaacttgtaatgatgaaacaaacctaaatttcattaaatataccgacttattaaaaagaaataatcatttgtatcttcgttcggattatagatatcctgatgattatgctatgcacgaaatgtacctttttcgtggcgactacatcgaaattacaaagaaaaatataatttgttgtggatactacttttcattaaaggacagttcaagaaatgaactgtatatatcaaaaggaaatacgagacgaaaacttaacaatatgaaggaaaaagaggcgtgttcaataactaaaaaggatacagtaaagaaatttgaaatagacatactcggtaaaaagcttggggaggtaaagaaatatggcaaaccgttatcattgcttccggagaaaaattgaacataaaggacaactggcttatagtatcaagtgcagaaggcgaaagtagggttccggtttcagacatatactcacttgtaatagaaaatcgtgcagcaatgcttagcgtaagtgtgttgaccacacttacgcaggcaggtgcacatataatactttgcgtgaaaaacatcttccggtgtctgcagcattaccaattaacactcattacagaccatttaatgtaataaagaagcaaattgatatgacatatgaatttaaaaatttattgtggcagaaaattattgaaagaaaaatacacaaccggtatttatgcttgaaataccgtgaaattaacaaagaaaaatgtgatgaaattgatgcgttatccaaaagcgtgaagcccggggatacaacaaaccgagaggcggttgcggcacgaaaatattttgttgcatttgaaaattgtgatacactttttgaaacacttacatatagcaatcgcaagagcttgattgatttgccaaaccaaattattttgcaatcagataaaagaatgcgtataagatatgcaatagaaatatatgtaaaatctcttgtgtcggcaattgaaaatgattatgaaagttatagtattttttgatttacccgttttgacaaaggagaaaagaaagcaatattcgcaatttagaaaaaatctgattaaatcaggttttatcatggtgcagttttctgtatatgcgagaactgtcagaaataatgatgatgcaaaaaagtattcaaaaatagttaaaagtattttgcccccatcgggttcggtacgattgctgataataaccgatcgtcagtatgattctatggaaattttgataggagaaaagtatgcggaggaaaactatcttgacaaaagagatatcattgaattataatgtacttgtgtttgaattgtcaaaaccgcctacattctacaagatgtagtggttttggctctctgatgaatattgataaacttatacttgttgacgcaacaattatagatgctaaacgttttggctctctgatgaatattgataaacttatattggaaaactgattgccattggcattataggttttggatctctgatgaatattgataaacttatacaatttgatgccttttatgagaaagtaagacgttttggctctctgatgaatattgataaacttatactaaggcaaatcttgagtttaatgggctttatcaataaaagtgtgtaagttttttagaaaatagataattgatgtttttgtacgcctttggagtggagcggagcgcaacgaaaaaggcgtacaaaacggcgtcagattaagtgctcgtatttctcaatacgggctttaattttgtcgtttgtcgcaagctgatttctgaccattgcccgattttgtaccttgcttccgttccattttttgtaaagctccgttatcctgagatagatcaatttgagcaatgcattttcgtttggaaaagcaccttttttggtgacctttctaaagctcgaattgatactctcgacagcaattgtagtgtacataacctttctgactgcactgccgtaatcaaaaagctgctctatatggttgaaatttcgcttccaaacattaactgctcctggatattgtgaccactcctgacagaactgctcaaaggattttcgagaggctgtaaggctcggtgctccgtacactttctttatgctttgtgtgaattttttgtagtccttgctcggcacatatttgattgaatttcggattaaatgcataatacaccctccacgcctcgtccttttagctcgtcaaatatctgcaacgctttttggatgatactgttcgatgatctgctttgcgaggttctcttccggtgtgctttccttttttgccatttcgttcattccttttctgtcatttcttttattgtagcacactttcccaaaattgaaaaagtgtgcaagctattttttctaacttacacactttattttacaagctcatttgaaggacagaataccggcttgatttgcccccgagaatagaatttcctgtccgcaaaatgttattcacacagagcgtgcataacattccgcagacaggaaagaaaagttaacacggggcaaatcagaaagcctgatgacaccgcaatccgctgttttgttattgcttgaaggattattatttacacagaattttatggggtgcctatacgcgctacttaaatatttgttaaacattccttactgcggtgacttacaaatatctacttcaatgaacatgatattctaaaaaatgtttcaacttgctattgcaatttgcgcttaaaatattttaaattgataccatatcttatcttgtgtaatgtactaaaagcgtagcgactaaccatcgctacgcttttagcaaacttattttggataactacaagctgataaaaatacagctttaagaaaataacatattaaatcaaactatgattaaaacttattctttcaactgaccgcatccgcaggtaccaacataattagaatttatttttccgcattttgggcacttccactcaccttttgatggggtagcaacagcagcattgctttccctaaagatagatgaaccgggagtacagcaattattggaggtgctttgatttattgtctcagaagactctgtgaaatattcaaaaatctttttctttccgatatttactgctattgcagaaccaattgaaacacctatccagattgcaagtgagaacatagttattgttttttctttgctataaagatctccgaaccaaagattgcacaacaaaggtactgcagcatacaaagaaaatacatcaaataaaattccctgtgcacaaataattatgccttgaactaatgttgttttgtttttcatatatttaaccccttttcatttaatttacaataccaatgaaggcgctttgaccgacctcattatatatcacatagtaaggaagcgtttcagcttcgcttgtacctataggacaccacgctacaacctgcttaggtaaatcgcttatctttatgccgggaaaataaattttaaaatcagatgcattatccatcccatttggtttggaataaacatactttacaccattatcgtaatatgtatctccctcgttgtttttaacaaccattgatgttaatttcatagagtatgtgtattcgtcaatcttttttggggttggggttgaaaacttaccattgaaattacatatatacgttgtgccattgggataatcttcacctctaatgcccatctcagaatctgaaaactcttctgtaaatgaaccatccttatcaatattcagcacagttctccagttaccaacaccggaactaaaaataaattgtgtaggcattaactcaaaagcagaagtttcgttttttggcaatacactgctttccgatttttctgaataagaatttttagttttagtcttattttcagattttgaattatcttttttactgtttttagttgtagattgtgttgctgaactagctttacttgtagttgtttctgtctttgaagttgcttttgaagaagtactttgtgtactgcttgtaacttcagatgatgcagcaattgtggtttctgaggtcgaactttcaacattactatccgaattgcaaccaattaacaatcccgaaattgctaacattgatactaacaaaattatttttttagacattcttttttccccgtttataaacatattaatttaattgattttgcaccaattaaactccctgttgattacatatccatcagcgacccaacttacatacggatcataatttccatcaacttttaatttatcgtatccgttgccgttaaattttgctatagagttacctgctccaataagatatatatcttctgtgttttttaaatcataaccaagtcctgatcctttatttttaaaaccacctgcaccatttttaattactgtaatatttcctgtgtccaattcaaatttatataagtcaaaatcactttcatcttttttattcatcataagtgcaaatgaaccgtcactgctgataactccctgtgataaagttaattttgatggtattttggctgattttttcaaagtaccatttttatcaacagaagaaatataccaatcattgtcagattctgttttaaaataaactttatcatcatcggcaactctatatttgtcaataatactactattgttgagaatgacttttgatttttctgtattaaaatcaaactctaatacatcttcttcatcattaactgtacttgcaatttgaaaatacattttagaatttatacatgttgaattaattattcctaacttcatattatcaactactacaatgttttttccacttgataaatcgtatttttttaaagtgttattgtctaaataataaacaaagttattataacaagtaacaaaagagaatttttcttttgttacaaacaaattcttaagtactttagagttaagattatacgaataaattacacaattgtcagatgatgttcccgtagatgcagcacaatataaaacatgtccatcagacattatactttctatattgtcatgaccattttgactgaaactagctaatactgttgctttatcagtaggatatttctttaaatagatagtgcttttgttagaataaatatatttatcacctacacataaaaaagtatttgcaactttgaaattattttcaattgtttcttcactttcactgcttgatgacacaactaatttacacttacctatatgggtatcctctccacgcctaatatttgttggagttagattaaactttaatcctttatagctgtcttttgatatcttaaatacgaaataaccgtcaacatcatcaataagcgattcaaactcacctgattcatttgtcattactgtggcaaacggggtttctgcattttcagaataaatttcaacttttgcatctcttatcggattagaagtttcactgtctacaacggtaccctttacatatctgtagctacacttatccataaaacgaatatctgtatcaccctccatgtgagttgatattttcaatggactgttttcttcatttattatttcaaaattcttttttgtcggaatattaaaaatttctaaaacaccctttaatgaatcatcaacatatacaccggcattgaaataaaaatatgatgacatgtccccgtgaaacaaattgtctttttttcgagtaagacctacagataatttagcttttgctcctatgtcagattttgctccgattgtaatcgttgcacaggtaagttcgacagcaggaccaattccgacagttgcgtttactgacgcttctgctttaatttccggtttgctaaaatctttaataaattctaaccctgttttatccaataatacaccaactttattttctaccgaacactcaaaagttatcgaaccatccgctttaactgttaaattcactataacatttacaccaacggtcggcaatattcttacaggacatttagcaatctcaactgttccttctttacctatacctcctgaaatttgtgctgtaccactaaacttcaatttatctttcaaggcaatatagaaaacaaagttatctttaatatgcaggggattaagcgaaaacaaatttgtatctttttctgtatagattttgtattctaactcaggggtatcaagacttccgttcaatttaatttttattggatttgctacatcacctattttgaattccttatttacaaatttaagtttatttgcatccaactctatggtgtcttgtatatctattgattccttgttaaaaaatccggctgaaacactgttatcacttttctttgatttttttaaatcagtcataccggatgaaattttgccctgaatatctaatttatcgtagagctcgtacatttcaggttctgtaacatcaagtgttacttttccatctgaaacatcagtcttattgattttgtatgctacagtttcatttaaattgtttggattttgtgttacaaacacatctccttcttttaaacttgaagttttatcatctaattttaatgtgactgtattgctgttcatagtcttcacatatgaaccatcaaatgagataacactatctttgatttttacagtattatcataatttgtatcaatttctgtcttatcaagagttttcttaatcaatacaacaatattattaagttcacttcttgttacagccttttcagacacaaatttgttgtctacaaggttaaagaaccctctttcgaccatcgctgccgatgcttctgggtacttcaattctttaatatcgtcacacactaaagcttcgttatttacaaagccaagacaattattaagagtatacgcagcaaattctctggtaacatatccatcaggatcatattcatcaacatctgttaaaagtataccataatagtatgcaactacaattgaatctttgtatttgctactctcaatatcattatatgggacttttacattttgacctaactctgtattcatagaaaactcacgcacaagcatatcagcccattcagctctgggaatattatcttcttctgaatcaaatgagttatatgtaattacactacttattgtgtaattgttttccgatacgtttatttctttatttactgtaaatgattttcgttctatttcagcagcattcaccattgaaataccgcctactgttacgacacctgaaataatactgaaacacagtactattgaaaggtattttctgacactatttctgttttttaatacaataatgactgcgaaacttacgatgcaaattgatacaacaaaaaatactgccatattatttcctgttttaacggactcttcgcttattacactgctattttgtgtagctaaaacactgtttttacctacaccatccgttgcagaagttactgcctgtacatctggaatcaaaatctttgttgtttcttctatatttgattttgaagtagcggttgtttttgtgttatcaggtttagttgctgtattatttacttttattgcaacaatatcaagagtaatactttcaccagatttcaggcttgcataatcaacatcctgctttttattatcctttacttcaaaattttctgataaaattgctttcaaagatacattttcaacagcaaaatcattggtattggtaactttaaatgttaggtcaatatcttcgtttgattgatagctgtccttttttgttgtgatagaagcaactaagccgtcttgcgaattgtttgtgtcttgtgccgcacccaccgatatgcaaaagctaaatagtaacattgcaataactgaaaaggctgtaaaactttttaataatcttctcatttaatctcctccaaaatgacatattatgcaaaacacttgcaaatttaatataataattatacaatactgctaattgttttgctatcccgaaaagttacatcaaatcaattattttttacatagttctgcaaaatcaaataaaatcttttatttatatttagattatgatatactgtttgcataataaatcggcattaatttcactaaaatttcaaacgagggagaatgaatatatgaacacattggtttgtgacgatgatttgataatcagcaaccgtatttccaaatacataaaggataaattcggtcacaatgtagttactgtaacaaacagagatgcggctctggaaatcatacattctataagtattgatttactgattattgacattgttttaaaaaacgataacggaattttacttgcagaaaaaattcagaagattcagcccgatataaaagtaattttcatcacaggatacggcagtgtttattacgatgatatttttgaaaatattgcaccgcagggatttcttgaaaaaccgattcaatacaacatactaaattttttcattaagcaaattgagggcgaatacaaaaagaaaagtacaaaactaaaaatctcgtatgattttaaagagtatcttattccgatagataaaatactatatatacaaagtacaaagcgagtttgtgaaataattacagaaaatgaaactttccgttgttacaaaaagctttctggttttctcgaagaactccccgattttttcataaggtgtcaccaaagctacattgtaaatataaactatgtaaaatcacatgaaatcggacaattcacacttacaaacggaatgattgtccctataagcaaatcttacgctaaaaatgccaaaaatttatatcttatgaatttcggaggataaacaatgttacttgcttttgctactatattagacttaattacaactgctacttttcttcagtatccactgcaactgctcacattaaaaaaggacaaacctatttacaaaattataatgggaatattctttgtctttacaatgattatttcttttttatccagaataaacgaggaatttaatgctaatccatttaaacctattattttattcggagtgattgccgtaacatttttcacttgtttcagcgataaaatctctcagaaaacaatagcctatgttctgttccttgcttcaatgtgtataacagaactttcggttatggcgttatttacttttatgggattttcattgcgtgacgataaagttgcaaatgtactcagcaatgttgtagctattcttgttctttggattttacttttaatatgcaaaaaaatttttgataaaaatcttaagcacaaaaattattcatcaagaatgtggcaatttgatattatcattgtttcacagcttatgtgcagttcggcaatcgccatatctgtatataacaataacaattttgaactgacaagtgcaaatattatactttggatttttgtcattgcaacaatcatatgtatggttatatgtgacatcgcactttacaaagttttgcttgtaaattctgaaaatcacgatttgaaagaagcactcgaaatttctaatttaaagaacgaactcgaacttgaatactacaacaaaatgaaagtaagtattgccgaaacaagaaaaatgaatcacgatatcagtaatatgattacagttgtaaaagctatggttaatgataacaatgataataatagtgaacgagcaaacgcaattatccaagatttgaccgaaactcttgagaacaacaaaatcagaaaattctgtgacaatgaattagttaatattattatgattaacaaatatgacaccataaaagcaaatcatattgaattttctagcaacttaaatattccgaataacatcaatattaaaaacacagatctctgtagattgtttaccaacataattgataacgcaatagagtcttgtgttatctctaatgataaaagtaaagcatttattattctttcatcgcaaattaaagataa

SEQ ID NO: 718 - DNA, 9442 bp, synthetic construct
  source 1..9442: mol_type = other DNA
  misc_feature 1..9442: note = Synthetic
acagacgatcgaggcacagagcgctgtaaaatcggctaaggtacatttaagcttcccgaaggataacggaacgctggcggcacagaacgaagaagcatctgcattcatccagctggagctggatggtacgtttacatccgcgaatgcagcagcgttggcaaagtgtgttgctacatggctgcggaatgataccacggcgaatattaccattatggatactgattccaatctgctgtttgcaggcggtgacgattacacatccgcaggcattgccaattccatgcaggaattacagaaccaggcagaatccatgatcgccaatcaggtcaagaaggtactgctgggaacaaaacagtataatgatgcggccgttaccagccacctgagcatggatttctctgattataaggagaccgtaaaagagtattatgcaaactccggcagagatgaaggtatgctttcccatgaggagacttatgagagcgagaataccaatgacggcggcggtgtaccggggacaacttccaacggggagagcggaaatactacctatgtatctccggacagcagcaacagttcttcctctacttccgaaaccagccgggattatctgccgaacgagtctattaaggatactgtgacacccgcaggaggaatcaactacactaattcctccatatcaattgcagcaattacttataaagaaattcattatgaggatgtaaaacgacaggggcttctggatggcactacctgggatgaatacaaatcccagaacagcgcagataccaagatgacagttgatcaggatatgtacagcctggtagccaatgccaccggtatcaatgagagtaatattatattcaaatgaagaaataacaaataaggaagaagcaatattgaataaaggaaaacaatatgaaatcgaccatattgtcccattttcgagaattcttgatgatacactaaacaataaagctcttgttcttgcaagagaaaatcagaaaaaaggagcaagaactccgttgatgtatctatctgctgaaaaggaaaaagagttcaaacagcgtgtcaataagttgtttaaagacaataaaatcaccgagaaaaagtataggtatttcatgcttgagtctcttgtaggcgaagatgctgaaaaaattctcggcgattggaaaacaagaaatcttaacgatacacgatatattgcaaaatttttggttaagtattttaatgataatctctactttgcgagggaaaagggtgacgataagagaccggcagtttatgcagtcaagggtgcaataacgtcatctcttcgcagacagtggctcaacaaagaaacatggggaagatatgataaaggtgagctgaagaagataacatattttgatcatgcagttgacgcaatagtaatagcaaactgtttaccggcctatgttattatagctgccgaaaaccacaagcttagagatatatactattctgcaggtaaaattaaaacagaggagtatagaaaaagtcttgacaattgtgttgataccttaatgaaatattatggaatgtctcccactgtttcaagaaaattacttgaaaaggttaaggaaacaccgtcattactgaagaatattcgttttgaagttgaataccgtgttcgtgattacgagttaatgaagtatttctttaactatgatactaaagtaggtgaagatactcttgatcaaatatttagaaatgatttgtacaaaatatataatcaccaatttgcagactcaattgagatgccgattgtatcaattaagcctgaaagaaaatattcaggtcagatggttaaggacaactttttgaaaaagagagtcgcaaattcagaaaataaatatgttaaaactattgataaaaataacgatgcactgttagataattcgtattattattgtgtcgaagtatacagaacgagaagtggtaatactgatttgcagggaattaagtatacagatttagttaataaaaataaaaaattatacttgaagccatgttataagtatcctgaaaattattataaacatataatgtatttgtttaaaggcgattatttaagaataaaaggtcctaagtctacaagacttggcttttataaggcggtaaataatataaatcaaaattcaataaaaatcacacgttataacagcaaatacacaagggcattccgagaagaatcaacagcaataagtgcagatgcagagatagaaaaaatatatgtagacattcttggaaaaaaaggaaaggtgttaacaaaacatggcgaaccgttatcgttgcttccggagaaaaattgaacataaaggacaactggcttatagtatcaagtgcagaaggcgaaagtagggttccggtttcagacatatactcacttgtaatagaaaatcgtgcagcaatgctttgcgtaagtgtgttgaccgcacttacgcaggcaggtgcacatataatactttgcgatgaaaaacatcttccggtgtctgcagcattaccaattaacactcattacagaccatttaatgtaataaagaagcaaattgatatgacatatgaatttaaaaatttattgtggcagaaattgtggaattattgaaagaaaaatacacaatcggtatttatgcttgaaataccgtgaaattaacaaagaaaaatgtgatgaaattgatgcgttatccaaaagcgtgaagcccggggatacaacaaaccgagaggcggttgcggcacgaaaatattttgttgcatttgaaaattgtgatacactttttgaaacacttacatatagcaatcgcaagagcttgatcgatttgccaaaccaaattattttgcaatcagagaaaagaaagcaatattcgcaatttagaaaaaatctgattaaatcaggttttatcatggtgcagttttctgtatatgcgagaactgtcagaaataatgatgatgcaaaaaagtattcaaaaatagttaaaagtattttgcccccatcgggttcggtacgattgttgataataaccaatcgtcagtatgattctatggaaattttgataggagaaaagtatgcagaggaaaactatcttgacaaaagagatatcattgaattataatatacttgtgcttgaattgtcaaaaccgcttacattctacaagatgtagtggttttggctctctgatgaatattgataaacttatacccgttgttatcggtcacagaagattagcaggttttggctctctgatgaatattgataaacttatacaatggttgttgaagctattattgcattggggttttggttctctgatgaatattgataaacttatacatcggttaaaactatgcccgataaggaagcgttttggctctttgatgaatattgataaacttatactaattactgttgtactgataacagccagcagttttggctctctgatgaatattgataaacttatacaaatgacaaatgcaatagtacgaaacgctagttttggctctctgatgaatattaaattaaaagaaacagcttgtggaattctgttctgcaagttgcttttttataaccaaaggggagatagagggacagcgttctttggtataatatagtggacagtttggaacatcggacgaaaataaaatttttttgcaaattgcaatagcaagttaaaatagttttttgtggatgaaattgcaaccacaggcacaaagcatatgcacattttcatttactcaaaatcgccgattcgcttttcaacattgaagaacagattccctgttgcacatattgataaagctaacggcagtgtaatggaaaatcgtgactatctccgcaaggagggcaagtggcagggttctgataaggaacagacgaatcttattgatacttttgaagaggttggtaatgttccaaagcctgttgatgaaaattctcccgatatgtctgctctgattgaagaaatcgaaaacggactcgatacctgcgaaattatcaagctccatccaaaatatgcctttaggataaaagagattgacacactcaggcaaacagtgcttgaacttttatgctcatgttgacaaaacaagcaaactgaacatttcacgcactcttgatacaaagctgaaaattgatttgtaattccgtgaataaattttcatttttcggaagatttactgtatttttagaacggattttgcggtaaaaaaggtgcgaaaatcctgatgattactgatatcttgtgccgttaattttcaagtttaaaatcacaatttttagaaaatttttagaaaatccgaaaaaagttgccgacagagaaaatttctgcaaaaagaaaaagtctcaaaaacggcttatctaagccatttttgagacatcataccttggcaggggcagaaggacttgaaccctcggcacgcggttttggagcgactgttgaaagctcaaaactgcatagacaagccactatttaagccaaattcatagcatcaaaattacattttcgtggttttgatgcttttttgatgctattggtatttttaagcttacaatataatagctgatgacttttttattctatagaaatttcaaatgctgacggtatgttaaaataacatcctttattgcagtgtatggtaacatgctaaaatcaatctgtcaatcaattcataactcaaattttgcgccgctgtaaacaaagaatacaaagcggaaacagattcgttttattttttcagtatattaaactatatgtttttgctgatttttatatattctcgcagatatttgaatgggaaaggtacaacggtatattgaccgttgcgtacaaattcaacggagagaagtggtagcaggtccttgaattccattttcttttctgatattattttacgaataatacaagctctgctgacaccggatcttctaagcgatttttctcctgcataatagtacacttcttcaccctcttcaagaacaaaatcctttttaaaacagcatatatttacgatattactcataaggtattcgtcattttttagactttggattctcggatgcatccacacaccatatttatcgcgcatatactgatttagatcaatagcatactttttttgcatattcataaatctgcgaatttcatactttgtaagaacaggttgctgctctcttataattgctataagattgtttgtttcatcagcgtactgtggatattctgatgaaaatgcattaatcatattaattagattttcttttcgtactgctgtgtttgggttggtttctttaagtgccatgttgagtttgtaaatgtcaggaatggtaaattcgcaggtcctcacaattgcgtgtatattattaatatcagaaaacacaagaccttcaacactgttacataccctgctgttttctttgttgtattctgaatacataagcattattcgtcctttatcagtactttctgtgggttcaatatcattaaaggtttcaaaattcaaatcacctgttggtgttactgtcatcatattgtattcaaagtgagaatcagggtatgtatatccttctatcttttctcttgttacaaacgaccaggttttgtctgtctttagttgtgtccaatcataaatagagagtttacgactataaatatcccctttaattattaattcctggactaccttttttaccatgttttttaatttttcctcgctatggttttcaactataatatgttgaacaatcagaccgttgttatcatctttgtgtgggtccggtaacttattattttcatagtattcctcaccatagataatacggatattgtaaccgctttctgaggttgtatctatcagagggtgtatattgtaatcactttcaagaatgcgaacaatgctgtcaagcattgattcggactgtttgtccttgcagtagtcggatatggtaacgtatttttcactaagcatttttccgaattcttttacgctgatttcagtctttttgctttttttaatttccgttttatcagcagcatcgtatgagtcatattcaagtgttaagtaatcagacagttttagctttacatcttcaagaaacttattcattatacccagtttgcttctggaaaatttttctgggttttcataacataaaaattctaccgtattgtgggaatttttatatgaacccggcgcaaaggtgtccttcaggtcaactttgtcacttttcagtttttttctgaaagctcctgtttcggcgtctattatgtagaaactgccctgttttgaataactgtttttcctgaatgtcttgacatcaagggttaagtacattcccggcttaagtgaaatctggaggaatcggaacatatatatttctttagttgatttgtctcttatcggggatgtgctgtcgccatagtataacttacctgtaagattattataggagaacaactcgcctttaggagttttcatagaatttataagcagttgcgcaagaagtctgtcattgtaatagaaaaccctgtttctttcagccttatccagcacattgattttttctacggcaacatttggatactgctcttttatctttctgctaaaattgagattatattctttgcctttttgaaaaagaacaagtgcttcttttccaaaagaatgttgtactgcaagtgctttgtattcagcggtaggaatatcaaggatatttgtattgtataaacctgttgtgcctttgacaaagtaaatgtcaaaatccctttctatattttcatagttgtattctgctcgaaacttgttggtaagtatcataaaaaatcttcactccttatcatattaatatttgtggttataggttttccgtcttggtcaatcaatcccggaatctctacaatttttccgtcacagcttatagtaggtttcgtattgttgtttcctacaaggttgattatatatgcccttttgcccttaatagtatcaagcttttgccgtattctttcagtagtgctttctctgtcctgcaggtaagtaggcttccagtttttgaagtcaacataaataccgtcattaagttcaaaatcaaagaactcaaatctatcagggtcattaattggctttaatttcattccccgttctctgcttagtataaactcgccgcagacttctcctaatgcacctttatagatgttgtggaaaagcacagggctcatcatatacatatttttttcaaaagttgttgcataacctaatttaatgaagtgttctctcataccgctatatttcatcgcgtatggaagataagagtttttctctcctgcctcataaataatagtttcgtttgttatacccttcatttttgctctgccactgttttgaaagtcaattttacttgtaccaaaatcaataattacatcatcaaaatcatagtactgagagtaaaggtatttgttgatttttttaccggcagtaatataaagcattttcaaattatagtcagcattatattggctttgatttgcagtaggaaaagtcaacaccagctctcttaattcatgccatatttgcatactcctttcgttccattttctgtaaagcaagcctttaatagtccacattccggttgaagatattttttctgcagtattaaggatgcgctgccgttcatccgaataatcacttccaagagtttctctcaaaacagcaatagcctccagctcaggcgacattattcttttccgtagttcaccgctatatatcttttcaagcagcttgtcctcaatgtaaatattaatgtttctgtttttcacaaatgtgcggcacattctgcctactgcctgaatgacttctcttgttgcctgcatacgaatacttttaattttatatagttcattattttcataggtatgccctgtagagtaggaattaaaggctgttctaataagactattaagttgtgaacgcttgatttctccgttttcatacagactttctatttgtaccaacatacttatcagctggttaactgtaatttttccatctgtataaatattggtagtaagatttgtaatatttccaagatacagagcatcaatatcctttgtaaagtggcgtttatcctttggatttttacattcggcaagttcaatatagtttgttttgtctgtaactgcatattgcagattttgccctgcgccgattgtactgtaagaagaaattataagaattttttctccttgctccaatttattaatcagaacttttttatcctcttcaaaatttttgcttttaagcacaaacagtgtatctgttgcgttatagtttagtccgcaaaataaaattgccttttccattaatcctaaaagcagattatagttcatagatgctttgttttcctcaggaagagccattccaaggtaaagcatggattttagtgttgtatttttaaggaaggataccatagcatacagaatattgcagtacctgattcggtaatatatttcttcacactcattgtcaataatattaccgcataccattgcaaaatcattgtttccaaataattctctgcaaatatcttcacttctgctttcactgtactcagtactgataactttggtgctaagactaattcctttgtccttgtatggttcataaagcctgaacatctgttttttaactctgtctttcatatcttcaggtgtagaatgaaagtcgttttccagatagtttctgagataatcaagattgtagttgccgacaacagtaggtatttcagcggtagctgaaagtccgatgacagcattgtgctttgaaatatatcctataattttttcaggtgtatcatatagttttataaaacggagatttgtaaagtcaaagtgtgagtcgctatcttcaaattcaaagatttcaattcctttttggtagaaagaatcgtctggaatattgtgtttttctttctgacttattttctgctcacataattcaccaagtaggagtttgctttggttactgctaagctcaagctttttcataatagtagatatagcattttcaatagtcatagcatcagcaataaacggtctttccttgttgatgatgttcatatattcattagcccagtgaaaaagaaatcttctgaagtgaagtaaaaatctgttaatatctcttaaaaagctataaattacaatatcgtcttttttgcggttttcaaagaatgtttttttatcctcaaagaaaaccttaacaatgttttcctccttatcctttgttgcgcgaatatactttgcatttccatttagtatagagtggtaggtagcatccttgaacaggaaattttgttttctgtcaatatgatatccatccaagactattttacgtccaaacccaaaaccgtagataacatagttatccctatac

SEQ ID NO: 719 - DNA, 7287 bp, synthetic construct
  misc_feature 1..7287: note = Synthetic
  source 1..7287: mol_type = other DNA
ttcctccgagcataggcatcgtgattgaaaatatgaacctgttgccccagtacaatgcttttgacaatctgaaaatcctcggcaaaatcaagaaaaccgccacagatgaggacattacaacagcgcttgagcgtgtgggattaaagtccgatttaaaggtgaaaaagttttcgcttggtatgaaacagaggctgaatattgctcaggctgtgtttgaaaagcagaaaatcatcctgcttgatgaaccgacaaatgcacttgataatgacggtgtacagctgatttacaagcttcttaaagaagaaaaagaaagaggtgcgctcgtagttatcacaactcatcacaaagaggatttggaagaagtttgtgatgttgttttgaaaatgacggaaggtgagctgcatgaaaagtaaactgtttactcataaatttttcgttgttctttgcatctcggttgccgctttgctcggcttgtctttccttgccagagcgacaatcgtaaataacagatttgaacaaatggctgttgatgaaaaatatagtctaaaaccttctgccgacggtcagtttttaattcaatttcaagatgataaaaacggaaatttttatgccactgtcggcttgtttcagggcggatattacggcttggacgatgcgtatattcctacttcatatgatgaaaatacaaaaataaccgctattgaaaaggaagctttcagcgaatttgattgtctgaaaaaagttgttatccccaacggcatttgtgaaatcaaggatgacgcatttaaggattcaaaaaatataacggaaatttatattgcgccctccgtaaataagattgcaaaaaccgcttttgacggcattgacaaccttacgatatatgccgaaaagggttcttatgctgaaaaatttgcggttgaaaataaaatcaattataaaaactatacgaccgagcctgaaaatccggaggctaaaaataccgattattcaaaaatcagaaacggtgcgtattacggcgagtattataattatgatgttatctatgatgacggcaagcccgtgtgcgtaataactaactataacacaatgtcgacagaggaaaagcttgaaattcctgcaaatattgacggcttggatgtgatttcaattgcagatgacgcaataaattacggtggtgcaaaggaaacagtcgttcccgatacggtaagattcattgccgataatgcgttcaaagaatcctactcccttgaggatatctacctgaccaaaaatgtgtcctacataggaaaatctgccttcaaagactcaaaagacctaacaatccacgccccgacagattcctatgcacatacctttgcgaccgaaaataaaataaatttcaaagctacagacgattaaatctgataagcaatgaataaatctttaattttacagccctgtacccatttgcagggctgtttttgcaagcaaatggtagataatggtacagtgacctttggtataatgttgataacaggttgaaagaattataaatttaaaaatgtaggaggattttatcatagcaaaacagaaagcatatgtgcgtatcaacagttctgaaagatgttggtatgagattgttgagttcgaggtttcggatgatttgtatgcaaaaataaatgaggcagttgagaacaatattccgttggcggattgcgattttgccgatgaattgtacgagcttgcagtcaatttttcttgagtatgacaatgaaaaatacgaaacttatcgtgttgacattactttcaaagaaaacggcataattacagacataaccgttgatgcaatgggtttacagtatcatgatttccgttctgataactatgccgaatgttatccgaattacgaatatatcgaagacgccttgcaggatgcggtggaaatgtaatcattttatgctgtattcaaaattacccccaaaaaatcacagaaaaaataccccctaaaacaacaaaagctgaggataattttcatatcctcagcttttgtgctttaatcggtccatagtactgacaatgggacaatgctttgcgttataataaatttactataaattgctgaatatgttgtaataaaatgtgataaatgataaaataagagacgagaagacaataaaaaagacaaccctaaggttgtctttagtatgtggtgcaaaggggtttccactaccctacggcatattgccttatcttagaactctgatgaatattgataaacttataaaaaatggtttattgtgtttgttttgatgaatattgataaacctatacatcaaatttctaagttctaatttaattataatattgaaaaatatatttgtcaataaaaaggtgagaattatgaaatatataattggacttgatatcggaatcggttcagtgggctgggctgttgtaagaaatgacgatgattgcaaacgattggaggattttggtgtccgcatatttgaatccggagagatcattgaaagtaataaaaatatacgaaacagtcaaagaagaagaaaatacagaggtatgcgaagaagaattaggagaaggaatcatcgaaaggaacgattgaagaactatcttgaaaatattgaatttgtaagtagggcggaactttccgagttctttgctaaaaacaatcacgatattatagatatacgggttcgtgccctcgatgaaatggtgactcctgttgaacttactgcggcattgttgcctatagcaatgcgtcgcggatatatagctttttacgagttgactgatgaaaataataacgcaaacgagaaaaaagccaaagaagaagaagaaaaagatatctacaaggcataaacgaatactgcagatgttataaaaaatggtggttatcgctcaattgcagaagctataatgaaggattctgaacatttttctgataaaatttccggaagatacaagtatagaaatataaaagaaaaagatgaaaagggaaagaaagaatcaggtggcaaaataagtgaaaatgacatactgtttcctaccgaaatgtttgaagatgaggtaagaaaaattttaggcaaacagaaagaattctaccctcaacttacagatgaaagtatagataaaatatttgatataatattttcaaggcgagatttcgaagatggaccaggaaatactgacgatgaaaacagaccatataagggctttgttgattcgataggcaattgcccctactataagaatgagaaaagaggacaccgttatacggtaataggagatttatttgctttggcaaacaaactttctcaatataaatatgttgagaaaaacacaggcgaagtagtaaaactacctcgggatttgatgagaaatatcgtgaatcagtccttacaaagcggtagcattacgaaaacaaaaatcaatgaactcgcaaaagaatttaacattgtaattcttaatactaagactgctaaaaatgaaaatattgcagattgtattaaatacctcaaagctgtgaagccaatttttgaatcatacggtttcgattgggataaattgatatcggaggaatatacagatcaaaattctctgcttaacagggtaggtgatacaatatctttcaatataactcccaaaagaagaattgatgctttaaacaaaattgatgaactaaaaggaaaagatgaactgataaaaaagctatctaaacaaaatttttcaggaacagcaaaagtttcagataaatatatgattgatgcaatcaatgccttttttgatggaacattagtaggtgaatttcaggcgaatgtacaacaagatgagttttcagtaagtataaaaacagaaaaattgttaaaattaaaaccttttgataataatagtgagtatgcacaaaatcctgtggtgtttagagctatcaatgaaacaagaaaagtggttaatgcaattgttcaaaaatatggcgcaccaaatgcaatgaatattgaaatcgcaagtgaactcaataagagttttgacactcgtcaaaaaatatccactcaacaaaataaaaatgaaaaggaacgaaaaaatgcaataaaacaaatatcattgattacaggtcttgatgaaagagaaattaggccacagtacattgaaagatatcttcttggagaactccagggttggagatgtatgtattcaaatgaagaaataacaaataagaaagaagcaatattgaataaaggaaaacaatatgaaatcgatcatattgtcccattttcgagaattcttgatgatacactaaacaataaagctcttgttcttgcaagagaaaatcagaaaaaaggagcaagaactccgttgatgtatctatctgctgaaaaggaaaaagagttcaaacagcgtgtcaataagttgtttaaaggcaataaaatcaccgagaaaaagtataggtattttatgcttgaatctcttgtaggcgaagatgctgaaaaaactctcggcgattggaaaacaagaaatcttaacgatacacgatatattgcaaaatttttggttaagtattttaatgataatctctactttgcaagggaaaagggtgacgataagagaccggtagtttatgcagttaagggtgcaataacatcatctcttcgcagacagtggctcaacaaagaaacatggggaagatatgataaaggcgaactgaagaagataacatattttgatcatgcagttgacgcaatagtaatagcaaactgtttaccggcctatgttattatagctgccgaaaaccacaagcttagagatatatactattctgcaggtaaaattaaaacagaggagtatagaaaaagtcttgacaattgtgttgataccttaatgaaatattatggaatgtctcccgctgtttcaagaaaattacttgaaaaggttaaggaaacaccgtcattactgaagaatattcgttttgaagttgaataccgtgtccgtgattacgagttaatgaaatatttctttaactatgatactaaagtaggtgaagatactcttgatcaaatatttagaaatgatttgtacaaaatatatgatcaccaatttgcagactcaattgagatgccgattgtatcaattaagcctgaaagaaaatattcaggtcagatggttaaggacaactttttgaaaaagagagtcgcaaattcagaaaataaatatgttaaaactattgataaaaataacgatgcagtgttagataattcgtattattattgtgtcgaagtatacagaacgaggagtggtaatattgatttgcagggaattaagtatacagatttagttaataaaaataaaaaattatacttgaagccatgttataagtatcctgaaaattattataaatatataatgtatttgtttaaaggcgattatttaagaataaaaggtcctaagtctacaagacttggcttttataaggcggtaaataatataaatcaaaattcaataaaaatcacacgttataacagcaaatacacgagggcattccgagaagaatcaacaacaataagtgcagatgcagagatagaaaaaatatatgtagacattcttggaaaaaaaggaaaggtgttaacaaaacatggcgaaccgttatcgttgcttccggagaaaaattgaacataaaggacaactggcttatagtatcaagtgcagaaggcgaaagtagggttccggtttcagacatatattcacttgtaatagaaaatcgtgcagcaatgcttagcgtaagtgtgttgaccacacttacgcaggcaggtgcacatataatactttgcgatgaaaaacatcttcaggtgtctgcaacattaccaattaacactcattacagaccatttaatgtaataaagaagcaaattgatatgacatatgaatttaaaaatttattgtggcagaaaattattgaaagaaaaatacacaaccggtatttatgcttgaaataccgtgaaattaacaaagaaaaatgtgatgaaattgatgcgttatccaaaagcgtgaagcccggggatacaacaaaccgagaggcggttgcggcacgaaaatattttgttgcatttgaaaattgtgatacactttttgaaacacttacacatagcaatcgcaagagcttgattgatttgccaaaccaaattattttgcaatcagataaaagaaagcaatattcgcaatttagaaaaaatctgattaaatcaggttttatcatggtgcgattttctgtatatgcgagaactgtcagaaataatgatgatgcaaaaaagtattcaaaaatagttaaaagtattttgcccccatcgggttcggtacgattgctgataataaccgatcgtcagtatgactctatggaaattttgataggagaaaagtatgcagaggaaaactatcttgacaaaagagatatcattgaattataatatatttgtgtttgaattgtcaaaaccgcctacattctacaagatgtagtggttttggctctctgatgaatattgataaacttatacagagccttgaaaatcagcttgcgaactttagttttggctctctgatgaatattaaattaaaagaaacagcttgtggaattctgttctgcaagttgcttttttatatccaaaggggagatagagggacggcgttctttggtataatatagtggacagtttggaacatcgggcaaaaataaaattttttttgcaaattgcaatagcaagttaaaacagttttttgtggatgaaattgcaaccacaggcacaaagcatatgcacattttcatttactcaaaatcgccgattcgcctttcaacattgaagaacagattccctgttgcgcatattgacaaggctaacggcagtgtaacggaaaatcgtgactatctccgcaaggagggcaagtggcagggttctgataaggaacagacgaatcttattgatacctttgaagaggttagtgatgttccaaagcctgttgatgaaaattctcacgatatgtccgctctgattgaagaaatcgaaaacggacttgatacctacgaaattatcaagctccatccaaaatatgcctttaggataaaagagattgacacactcaggcaaacagtgcttcaacttttatgctcatgttgataaaacaagcaaactgaacatttcacgcactcttgatacaaagctgaaaattgatttgtaattccgtgaataaattttcatttttcggaagatttactgtatttttagaacggattttgcggtaaaaaag

SEQ ID NO: 720 - DNA, 14560 bp, synthetic construct
  misc_feature 1..14560: note = Synthetic
  source 1..14560: mol_type = other DNA
ggtgctgaacgcttcattccttgtctcactcatatcaaccggcccatgcttggcgcaggatgccgtcacgctcgtgcgcaagcttcttcccgggcaggaactgagctacgccttccatcgcgatctcaaggtctcccagtcgccgagcggcgcggctgaaggcgatcaacccgccgccgccgattcctcgatcgttcaatccggaaccatcacgctcaccatcgccgccgtccgcgacgatggcgtcgccgacgttcgcatcaagttctcagacctcaagctcaccgcagacacccccgacggcacgcagcagttcgactccgccgccaccgcccaacccgctgacgaagcaccagaacccggagcagacggggcggcgagcgaaccctcgcttctctccgcgctcggcaacgccctcgcctccgcgcccatgtcctgctccatcgcgccggacggaacggtccgcggcctgaacggctacgagtccgtcatcgccgtcctgggcaaggcgccggcggaggaacgctggctctccggcatgttcatgcccgatgcgctcatcctcgccatcgagcagctcgttgcggtcgaaggcgccacgggaccgcgcaaacccggcgacggctggcagaccacgcagcgcacaggccttggctcggccggcgctctcgaagtcaccaccgattggcgcctggactccatcgagaacggcatcgcgaagatcgtcggtgaagaatcgctcgacctgctcgtgccgcagcaggccgatcagtcctcgccccgcgtgcaactcggcgaatcgtccggctcctcggagattgcctggagcgtcgcggacggcgcgctgatctcgctccgccaggaacagaaagccgcgaccacgtggtcgctgggcgaactgtccgtcgaacaacaacaggtcacgacgttccgtctcgagcgcaagccctgatacggctcactcggctcgatccgcggcattgctcccgcgcgcccgccagatgtatctctccggccgcaggcggatccaccccgctgcgcccatcaccagcgccacgatagtctccgccgacgtcacgatcagcgtgatcagcacaatctcttccttgggcatccccagcagcagcgccgtccccgcgactccgccttcacgtatgcccagcgtccccgccggcgccagcacgctgagcaggaaataggtcgtcgagaacagcactgccttgtccggcgcgagcgccacgttcgcaatcgcgcctgccgcaatgtaccgcgctgtcagcaacccgatgtccgccacgcgcagcaccgcctgctgaatcaccggcgccggatgccgcacgatccggtccgcccccagactcagcgtgtgcagcatccgccacgctccgccgcgctgcgccgcccgtccgcacaccacggccgcgatcgagagcagcaccgccccgcccgcggccgtcagccaccacagaacgtcgatccgcccgcgccacagccccgcgacgcccagcggaatcagcacgctcagcccaagcgcgctcatcgccgcgaaccacgccagcatgtccttcaggcagactccgtcccgcctgtgatgaatcgccacgcgcaccagcaggctcagcttgaacggaagaatcgaaatgaacgtggcgatggcgctcgtcgccaccacgtccatcgcatggagcctcttcagcggcaggagcaccgcccagaagttcaagccgttcagcacgatcgagagcgcggtcagaagaagcagcgccgcgatcagtcccgcgggcgcctcgcgcagcgccgccaggctcgcccggttcgccggcgagaacgccatggaaatcgcccacgcaaagagcgcgatccctgcagccagaccgaccacctgcaccagcaccttccagatcgaccagcgccgcggcgacgtcggcggagccaccgcatccagcagcggcccgccgggcgcgcgaaggcctctttcccgctctggcgtcggcatgtcgccgatcctaccggccggccggatggcggggcgcagtgccgcggctaccctcatggcatcgtgcctcacgcccgcgcagccatcatctcgaccggcgatgagcttctcctcggccagacgctcaataccaactcgcgctggctcgccgatcgcctcaccagcctcggtatctccgtcaccgagcatctcaccctcggcgacgaccaggaagctctcgcctccgccctgcagcgcctttgccggtcatcgcagctcgtcatcatcaccgggggcctcggacccaccgaggacgatctcacccgccccgcgctggcaaatgtgctcgacgaggaactcatcgaggatcccgtcgcgctcgcgcacatcgaagcgtggatgaaatcggcgggtcgtcccatgctccccgcccagcgcacgcaggccctccgccccccttccgcgcacatgctccccaactccgccggcaccgccccaggcctcgccgcgcgccacaaggccaccggctgccacatcttctgcctgcccggccctcccaacgaaatgcagcccatgttcgagacgagcgtcgtgcccaagctgcgcgcgctcgccgactcgggcaaggatggagtcagcggccacgtcatcctcactcgcgccatccacacggtcggcatcgccgaagccgacctcgcggccaggctcggtccactcatgcatcgacgcaccagccccctcgtcggcaccacggcatcgaggggaatcgtctcatgccgcatccgcgccgaaggcccggcggacatcgcccgacggcaactggccgagaccgaggcccaggtgcgcgcggccgcgggcgatttcgttttcggccaggatcaggactctcttgccggcgtcgtactggaactgctcaagcagcggaacgatcggcttgtcgtggccgagtcctgcacgggcggcggcttggccgcactgctcacggaggtgccgggggcttccgccgtctttctcggcggatggatcacctacgccaacgagatgaagatgcatgaactcgccgtgacgcgtgagattctggatcgtcacggcgcggtgagcacgcaatgcgcacaggcgatggcacaaggagcgcttcgcgccgctcgtgatgtcgcacgcccgcccggacagctccatgccctcgccgtcacgggcatcgcaggtccggacggcggctcggacgccaagccggtggggaccgtcttcatcgcccgcgccacggccgatcccggcgcgccgatggagtctgccgagatcgaagtccggcgcttcctcttccgcggggggcgcgaggccgtccgcgagcgctccgccaggatggcgctggcgatgctgaggttgaaactggcgggactgcgcaccgagcgactgctctgggaaatctgatcgcgcacaaaaacccggcggagtcggttcccgacgccgccggggatggcggggctgcggcatgtatcagtcggcgatcatgtcgtactcattccacacgtagccgagattgacgatcttgatcgtgaaccggcccgtccacttcggcgtccacgacgcgatgcagtagtcggaagcatccgtgtccgaggcgatgaggttcccgttctcgtcgtacacatacaggtccaggtcggtcgtcccgtcgccgcgaacgacaacggccgcggcctcgtcgccgtagaaccgaaactcccagacgtccgtcgtccgcgcacgcacgacttcgtcccgcaccacgatcatgccgccgaccgcggcgccgatcgtcgggtccacgaccgatgatgcggccagcggaacagccgaacccgcgatcatcatcgcagcgatggtcttcgagtagatatgcatgacatttctcccatgccccggcctgagaacggcgctggtgaaacggggcgtgtgccggcgccggattcgcgtcggatcgtgcggacgcaccggcgggccggttcggacccgctgtcgtgccgccgtttcctcggcgttccggaagaagagagacgcgaggccggctacccggcgcgcggatcggaaatcccgctgacaattccccccaccgcggcctgccaccagggagcgcgattgagctgcgcgcccgccgcttccgccaccggtttgtccggcttgatcgcctccacgttcaggctgatcggcttgcccttgaacttcagcgtcgtggtgtccttgaacagcccgaactccggcacgcgccgcaccgacgtgaacccggcactctcgagaaactgcttgaaaatcgcgaaatccagcccgacgaaatggcagtcgtgcggatccgtctgcccgccgtacatcatccgctgcaccgcgaaccgttccaccaccgtcagcttcgggtccaggaacagccggcacagcacctcgaggtcaggcacacccgcgcgcagccgcccgccgggcctcagcacgcgccgcgcctccgccagcgcccgcggcaactgctcgacgtacccgaggtgctcgaacacgtgcgacgcgtagatttcttccacgctgtcgttcgcgaagcgccgcatgtccatgcagctccctacgaagtccacgcccggccccgcgttcacgtccatgatcttccagccagcgcgccgctcccacccgccgatgtgcagccgcagcggctcttcctgccccggtgcgccccccgaagttgttcccggtgactgtggcatcccgcgcgaccgttctccgtccatattcccctgtcagagcgccaggcgcgcaccgcgctcgatacgcgccggcagcttcgatcgcggcagatcctccgcgtacatcgccgtcagcgggctgatctcgatcgtgcagtccggcgcgccgtcggctcggcgcggcaccgcgacccccgcagccgcgagccaccgcgccgcccgctcggtctgaagcgctgcgcacgtcgccggcgaatcggcgccatcggcgttcttgatcggcgcgaactcctccacccggtccgtttccatcacgatcgaagcgcggcacagcgggatcgcgtcgaacacgaacgtctccagcttcacggcgttcgccgccgcgggttcgaccctctttccgctctccagatcaatgtacggcaccttcttctccgcgcgatggtacggcagcgcgaagctttccccgccggcgccgccctcgttcagccgccgcacgaaacccgtccccagcacgtgcaccgcgatcgaccccgccttgaaccgcagacgcccgtccggaccacgctgccccgccagctcccgcggcaggtccgagtactccaccaccagcgtccgcccgccggaccgcgcgaacacccccacacgctcctccgcgttcgtcttctccaccatcttcgacgacatctctcccgaggagtcctccgcgtgcgcgtgcagcccgatgaacaccggatcgatcacccgcgccagcggattgtcgatctgcacgtacgaaatgtgctcgatgccgcgttcgctcatgtcgtccagcgctccggactgatgcagcgcgcgcagcgacccgccgtgcccgtccggattcgtcgccacgacccccggctgatcgagaaggattctcccgctcgccatgtcgaacgacggcatcaccccctgcgcaaagaacatcacatcgcgctccgccatgccgaagaagcggttcgccttgaaaaacgagaccgtcgcctcgtgattgatggggctggtcatcacgtaccagggaatgctccgccccgagggcagccaccgccgctgcgccgcgagaatccaatccgccaggcaggcgaacagaggtttgcccgtcaccggcccgcccggaaacgtccccttcggcccgtcatgacccaggcgcgtgccctgccctcccgccaccgtgaacgccgcgaccttcccagcgccgatcaactcctcgccgagcttccgaaatcgcgcccgatcccacgcgcggtttctgtccgccgggtcgcgcgggtagtagggcgccggctccagcgacgccgtatccacctccagccccggcttccccttgacgtaccttgcaaccagctcggggatcgaagccagatcaagcgcggcgatctgctcgagcagcgcccgccgctcgcgctcgctcagcgtgtcatggaaccgcagcaggtgcccctgtccgcattcttccagccgcacccgcagctctcccgcgctcgcttcccgtgccggcatgcccgatcgaacctccccctcacacgcccggcgcctgcggcgccgtccacgtgtccccgagatgccgcacgatcatcccgctctcgacgtagatcacctgctccgccacgttcgtgcagtgatcggccatgcgggccagcgccgccgcgatcgtgttgagcgcgaaggcgaaatccacgctgtgcttccccttgacgagatcctcctccacgtcgcgcagcaccgcccgattgaaggcttccgtcgcgtcatcgctcttgaggagcacctgcgccgcggatgcatccatgttcgccagcgccttgttcgcctggtgcatgatcccgatcacgctgttggccatcacccggaacttcggcggcaccggcgtcttcagcgcgatcagcgtctccacccggtgcgcaatgtccgccgccaggtcgccgatccgctcgaactcgttgttcaccttcacgatcgtgagcaccatccggacctggttctcatccatcgaacagccgcgccgggccgcgtccgtcagcagcgcgacggcgtccttctcgatctgcacgtccactcgatcgatcgtctcatccatggcgatgaccgatcgggctttcgcggcgtcacgctcgaacaccgcttccaccaccgtctcgatcgccccctccacacgcttcccctgctcgaccagcgcccgccgaagcgcgtcgatgcgctgaggaaaggattgatccgatggcgcgttcaccggcgggtcgcctccatatgccgcaatcaccatatcacgcctcacgctccccttgcgcccgcccgcgaacacggcccgccgcgatatcatcaccgcgccgctccccggcggcgacccacccttgcaccaacgcggaacactgctcatggccttccagatcgcgactgtcgccgctcgccaggttctcgactcccgcggcaatcccaccgtcgaagtcgatgtgtccctcgaaggcggagcgctcggacgcgcagccgttccttccggtgcatccaccggcgagcatgaagccgtcgaactccgcgacggcgtgaagtcgcgctacctgggaaagtctgtccagaaggccgtcaccaatgtgaccgacgtcatcgccccggagatcgagggcctcgacgcccgcgaccaggaaggcatcgacgccgtcatgctccagctcgacggcacccccaacaagtccaaactgggcgccaacgccatcctcggagtctcgctcgccgtcgccaaagccgccgccgaacagatgggcctgcccctcttccgctatctcggcggcgtcggcgccaaggtgctgcccgcgcccatgttcaacatcctcaacggcggcaagcacgccgacaacaccgtggacttccaggaattcatggtgcagccctggggcttcgacgacttccacgaagcactccgcgccggcgtcgaaatctaccacgctctcaaaggcgtcctgcacgaccggcatctctcgaccgccgtcggcgatgagggcgggttcgctcccaacctcaagagcaacgaagaggcgctccagatcatcgaaaccgccgtgaagaaggccggatactcctggggcgaacagatcttcgtcgcgctcgatcccgccacgagcgaactctggaacgaggcgcagaaagccggcaagtccggctacatgatgttcaagtccacgaaggaagtcctctcctcggatgacatgatcgccctctggtccgactggtgcgccaagtaccccatccgctccatcgaggacggcctcgccgagaacgattggaccggctggaagaagctcaccgaccgcctcggcgccaaggtgcagctcgtcggcgacgacctgttcgtcaccaaccccaagttcctccgtcgcggcctcgaggaaggctgcgcaaacgccatcctcgtgaaggtcaaccagatcggcaccctcagcgaaaccctcgacgccgtgggcctcgccatgcgcaaccgctacgcggccgtcctctcccaccgttccggcgagaccgaggactccaccatcgccgacatcgccgtcgccaccaactgcggccagatcaagaccggcgccccctgccgctccgaccgcaacgccaagtacaaccagctcctccgcatcgccgaagagcttggcccctccggggtctacggcccatcaacccgctgaccccccccgcagcccccagcatcccccgtccgaaatccttcaaaacgccgaaaaccggccaaattcagtccaaccctgcagaaaagcagcaaccatgccttttcgcatggcgtatcctgtggcattcgtaaagtgggtgactgagtttgggatgggagagagttttgggacggagggtggggagcgggggcaggcaagggctgggagagggtggtggctgggagagggtgggggtgggagtgggatgggggtcggcgacggaaggtccccggccgcgcctggaggcggccgaggccttctggccgcggaatgtgagggggggccatgaggaggtggtccctcccacctgatcgcccgagccggcttgcgccggcacggacggtttcaagaacccggagagcaggatgcgtcgggtcgcccgtccgcgagttcccggagcagtgggagcgaagagccatgcagcgccgaaccgttccagaagcgatcttccggctgggtcagctcagctacaagaagaacatcacgaacatcgagctgatccgcaggatcacgcacgtcgcggcggacacgatcggcacggatgtcaccggtcttgcggtgtacgagcacgggatcgagaacgcggccaatgcgtgctgcatcgtcggcccgtggacgaaggacgagagcgcgaagtttctggacatgacgcggtgggcgatggaggaccgcgtgctggcggcgcggctggtgcatctggagcgcaaccggatgtacaagcgttcggagatcgtgtcggaagaagagttccggacgagccggatgtacaacgagtttcacaagccgctcggcctgggtgatcaggccgtcggggtgtaccggcgcgtcgacggcgccgagctggtgttctgcatcaactcgatggccgcgcacgggccgatcccgcgggaggcgttcaagcgggcggcggagctcgggatttttctgggtcactgctgggcgatggggtggcggcgcgagccggcgtggatggcgaacctcaagccgcagacgcggcaggtgctcgagggcgtgctggcgggctgcgatgacgagcagatcgcggagcggacggggctgacgtatcactcggtacgggcgcacctgaagcggctgttcagagagtcacacgtgcggagccgtctgcacctgatgcaggtgtgccgcgagacccgcggcgtgccgctgattcagacgaacaatccgttcacgggtcacgattcgacgctgcacgctccggtgtctgcgcttccccgggccgcgagcgggcaggcgccggcgggagcgggcgcggcgccgatggcaccggcggcgccggcggcgggtcgcgcaggctcgccgacgcaatggagcatcggggacccgagcgacacggcgttcgggctgccgctggcgatgagcaactatgggggtgggggtgggggtggcgtcgatgactcgcacgcgcgacgctcgtgcatgccccccctaaaaaaaaaacgcccactggtgggcgttagccggggccttcggcctgcggctgcgagtgatctcttaccttaccgtgataagcggaagagaccgctcaagtacacttcgtgaagtttaggttctgccgtgctcctgtcaagagggtcatcatgagcagcggttacgtcatgggcattgacatcggcgtggcatccatcggctggtccgtggtggagccgggaagcgaggaaaggcccgggaggatcgtgcgcctgggaacccatttgttcgagccgggcgttgacggcacgcagactgccatcgagcaaggcaaggacgaaccgaagggagctgcacgtcgcggcgcgcggcaggtccgacggcaactgtggcggcgggcgcaccgcaagcggaagcttcttttcgccctcatgaagcacggcatcatgccccatgccaccgtgccggatggggccgccatcgacgcatacatcaaggcactggattcgcgacttcgagctgcgtggtgcagggcgggcgatcatcaggcgcaccaaatcatgccgtacctcatccgctcggcgggagttcagcgcaagatcactttggaagagttcgggcgcgcgctgtaccaccttgcgcaacggcgggggttcctcagcaacagaaaggccaagaagaaaaaggacgaggacacgagccaagtcaaggcggagatcaacgagctacagagcctgatcgaccggcacgtgcccgccacgcttggggcgtaccttgccagtctgaatcccgacgagcagcgcctccgcgaccggtggacggcacgctcgatgtacctgcatgagttcgaggcactgtggaccgagcaatcgaggcatcacagagaactgacggatgaggcgaaagcggcgatccaccgggcgatcttccatcagaggccgctgaagagccaggctcacctgatcggtcgatgcagtctcgaaccggggaggaagcgggcgccgctggcgcaccgggagtttcagtactaccgtgtgcttcaaggggtgaatcacctgaccattgctcctccaggcgaagcggcgcgcaagctcgatgccgcgcagcgcaaggttctgaccgatgcactgctcgcgcagggcgacctgaccatcgcgaaggtgcgcacgctcctgaagctgcccaaggggaccgacatcgcgggagagcggggggaggaagagaagaagatcgtcggtcaccgtaccgacgcgaagctccgtgatgcgatcgggccgaggttcgatgcgatgagcgatcgcgagcgggaccagctcgtgctcgaccttcgctcgttccgcgagaccgagccgctgatcgggcggctgaagtcgcactgggggttgagcgacgagcaggcgcggaaggtggccgacgccgatcttgaagagggctacgcgagctacagtcttgccgcgatccggcgcctgataccgcatcttgagcgggggctgtcggtctcggaggcgcggaaggcggaatatcccgagtcattcagggccacgcaggtccacgatctgcttccgcccgtgacggacgtgatgggcgatctgcggaacccttcggtgatgcgggcgctgacggaagcccgcaaggtggtgaacgcgatcatccgccggtacggcaaacccgagaagatccacgtggagctggcgcgggatctgaagcatgggcgagatcggcgcgccgcgatcaccaagcagatccggcaacgcgagaagcagcatgcggacgccaagcatcggatccttgcggagatcaaaggctatgaaccgacgcgcatcgaccgggagaaagtgctcctggcggatgagtgcgactggaggtgtccgtacaccggcaagaagttcggcatgaaggagctgatcggggaacacccgcaggtggatgtcgagcacatctggccgttcagccgttcgttcgacaactctttcatgaacaagacgctgtgctggcacgacgagaatcgcagggtgaagcgcggcaggacgccgtacgaagcctattcggcgtcgccggagcgatatcaggagatcctggggcgggtgctcgccttcaagtcggacaggcggacggtcagcgagaagttccgccggttcacggcagaggccatcgacgaagatttcacgaaccgccacctttcggataccaggtacatcgcccgcgcggtctcggagtacctcggcgtgctctacggcgggcgaaccgatgccgatggaaaacagcggatcgtcgcgtgcagcgggggcctgacgtcgtggctgcgtcgagaatggggtctggatgcgctgctgagtccgacgggcgatgatgcggaggcggagaagaatcgcatcgaccaccggcaccacgccgtcgatgcgctggtggtggcgctgaccacgccgcgcacgcaggcgatgcttcaagcggccgcggcacggcaggagcaggaggggcgtttccgactcttcgggcggatcgaaccgctctggagcgcgtttccgcgggaagcgaaggcggcggtggaagcgatcgtggtctcgcatcgccagcagcgagccgtgagcgggaagctgcacgcggagagcaactacagcaagccgatccacggcggccaccgcatccgcaaggagctgcacaaactgacgcggaacgaggtgtcgcggatcgtggatccgaggtgccgcgcgctggtggaggcgcagttggagaagctgggcgtggatgatcctgccaaggcgttcagcctgcgggaaaactgcccggtgatcaagggacgcgacggcgtcgagcgacggctgaggcgcgtgcgattgttttcgacggcaagccccaccatcgtcggccaaaatgcaagaattcgatatgtcgagcctgactcaaatcaccattgtatcgtgtgggccaagcgaaccaaggagggagaagaagggccatgggagtttgagccggttcggctcctcgatgcttatgaccgagtttgccgcggcttgccggtcgtcaaccgggacgggggatccgatcggatcttcaagttctcagtttcgatcaatgagttcattgagatggacgatcccgacagcggcgggcggcaattgtaccggatcaagaagacatcattacgagaaatcggcgtgcaactgcatcatgatgctcgcacggtagacgaggttcgaaaagcgggagatttgaacaagtatcgcatcagcccgagtgccttgaagtcgcgcaacgcccggaaggtcttcgtgaaccacctcggcgaggtgtcgggtgccggggggtgagcgcgtcctggacttttcccggtcgcccgcgcagctttccatgcgccatgaccagctcctgatccgtcgcgaggacgagcccgaggtcagcgttcctctgtcggagatcggagttctcatcattgcgcaccggggcgtgacggtcagccacggcgtgcttgaggcgctgatgcggcacggcggcagcgtgctggtgtgcgaccggtcgtttctgccctcggggctgatgctgccgctggctgcgaacttcgagcagacgaagcggatgctggcgcaggcgggggcttcacgtccgctgcgcaagcggctgtggcagcagatcgtgcgggccaagatccgggcgcaggcggcgacgctgcggctgcaccgtggggatgatcacggactttccgcgcttgcggccgcggtgaggtcgggcgacccggcaaacgtcgaggggcgggcggcgcagcgatactggcgtgcccttttcgacgacccggactttcgccggagattcgatgcgccggaccagaacgcgctgctcaactacggctatgcggtcgtccgcgcggcgtgcgggcgtgcgctgtgcgctgcagggctgcatccgtcgctgggcatccaccaccgggacagggggaacccctggtgtctcgccgacgacatcatggagccgtaccgagcgctggtcgatgatgaagtcgtggagatcgtcggcgaatcggggagcgatgcgccgctggattcgcggaccaaggcgcggatcatcggggtgctgcacgcccggctgatgcacgcgggggagtcccgcacggtgttcgagtggatagggcgcacggcgtcatcgctcgcgtgtgtgtacgtgcgcgaggcggagcgggttttctacccggagggattgtggcgtgaagcgccgggcggctgacctgtcggggtaccgcaacgtgtggctgttcgccatgttcgatctgccggttcagaccaaggaggagaagaaggagtacgtgcgcttccggacggcgctgctgagggaggggttcacgatgctgcagttttcggtgtatgctcgacattgcgccagcgaggagtacgcggacgcggcgcgggcggcggtccggaagcatctgccgccggagggacaggtgcggctggtgggggtaacggaccggcagttcgcgaagatggaggtgtacttcggtgaaaaccggcatcggacggaggatccgcccgcgcagctcatgcttttttagcgggctgttttgctgcaagtcccgtacgcacagtcacttgcgtacgggacagtgtacttgagcggcccttccggtcagaccacggcgcagctccgtcagtgaaaccgacggcgtagagtgtacttgagcggcccttccggtcagaccacggcgagttgttgacgcacggtgcccacgtgcacagtgtact

SEQ ID NO: 721 - DNA, 23261 bp, synthetic construct
  misc_feature 1..23261: note = Synthetic
  source 1..23261: mol_type = other DNA
tcgcccaccagcgcgaaggcgcggatccgcgccggaccgacattccccggaccggatggtggcgtttcgagtgtgtcgttcatagttccccctacctcatgacggggccgcgcgtccacgagccgccccggtggacctcggtggatcccggtgggctatgttacctttcgcgcgcggttaaacgcacgcaaaaacggctcttttagaaaaaaattgggccacggcgtacattacgcggccaactccgccgcgatgcgcgccgccgcctgggcagggttgggggcggcggtgatcggtcgcccgatgaccagatagtcggcgcccatatccagcgcctcgcgcggcgtcacgatgcgtttttgatcgtcgctggcggcccattccgggcgaatacccggcgtcaccaacgtgaagtcggaccccaggtgctggcgcagggccgtgacctcgcgcgccgagcagacgacgccgtcgagcccgcatgcctgggccaacgcggccagacgcaggacctgttcctcgggcgtggcctcgatgccgacggcgcgcaagtcgtccgcgcccaatgaggtgaggaccgtcaccgcgatcatcaggggacggttttcccccgcctcggcggcggcggcggcggcggcgcgcatcatcgccgccccacccccggcgtgaacattgacgatggtggggcgcatcgccagcgatgcgcgcaccgcgcccgccacggtgttgggaatatcatgatatttaagatcgacaaacaggccatcgtgcccaccgcgtacccgggacacgccctgagggccgtgggcggtgaaaaactctttaccgattttaatcccaccgacgcgtccgcgcaggccctgcgacagattttccgcacgttcgatgtcggtcgtgtccagggcgacgaaaacgcggtgctcgggcggcagagggtgggggggcatcgggcgttctccttgggctgtctcgttagggaggtgccgtcagggggaggcggcacacaagttataccgtcacaattccctcccggctagggtcaggtgttcccggtccagccgccgatacgccaacgccgccgccgccaaatcttccaacgccgcgcccaccgatttgaacagggtaatcgcctcccgcgccgtgcgcccggcatgttcgcctcggcacaacgcgcccagatcggcggcgatatcggcctcgccgatgaccttccgggcgagcggatcgcagatgtcgccggcctcgcggcacgccccttcgcgggtatcgacgtaaatctccgcccgcctcagcgccgcgtcgtccgcctcgcgcatggtggggcgaaagccgccgaccagatccaggtgctggcccgcgcgcaaccagtcgccatggataatcgggtcacgcgccagggtcgcggtggagacgatatcggcattatcaacgccctcacgcaagtcgcccacggcctcgacggcgtagccttgatccgccaagtggcgcgctacgtccgcggccttgtccggcgcacggccccaaatcaggatgcggcggatcgggcgcaccgcgctatgggcggcggccagatggggggcgaggcgccccgtgcccgcgatcaatagggtggcgctgtccgggcgggaaaggaagcgcgacgccagcgccgaggccgccgccgtgcgccgcgccgttagctcgccaccgtccatcaccgccagcggccgaccgctatcgccgtcgatcagcagataacttcccgccacggcgggaagaccacgcaacccattgtcgggaaagacgctgaccaccttgaccccgagcatcgccggttcatccgccggggcgcaagcaccgcctccgccttgcgccgtcaaccgccaagccggcatcaacaacaaggtggcgtcgtctcgcccggcgcgggcgagggtatggtggtggcgcaccggttgggtgcagcccccttcgaaataaagagcgatccgcgcgaccaggtcggagtaatccagcacccgggcgagatcggcggccgtaaaaagacgcatggcgtttccccaaaaggtcgttttcccaaaatgacggggaatcagtacgcggcgggcggcggcgcgacaacctcgccggttttggccatcgccgttgcaggcacgccgccggcggcgttctgccgcgctgaattttgcgccttgtcgagttcatttttcaagtagcgcgcctcgcgttcggcatcttccgcgcggtacatctgcgcccggcgcgcccggcgcgcacgcccaagagccaacatcatcacgccaacgcccaaaataaacccgatcaggaccccggcgaataccgctataaataaaggcacgtcaatacgataggcgaaaggccacaggtcgaaagacaccggggcgcggttgaaaatggcgaaaaccaccaccacgacaccgatcggaatcaaaacgatccaggaaataagctttttcaccacggcgatcctcttacacggcgatcctctataagaccctcggtcgcgccgccctccaccctaacggggcggcgtgcgccgcgcgaagggcgaccgcggatctgcgagacgacgcccccccacaccgccggtccacaacacatcgttggcccaccgcgttatttgacccaaggcgtaatttgacccaagacataaatttggcccaaggcataatttgacccaaggcgtggggaacgcaaaagcgcccgttcgctccccctctcttcgccaacgccttggcgcgtcatccaaggcgcgcccggatcagcgcggagcgtttaatttttcacgcaactgtttgccggttttaaaataaggcgtggacttggcatcgacatgaacggcctcgccggtacgggggtttcgccccgttcgcgcgccccgctcttttaccgaaaacgccccgaaaccccttaattcaacacgatcgccatcagccagcgcgttggtgatttcatcgaaaatagtggttacaatgcgttccacatcgcgctggtaaagatggggattcgcctcggccaattttgcgatcaattcagacttggtcatcagcaataaaccttttggttgcggatagcgcccagatcggcgcaccgatcagcccaatgcgatacgatgcgcaaacctacccacgaccagggtgccaaagcgcgagcacgccgtcaagtctaacccgttcagaaaacagtgtttttcctatcatccccgtaagctgggaaaaccaccccccgatgggaggcggggcggagacatcgacaaccggaagttttgcgtcgaggccgcgctgcgtatgcagccagcgcagcgcctccggttcagcgccgatctcgtcgatcaggccggcttttagagcctgacgtccggtaaacacccgaccgtcggcaaccacgccgatctgcgtgggcgtcatatgacggcgctcggccaccaaatcgacgaacatggcgtaaaggtccatgacgacatcgcgattagccttgcgcgctgcggggtcgagaggttcggtaaaatttggctgcgccttaagcggcgaactcttgatggtgatcggcgtaattccgatcttacccaaaagcccggagatctcggccgactgcaaaaccacgccgatcgaaccggtaatcgaaccggcgcgggcgaaaattctgtcggcggcgatcgccgccatgtacgccgccgaagttgccgtcgatcccataaccaccaccaccggcttcttttcggcgatcccacgcaatccataaaagaggttttctccaccgaccaccgtgccgccgggactgtctatacgcacgatgacggcttgcgttttagtgtcatcggccaacttgcgcaggcgggtctccaggatggtatcttcgtggatgacgccgtcgatatggaggcgtgcgatatgcgcccggcctcgcagagcatcccgcgcatggacgccaaaaaccatgaccgcgataacggccaaggccgcgatcgccaccgcgcgccatagggtcaagtagcgctttaggcgacgatgatggataattttatcagcctcgaacgccatgtccggtcacactcctctgggggcccggtcacatttttctgcaccgccaccatggaccgcctccttgtcatcgtcaagaatttgacaccatcgcccgccacgcacggcgaaccggacggtatcacaagcatggccgccgcgacgcaatcttgaggatgaatttgaacgtgaaaaagaccgccaccgagagcccggggcggtctttaaccggttcatcatcgcaccatcccccagggggggaaagaaaggacaacccttaggatttgtctccctcgccgtcgtccttggccgcggcttcttccgcggcggccttcctctcttgcagcgccgcgcccaggatatcgcccaacgacgcccccgaatcggacgatccgaagtcggcgagggcctgcttttcatcggccacttcaagcgccttgaccgacagcgtcaaacgccgcgaagcgctatcgatctgggtgatcttggcgtccaccttctcacccgtagcgaaacgatccgggcgttgctctgagcggtcgcgcgacaattcggccttgcggatgaagcccggcataccgtcaacattgacctcgataccgttatcgacaatcttggttaccgtgcaggtcacgatggcgcctcgcttcaaggacgacaacgtgccctcgaagggatcttcggtcagctgtttaatgccgagggagatgcgttctttttccacatcgacgtcaagcactttggctttgacgacatcgcccttgttgtattcggcgatcgcctcttcacccggtttgtcccaggacaagtcggacagatgcgccataccgtcgatatcgccttgcagaccgataaacaggccgaactcggtgatgttcttgatttcgccctcgaccacggaaccgatcggggtttcggccaagaaggcatcccacggattgttgccgcactgcttgagacccagcgagatccgccgcttctcggaatcggtgtcgagcaccatgacttcgacttcctggctggtggagacgattttgccgggatggatgtttttcttggtccagctcatttcggaaacgtgcaccaggccctcgacgcccggctccaactcgacgaatgcgccgtagtcggtgatgtttgtgacacgaccggtgaatttggcgccaaccggatatttcgccgcgatgccgtcccatggatcggattcgagctgcttcatacccaaggagatgcgttgggtttcggagttgaagcggatcacctggaccttgacggtctggccgacctgcaacgcctcgctcggatggttgatacgccgccaggcgatgtcggtgacgtgcaacagaccatcgacgccgcccagatcgacgaatgcgccgtaatcggtaatgttcttaactacgccttcgaggatatcgccttccttcaagccggaaatcaattcggcgcgggcttcggcgcgggtttcttcgagaacggcgcggcgcgaaaccacgatgttgttgcgcgcgcgatccattttcaaaatctgaaacggttgcggcgtgcccatcagcggggcgatatcgcgcaccgggcggatatcgacctgcgagccgggcaggaacgccacggcgccctgcaaatcgacgataaagccgcccttgacgcgtccgaaaatcacaccgttgacccgttcggtcgcctcgaaggacttctccaacagcgtccaggcttcctcgcggcgcgctttttcgcgcgacaggcggatcatgccgtcgcgatcttcgaagcgctcgatgaagacatcgacgacatcgccggcggacagatcgccttccttgccctgaccgaattccttcagggggacgcggccttcggatttgaggccgacgtcaatcacggcgacgtcgccatcgacgcgaatgatggtgccactgagcaccttgccttcaaaacgatcgtcttcgccgagggattcggcgagaagctcttcaaaattttcgtcggtcatcggggcgtctatcgtggacgcggcaaaattggtcatgttaaagcatttccttaaggtttttcactgtccttgccagccggttgtgtccggcggtctcgcagctttgatcacaaatccccggtgcgccgtacggtggcgtccgcggggggagaaagacggtgcgaggcctgatcagggccgctcaccgacatttcgggatttgataaaatcgaccgccgtggcgaaaacgcgatcggcgtccatcgcgctggtgtcgatcaccaaagcatcgggcgccgcaaccaggggcgagacggcacgggccttatcgcgcgcgtcgcgttcttccaaatcctcaagaacgcgcgcatatatagcgctaagaccgcgatcaagcaactctttatagcgccgttttgcgcgaatttccgccgatgccgtgacgaaaagtttgatttcggcatcgggacagaccgtggtcgcgatgtcacggccatccaaaatcgcccccttggccggggatgggggttggtgggcgaaggtgcgttgaaaatccaacaacgcggcgcgaaccggcgcaatcgcggcgactttcgacgccgcctgcgccgccgcgtcggaacgcaatgccgggttcgacagttcatcggggcgcaacgcccgcgccgcgcgcgccgcgccttcttcatcgtcgagatcgccgtccgccgcaacgactttcatccccaccgcccgatacaaaagaccggtgtccaaaagggcgaagccgtaagcctcggcgaggcggcgcgccagcgttcccttgcccgccgccgccgggccgtcaatcgcgataatcataatcgtcctcccttccgcccgacccctttcatggattatgcccccacgatatccgcgcccaagctgttcataagcgcacaaaatccggggaaactggtttcgatcggcgtcccgtcgtcgatccgcaccggatcgtcgcaggccatgcccaacaccaggaacgccatcgcgatccgatgatccaggcgcgcctcgatattgccgccgccggccacccgtccgccgccggagagcacggcggcgccatgcacgcacagggtttcggcgccctcgtcacaggccacgccgcaagccttcaaaccttccgccatggcgctcaggcggtcgctttccttgacccgcaactcgcccaggccttccatcagcgtgtcgcccgcggcgaaggccgcggcgaccgccaggatcggatactcgtcgatcatcgccggggcgcgttcggcgggcaccgtcacccccttcaacatgcttgagcgcaccgaaatatcgccgaccggctcccccgccacgtcgcgtcggttggtcacctcgatgtccgcgcccatctcgaacagggtctcgacgataccggtgcgcaaaggattcaagccgacgccacggacgataacgtgagaacccggcacgatcaacgccgccacaatcacaaaggccgccgacgaaatatccccggcgaccccgatcacgcagccttccagttcgggctggccggttagggcgatttcgcgcaggcccaaggcgtcgtcgcgaaccgtgacctcggcgccgaaatggcgcagcatcaattcgctgtggtcgcgcgtcgggcgcggctcgacgacctgggtgacccccggcgtattcaaccccgccagcaaaatcgccgacttgacctgagccgaggccatcggcaaacggtaggtaatggccagcgggtcccgcgcgccgtgctgcgccagcggcaggcgcgtgccgtcgcgcgacatgaaacgcgccccgatcattgtcaggggggttgtcacccgacccatcggacgaccgcgcaaagaggcgtcgccggtgaagacggcgtgcaggtcgcagctcgccagagcgcccatcaacaatcgacaggccgtacccgaattgcccatgtcgagaacatcgcccggctccgtgaaacctccgactccaacgccgtaaacacgccagacgccatcgtcgcgccgggtgattcgcgcgccgagagcgctcaacgcggcggccgtgcgcaaaacgtcttcgccttcaagcaatccctcaatccgggtttcgccgagcgccatggcccccaacatcaaggcgcgatgggagatggatttatcccccggaacgacgacttcaccgtgtaatcggtgggttccacattcggttatcgatcgcgacatcagcgcagacacgtcaagctccttatggtcaacgtcaagagagccgccgtttttgcggggcgcgttcgcctttaaataaaggcggctcttgaacgcgcaacggggatgcattatgtgcaccggcgctctgtaccacgatcggcgcgcttgtggtaggggcgtcttgtatatcgcatatcgaggccttcgatcatcgccgcgcgaagacgttttttcgccgacagcgcattttgcttttgacagagcgccccgatcatggaaattagaaaactcttttatgaccggtacgcgtgcccaaccgatctttatggaggccactcaagtggacacatcagcattaggcgtaaaacacacctgttccaagtgtgatgcgcgtttttttgatttaaacaaaacacccgcggtttgcccaaaatgcgaaaccacggttgaaaccgaaaaaaaacctcgggtgcgccgcgcggcgaaggaaacgcccgcaccgcaaccatccccgaaaaaaaccgtgaaaagcactcttcccaatacggatttggatgacgacgataatgtcgatatcggcgacgatgacgatgtcgatgtcgatatcgacgacgatatcgatctggacgacgacgacgacgacgacgacgatttgatggaggacgcctccgatttggggggagacgaggatgacgatatgtccggaatcatcgaacacatcgacgacgacaacgaaaaataagaggaccccacttccgccatggcgcccctccgtttttggggacgcggcgcgacagtcgcccaaagcgcggaagatcatgcgccgttcccaccgcgcggagaaaataaaaaaataaaattggcgtttttccccttgccatccatcgggaccgccggtaccttccgccaccgcagacgcccgtcgtcaaaggcgtccctgtggggccgtagctcagttgggagagcgctacaatggcattgtagaggtcaggggttcgattcccctcggctccaccatcgaaaccctctgggaaaccagggggtttcgtccgtttaggcccttctcttcatcacgcacacttcaatgacccgctgcgccaaaaccgcgcccgaagtcgttaagcgtctcaatcaccctattctgatagtcgatgacctgcccccaaaaaactgtgtcaccgtgagcgtggaagagagttctccgttaaacttcacctacggaggacgatatgaagaagcgtttcacagaagagcggaacatcaacatcctgaaggaacaggaagcgggtttttccgtgaaggagatcacccgccgccacgagttcgcgtcgcgtcaccagggatatgcccctggtgacgcgacaagcaccaacaaagggcatttacagtgcggcaaaactattttcgtgaatgagccgtcttggggagcgagtcagtcccatcaagaatgattggagaggagcaaccacaccacctcccgttacgttacgaaaggaggtgatttaaacgggataaatcgtggccccgattcgccacaccgcaaagattcaaggggcatgaacacactgaaatattagaaaaacttgtgaatcaggtataccacaccataacgtaccaaaataccaaaaggaaagaggccggattgacccgacccctcatttttcgtcataaaaactttattacgactgttgtcccttaccgatcaggatctgctacgttcccgataatctcaattgttaattgaccgccaagcaattgtcaacaaccatgaggaatatttattatataagcgtacgataggggagaatatgaagaacaacggcaaagggttccgatatcggttggggattgacgttggcgttgcgtctctcggcatcgcgattcttgctcttgaagacgacgccaacccatcgaccggggaacccggctatgacattttgggcggcgccgtgcgcacgtatccactgcccatcggtgcggaagaacgccggggccaacgcggcgcgcggcgcaacacggagcgcctgacgcgacgcctcgatcgcttgtccgaactgctgagcggtcacggcgtcggctacccacgcaagcaagcgaccaaggacttactcgacctctcaccaataaagctccgagccaaggcgtcgcgggaaaaggttgaactgccccatctcgcacgcgcgctgttgcacatggcgcgccatcgcggcagcagcgccatccgtgaagcggatatcgaacaagacgacaaagaagcccggcagaccgcggaaggcatcaaatgcctacgccgggaaatggagaatctggactttacgacttacggccagtatctgcgctggcgggaaaagcagaataaacccatccgcatcgaccaaacgaaaatggccgccagcggggatggctacgctttttatcccagccgcgaaatgttacgcgaggaattttcaatcatctggggcaaacaggctgagtttcacccacaaaccttgaccgatgcactcagggcgggggtcgaaaaagaactttttttccagcgctccatcaccccgcccccacccggtgactgtcctttttttcccaatgaaaaacggctgcccaaaacgtcccgcctgtttcagacccgccgcatctacgaagcggtcaatcatcttcggttttacgacaagcaaggccgcctcctaccgtacacacttgagcagcgggatcgtatcgtcgcgcgtttgatggcgggcgaggacctaagtatagccgaaatcaaaaaggaaattggcctgtcgagaaccgataaagcccgtgtggaagaaagcgctgccgggccgaaaccaatcaaaggttacccatttgaccgagtattgtgtgacgaggtcattctcggaaagcgttggacgcagttgtcttcggacaaacaggatgaaatcctaaacatcttggcgacggagcatgatgacagtctcgccatcgaagatatacggcacgcacttggcggtgacgcggggactgcgttcaagatcgtccaagcgcccctgccgtctggctacggcaacatgggtgcgcgggcaacggaaatgattcttcaagaactcaaaaaagacgtagtgcctgcccgcgtggctcaggaccgggccgggcttgtgcatgccacgtccccggacggcgtcgtttacgaacgtttgccgtattacggtgaaatcctggtcggccacaccgtaaaacccatgtgggaatcgcgctatagacgtgagaccgacacgccgccgaataccgacgccaatgagcaacgtttcggacgtatccccaaccccgtcgtgcatacggcgcttaatcaaatccgcaaggtcgtcaacgccgttatcaaacgctacggccagccggaaaccatccacatcgaattggccagggaccttaacaaaagcgccgaggaacgggatgccatcaccaagcgcaatgaagacaaccgcaagaaaaacgacgcaatacgaaaagaattgaccgcactaaaggtccccacggaccgactgaacatccagaagtacaaactttgggacgaacaaaaaagcctatgcgtctacaccggaagaaccatcgagctgagcgatctttacggtggtgacgccgacgtggaccacatcctgccgcgctccaagaccttttccgacgccttgaacaacaaggtcgtctgttgccgcgccgccaacgcagataaagataaccgctcgccctacgaggcattcgccgacaatcccaattacaattggaacgccatcttgcgccgcatcccaaagggcaaggaatggcgttttaaggccgatgccatggacaggttcaaggacgaagaaggcttccgcgcccgctacggcacggacaattcctacatcgcccgtgtcgccgcccaatatttaagctgcctgtacggcgagccgtccaaggtcgtcgcggtcagcagccacatcgtcggcctgctgcgcgcgaagtgggggttgcaaaaaattcttggcggcaaggatgacggcaaaaaagcccgcgacgaccatcgccaccacttcatcgacgccctggtcgcggcctgcgcgacccggagcatggtgcaacgcatccagaccgaagccaagcgctgcgaacgcgagaaactcggcgcgttcgtcgaaaaaataacgccgcctttcggcgattccaaggcatttttcaacgccgcgcgggacgcggcgttgaaccgggtcaccgtgtcgcgcaaggccgatcacggcgccggcgggcaactgcacgaggatactttgctgggcattgtcggggatggtccggatgacaaaggccgctatatctgccgcaaacgcaaaaaattgaccgactatgcttctctagacgccctgaacaaggcgaaaattgaaaagaccttgcccaacctcgaagcaatcaccgtggccaagaaagacctcaaagcgctcaaggaatcgctcaaaaatctatccgcccaggctgttcaagagctagaagacgaacgtcaagccgccatagaggtcgggaaaaaaggcaaaaaaatcacggccaccgccatatatgcgcgggcggtcaggctgcacgaggccaaaggcggtaaagcaacgttcacccttttcgagcgccaaaaattggtcaatatccgccgcacccccgacaacaaccgaccttacggcggatacaaaagcgggcgcaaccaccgggtggatgtctacctggacgccaagggcaaggtgaaatggcagttgatttccatgctgcaagccaacgacaagggcttcgttcccgaagcaacccagcccgaccacgatctgttgtggtccgcgcacaaggaagacgtgcttgtgatggacaatcccgacaacctcgctgaacgcatccgcgtgacggtggcctggttcagcgagggaaagcttgtcgtctgccccatcaccgatgctcgggacgccaaaacacgcaagacgtggggggaaaaaggcttgtccttttatgcgcggcaccgcgcccaacgaatagtcacggatgcgctgggcgacattacgtggcgctttcccaccttgcccaatccgtaaagggggcctgatcatgagttggcgcatcatcgacatcactcaagacgggcgctacctccatgccgaacgcgaatggctggtcatccgtgaggagcaaacggaaatcgggcgcgtcccattgccggacatccaaagcgttctggttcacgcgggccacgccacctattcgcacggcttgctgttgaaactctcggcccatgatattccgttggtcatttgcaaccaccgccacgaaccggtgtccatcttagcccccctgtcgtcacatcatttgcatgcgggccgcgcccgtgcgcaggcggaaagccccctgcccgtgcgcaaacgcatgtggcgtgaattgatccgcgcgaaaatcgccgagcaggcccggaccctggcgccgttcgattccaccggcgaagagggcttgaaaaaaatgatccgccaggtccgctccggcgacccggacaacaccgaggcgcgcgccgcccgctactattggcggcggctatttggcaaggacttccagcgcgaccgcacacgccccggcctgaacggtcatttgaattacggctacaccatattgcgttcggccttggcccgggccgtcgccgcgtcggggctcgtgccttctttgggggttggacatatcaacatgcgcaacaatttcgcattggttgacgatttgatcgaacccttccgccccctggtggatcgtcttgtgtacgcacaccgccacacttgggaaggggacgtatccccagaggccaaaacgctgctcgccgggatgatggaacgaaccgtgcgcgcccaggatggagaaaccgacttgtttcgcatcatggccctacttgtcaacagtctggtccaccagttcgaagggcaggacacaaaactggagcttccggaaaaactggaatttatctcaaacccgtcgttgccgggactggacggatatggatagcacgatccaccatgttatcggcgtttaaaatcatgtggcttgtcgttgtgtttgatctcccggtcggcacgaaaaccgaacggcgccgtgcgtccggttttcgcaacatgctgattgacgaaggcttcatgatgaagcagttttctgtatacttgcgcccatgtcaaaaccgggccgccgccgaatctcttgcggatcgaatcggtaaatgctcaccgcccgagggcgacgtgtccgtcatgttttttacggacaagcaatacggattgacccgcaactatgccggtcgcgccgagctggaaccggagaaaaaaccggaccaattcacgcttttctaggttgaaaaattgtatttttttaaaagaaaactcaccctaacgcattgttttaaggtgagttttcacaatatggagtgtagcagatgctgatcggtaaggcagccgtaacatgatggacggcgaaacgtggcttggggcgagtgtagcagatgctgatcggtaaggcagccgtaacgcgatccgccaagccgccgatggcaagggcagtgtagcagatgctgatcggtaaggcagccgtaaccacgaactggggcacgccaccggacacgctagtgtagcagatgctgatcggtaaggcagccgtaacgcgcaaaaacttgggccataaaagtcccctagtgtagcagatgctgatcggtaaggcagccgtaacaggtcctcgtgataggcgcgatcctgccccagtgtagcagatgctgatcggtaaggcagccgtaacgcgaaaaaggcgttggactgggtgtctaacagtgtagcagatgctgatcggcacccaagccgccagcggatgaacacgatgtccttcgtgtccttacgcctatagagcttggtcggacggccacgcgccggcgatccgactcgataatggcgacgggcgcgcgggcgttgtgctttcagcgccgaaagcaccgttcatccaacgctccagggcccactggctcgacgcggcgacctgatttccggggtcaactttaagcaagtgaacctgagccttgccgccaaacggggcatgttcgacccggtagacgtgggtccacagttccccgcctgcgcgatgtaagatcacataaaggcgcatgtagcgcagatgtctgcggcgcggggcgcgcatcccttcgcataggcgcaccacaatatccccgtcgtggtgcaggggcgccacttcggcggggcggaattcttcacaaaaatcattaacggcggcacacataaaaaaacctcctgggccatggccgaggaggactgacggagaggctgaatatcccgtttgtttgccggttacagccgcatttcccttttacaaaggacaccaccttgcccgggaggcaggttggcgtgggtgtcagcccaactcttaatgctggaccgaggctatgtccttaaacttattttgtcaatggtgcgcaggcctctttcatggctggggtcgggtgcgcatgcgcttatagccaaaccaagaaaggatcgcccacgccgatatccagacggctccaccgacgggtgcggcgccgttgacgggcatcgcgccaagggtcgaaaaaaggtataacgagcccgaaaacaaaacgataccgagggtgaataggctgccggcgagggtgagaaggcgcgaggccggcgcgcgctccgccaacaccgccacgcccaccagcgccaaggcatgccacatatggtaattgacggcgagcatgaatatactccgcatcgcctcgtcgccggccaagtcatgccagccgtatgcgcccaatccaaccgccagggcgccgttcagccctccgaggaaaagccagggttttccgttcgtctttttttcgtcgcccattctaacggaccctactcgacctttaacgtaatcttgaagacttctcggcatctataggccatgcgcgtaaaaaccatcttaacagctttaagcccgtcggcgatgattttgctgggaggcttcgtgcttagtgcgcattcgggatgggttttccctcgattcgcgacgctgataacggccggaccgttcattctcgggggcgtaatcggcgtcgtggcgttatggttccgcgccccccgcatcattcttgcgtgtgcgttggtggtgctgacgcagatgattttgacacacttcacgccgcttccggcgcgtgcggaaaatcttggggcgggcgtcatttatccggccctaacgatcatctttcccgcggcgatgattattttttcgacccaagcgcgcgggcgcatattcacggttggggcgctatggcgaggcgcgctcgtcacgggggcgttaggcgtcgccatcggaatcgaaatcgaaatcggcgataccgcgggcttgcccattaaaaacgtcgaagcacttttgaacgccaaattcttaccgccctttttcgacgcctggaccgtcctcccccaaccggcgctcgtcgccttcgcgcttgccggggcgtggctgtgtgtgcgcgccgcgatgaaccgccatgtcgcggaggcggcgatgggcatcgccttgatcgccgccgtcggcgcgtttcaccaggtgggtcatccaccacgggaggatattctatggtcaagcgctctggccatcctcggcatcggccttatccaggacagtcacgccatggcgttcatcgacgagttgacggggctggcggggcggcgggcgctgacgatggacatgaacgccatgggcgggcgctacgcggcggcgatgctggacgtcgatcactttaaaaaattcaacgacacctacggccacgacaccggggatcaggtgctgaaaatggtcgcctcgaaaatggccgccgtcgggggcgggggccgagcttatcgctacggcggtgaagagttcactgtcttgttccccgcgtcacgcgccgccgacgcccgccgacatctggaggcggtgcgcacggcgatcgcggaaaccccatttcgtatccgagcacaaaaccgcccaaaaaagaaaccgggcgcgacgacaaaacaaaaaaagaaaaagagcgcggatcgcaatgtcacggttagcatctcgatcggccttgcacaccgcggcggcggcgcgcaaacgcctcaggacgtgctcaagcgggcggatacggcgctttatcgggcgaaaaaaaccgggcgcaatcgactgtgtgtataagctctcttcacattaccccccgccgcccctatatcagcaaccagacgttcgcagaaacgtcgtcaaacaggaaattggcgcaacaggtagggaggcgtgcgatgagcccgctcgaacaggcggatctgatccgcaatatcgtgaccttttggtttggcgatcccggcagtgacgatttcgccgccccgcgcaggcgatggttcgtcgccaatccgaccttcgacgatgaaattcgaaaccgcttttccgaagtgattgaacgcgcccggacgggcgcgctcgatgatatgtactgctgtccggaaggggcgttggcgttgatcttggttttggatcagtttccgcgcaacatccatcgcggcacgccgcaggccttcgccaccgacgccaaggcccgcgcgcttgccgcgcgcgccctggacgacggtttcgatcgcgccttgttgccgatgcagcgcctgttcatgtatctgcccttcgaacatagcgaggacatccaggaccagctgcgcgccgtcgccctgatcgacgccttgggcgcgggtgagcaggtcgattacgcacgtcgccatttggagattatcgaccgcttcgggcgttttccccaccgcaacgaaacgctgggacggcccagcaccccggaggaaagggcttttctgaaacaacccggatcgtctttttaacgcaattaacgcgttcgaaaattcatccggagcgccggtcaacccaggccgcaggctccccccatgcaaccgttcggcgcgccgcaaggggcgatgtcgggagcggcggatttaccgacgttaggggcgctcaggcctttttcgatatcgtgcgacccgcaggtcgggcagcttagggtcttggcgtcggcctgggtccggtagtcgtcgtaattgtcgaaggtgtcgctgtgctcatggcccttggcgcaaatcagcgtgtaggtaatcatgacggttctccgtttctttaaaattcaaccggttcgagcgaaggcttcaacgcggcaaatcgctggcgcccattagatattcgtcgatcgaccgcgcacactggcggccttcgcggatcgcccacaccaccaacgattggccgcggcgcatatcacccgccgcaaacaccttatcgaccgaagttttatagtcgtccgtattgcccgcgacgttgccccgagcatccttagcgacgccgagttgggcgatcatgccgtcgtgcgtcggatggacgaagcccatcgcaagcagaaccagatcgcattttacggcgaactccgaaccggggacttcgttcattttccactgcccgttttcatccatcgcccatgacacgcgcacgcattgagcctcggtgagtttaccgtccacgccggaaaacgccttggtggtgaccgcccactcgcgggtgcaaccttcttcgtgactggtcgaggtgcgcatcttgttgggccagtcgggccacgtcgtcatcttgtcttcgttttccggaggcttcggcatgatttcgatctgggtgacgccggcggcgccctggcggatcgaggtgccgacgcaatcggccccggtgtcgccgccgccgataaccagaacgtttttccccgtggcgagaattttggggacgtctatgggttccccggcaatgcgatagttttgctgggtcagaaagtccatcgcgaaatgaacgccgcccagatcgcgcccggtcacggaaagatcgcgcggcgcctccgaaccgccggtcagggcgatggcgtcaaagtcctcgagcaagcgggacgccggaatatggtagccgatatgcatgttggggcgaaactcgaccccttcggtctgcatctgcgacatccgccggtcgatcaatttcttgctcatcttgaaatcggggatcccgtagcgcaacaaaccgccgatacggggattcttttcgaacaccaccaccgaatggccggcgcgggccaattgttgggcgcaagcgaggccggatggaccgctgccgacgaccgcgacccttttgccggtatgcttcaaggggacctgaggcttgatccagcctttcgcccaggccttatcgacgatggcgcattcgatggtcttgatggtcaccgcctcggcggtaaagttcaaggtgcacgccgcctcgcacggggcggggcaaatgcgcccggtaaactcggggaaattattggtcgaatgcagaacctcgatcgcggcgcgccaatcgtcgcgatagaccagatcgttccaatcggggatgatattcatcaccgggcagccctgatggcaatacggaacgccgcaatccatgcagcgcccaccctgccgggacagttcctcgtccttcaagggaacataaaattcgccatagtgcgcgacgcgttccttgaccggcgcataagcgcggtcttggcggtcggtttctagaaatccggttggtttacccatcatttaaatcctcaatctccaaccgacgtactaacgccgtcgtgctcggcgttacgcgattgcgcctgcatttcgcgcaaggcgcggcggtattccaccggcatgaccttgacgaatttgggcaagaaccgatcccagttattaaggatggtcttggcccgcgtgctggcggtgtaatggtgatgtttttcgatcaacgttttcaagcgttgggcgtcgaagcgcgtcatatcatgctcgatgccgacacggccgtgggtttccaggtcgccgccctggtgggcgatttcctcaagggcgcggtcctcgtcctcgatcggttcgagatcgacctgggcgagattgcaatggcgttcaaaatcgccgtcttcatcgagcacgtaggcgatccccccggacatcccggcggcgaagttgcgcccggtgcgtccaagcacgacgacgataccgccggtcatgtactcgcaaccgtgatcgccgaccccttcgaccacggcgatggccccggaattacgcaccgcgaagcgttcccccgcgacgccgcgcagatagcattccccggtggtggcgccgtaaagaacggtgttgccggcgatcatgttttcttcgggcgtgatcgggctttcgtcggcggggcgaacaacgatacgcccgcccgacaggcccttgccgacataatcgttggcgtcgcccttcaggtcgatggtgacccccttggcgagccaggcgcccaggctctgcccggcggtgcccttggcgtcgatgacgatggtgtcgtcgtccaagcccgccgcaccataacgtttggcgatttcgcccgacaacatcgccccgatggtacggttgacgttaaggaacatcgcctcgatccgaaccggcttgcggtcgttcaacgccggggcggcctgggcgatcaaggcgttgtcgagcgccttgtccagaccgtgatcttgggtctgggtgttgtagcgggcgacctctgcgggcatgtcgggacgatgcagaattttcgaatagtccaggccgcgcgccttccagtggtcgatcgcgtcctgcatttgcagcacgtcgctgcgcccgatcatctcgtcgatggtggcgaagcccagttcggccatcagtacgcgaacctcctcggcgaggaaggtcatatagttgacgacatgagcaggctggccgggaaacaatttacgtagctgcgggttttgcgtggcgatgccgaccggacaggtgttgagatggcacttgcgcatcatcaaacagcccgccgcgatcagggccccggtggcgaaaccgaattcgtcggccccgagcaaggcccctatgacaacgtcgcgcgcggtgcgcaggccgccgtccacctgcaccgcgatgcgcccgcgcagccggttgagcaccagggtctgataggtctcggcgaggccgatttcccatggacttccggcgtgcaggatcgaggtgatcgggctcgccccggtgccgccgtcgaagcccgatatggtgacgtgatcggcgtgcgccttggcgaccccggcggcgaccgtgccgacgccgacctcggagaccaatttgaccgaaatacgcgccttcggattgacgttcttcagatcgtggatcagttgggcgagatcctcgatcgagtaaatatcgtgatggggcggcggcgagatcaggccgacgccgggcgtcgaatggcgcactcgggcgatccactcatcgactttgtgcccgggcaactgaccgccctcaccgggcttggcgccctgggccatcttgatttgaatgtcgtcggcgttgaccagatattcggtggtcacaccgaaccggcccgaggcgacctgcttgatcgccgagcgcatcgaatcgccgttttcaagggggatgaagcgtgaggcctcctcgccgccctccccggtgttcgacttgccgcccaggctgttcatggcgatcgccagggtggtgtgggcctcccacgagatcgagccgaacgacatcgcgccggtggcgaagcgcttgagaatcgcctctatgggctcgacccgatcgagagcgatcgaggcattgggagagttaaagcgaaacaggccgcgcaggttcttaaggacggagtcctgatcgttcacggcagcctcgaaacgccgataggtgtcccgatcgcccttgcgtacggcgtgctgcaaaagggatatcgtctcgggcgtccagacatgggcctcgccgcgctgacggaaggccagatcgccgccgacatccaagtgcttggcgtaaatcggcgcttggccgaaggcgtcgcgatggcgccgcgtggtttcctcggcgatctcggccaagccgacgccgccgatggcggatttggtattggtgaaataggtgttgataaaggcgtccgacaagccgacggcgtcgaaaatttgcgccccgcaataggactgataggtcgaaatccccatcttcgaaaacaccttgagcatccccttggaaaccgccttgatatagcgcttgtgcgcctcgcgctcgtcgatatcgtcttccaacgtgtgacgcagggaagagatggtgtcgaaggcgaggtaggggttgatcgcctcggcgccgtatcccgcgagcaggcaaaaatcgtgcacgcaacgcgcctcgccggtttccaccaccagtccgacctcggtgcgcaagccttggcggatcaagtaatgatgcacccccgcagtggcgagcagggccggaatggcgatatgataggcgtccatgtcgcgatccgacagaatcaggatgttatagccctcgcgcacgacatcctcggcgcgccggaacaaccgttccagcgccggttccatccccgccgcgccggcgtcggcggaataggtgatgtccaacgtataggtgcgaaacgcgttatcgacgtgactttcgatgcgccggattttttccaactccaggttggagaggatcggttggtggacctccaggcgtttatgcgtcccggcgtgatcggggttgagcaaattggggcgcggtccgatcagactgaccagactcatcaccagttcctcgcggatcgggtcgatcggcgggttggtgacctgggcgaaggtctgggaaaaataatcatagagaatcttgggccgcgcggagagcaccgcgatcggggtatcgcgtcccatcgagccgatcgggtccatcgcggtcgccgacatcggccgcaagaacaccttgatgtcttcctggctataaccgaaggcctgttggcgatcgagcaggatgtcgtcgtcgggcgccatcggagcgacttcgtcgggcagatcggaaaggtgaatctgcgtgccgtcgagccatttttgatagggcttggcgcgcgccaaatcggacttgatttcggcgtcgtcgatgatccgcccctgttcgagatcgatcaaga

SEQ ID NO: 722 - DNA, 7382 bp, synthetic construct
  source 1..7382: mol_type = other DNA
  misc_feature 1..7382: note = Synthetic
tcgcctttcttgttgctgaccacgccgagataaatcccctcctccgtgagcgccgccagcatcgccgccgctcccggcaggggttggaggcgctcaagatggatttcatcgaaacgccgatagaaggtttcgccggcctgccgccacctttcaccgaagatgccgggaaatgaatcgcgcatggaccggcccacccggcggcgggtttcttccatggtccacggcgtcatggcgaaggcgtcgaaggtggcgcggagcgcctcgtgaattaccggccaggaatcgatgagggtattgtcccagtcgaaaataatcgcctttggcgaaggcgggggggcatttttcaacttttggcggcccgttggctgtccatgtggacgccgtaggcggcgatcagtttccggcatatgggcccgaccaggccgtcgcccaccggcttgccgtcgattacggtcaccggcttaatcagcgaggttgaactggaaacgaaggcttcacgggcgcgcagggcttcttcgcggctgaaagcgcgttcggaaaatgaaatcccctgttccgccgccagcctgactaccgccagccgggtgatgccgttgaggatggaaaaatccgcctcgcgggtcgccaattcgccgtcattggtgactatccaggcgttagacgccgcgccctcggtgatcaggccgtcgtcgtccaccatccaggcttcataagcgccggcgtctgccgcctgttgcctggccaggcaattgggcagcagggaaatggttttgatatcgcggcgtcgccagcggatatccggaatgattatgaccgaaactccctttgacatttcttccgggtccggcgccggcagacgcctggccattatgacgcatgatgataaggaatgtttgggaaaagcgtgattgcgggcagcgacgccgcgggtgatttgcagatagatcatgccgttctcgacgtggttgcgccgcgccacctggcgcatgaccaggcgcagcgcgcctgtggacatgggcggcgcgatttgaagctccgcaagcgaccgcccgaggcgcgccaggtgcccttcttcgtcgatcagccagccgccgccatgcacggcgatcacttcgtagaccccgtcggcgaactgatagccccggtcttcgacattgacccaagcttcggccattggccgatagcttccgttgacgtaggcgacgcgcgacatccggcgattttcccttttaatgacggattggagcaacaaaaaagaggccggcgcgaaccggccccttatttttcatcgtaaagatttattacgactggagtccataccgatcaggatctgctacgttcccgtggactgggctattatcggttgactagattcaagatgtcaacaaccataagaaagtttttttgttatggggggatattatgaacaatcaaaacaggcattttcgttaccgtttgggaatcgatgtcggggtcgcctcgctgggtatcgctattctagcgctgaaaaacagcaataatagcgataccggggagcctgattattccattttcggtggttccgtccgcacctacccgctaccggaaggggcggcggagcggcgggaaaagcgcgccatgcggcgcaatatcgaacgtcgggaaagacgtttggacaggctttccgagttgttggcggctaacggcttcggctacccgcgcgaaagaattcccaagaaaatcctcgacctgtcgccgatcaagcttcgggccaaggcgtcgcgggaaaaagtcgacccggcgtatcttgcccgcgcccttttgcacatggcgcggcatcgcggcagcagcgcctttcgcgagtccgccatcaaggaagacgacaaggaagcccgccagaccgccaaaggcatggaaatcctacgcgaggagatgaaagccaaagggttcaagacatacggccaatatctgcgttggcgggaaaaacaaattccgaccttacccatccgtataaatcaggaaaaaatggctgccggcaagggcggctacgcctattaccccagcagggaaatgctgcaagaggaatttgaaattatctgggacaaacaggcgagtttttatcccgaaaaattaacaccggccttaaaggagaaagtaagagacgagctttttttccagcgatcaatcacctcgccgccgccgggcaaatgtccttatttcaccgatgaattacgtttgccgagaacatcgcgcctgtttcaaattcgccgtatttacgaggaaaccaataacctgcgcttttccggcaaaaggggcgaaacaatcccctacggcatggcggagcgagacaagatcatcgcccggctgatggcgggtgaagacctgacgttcgccgaaatcaagaccaccatggacctgaaaagaaccgacaaggtcagcatcgaggatacaaaaacccgcaagggcatcgccagctatccattcgaccgcgaacttggtgcgccggggcggctgggtggcgcatggcttgaagcggacgaaaacacgcaagataaaatcctcgaagtcctggccaccgagcatgacgacagcaaggccaaggacaagttatccaaaattctcggcggcgaccgcgaggcggccaagcgggcgctggaggctcccctgccttcgggttgggggcggatggggctgacggcgactaaaaaaattcttgaggaactgaaaaaagacgtcgtcccggcccgcgtcgccgaagaccgcgccgggcttgtccatgccatgacggcggacggtgtaatttatgacaaactgccttattacggggaaatcctcgtcggccatacggtcgaacccatgtgggtgtccgattaccgccgggccaccgaccggcccccctacaccgccccggaagaacaaaaatacgggcgcatccccaatccggtggttcatctggcgctcaaccagatcaggcgcaccgtcaacgcggtcgtcgggaaatatgggacgccggaatccatccacatcgaactggcgcgtgaactcaacaaaagcgccgaagcccgcgatgagatcgccaaacaaaacctgaaaaaccagaaagcatcggatgccgccgcccgggaactgaaggagataaacgtcaaggtcaatcgccttaatatccagaaatacaaactgtggaaggaacagggcggggaatgcgtctatacgggcaagccgttgaatctggaaagcctatataacggcgaggtggatgtggaccacatcctgccgcggtccaaaacatattcggactccatggccaacaaagcggtgtgcttgcgtagcgccaatgccgacaagcgcaaccgggcgccttatgacgccttcgccgataaccccaattacgattgggccgccattatgcggcgggttgataaattgcaggataacaagaaatggcgctttaaagcggacgccatgaaacggttcgaggaagacgaggatggttttcgcgcccgttatggcacggataattcctatatcgccagagtggccagacaatacctttcctgcctttacggcgaaccgcacaatgtggtcgccgtcagcagctatatcgtcgccatgttgcgcggcaaatggggcttgcggaaaatactgggcggcaaggccgacggcaagaaggcccgtgacgaccaccgccaccatttcattgacgccctgaccgccgcttgcgccacccggggaatcgtccagaggatcatgcgcgaagcggcccgttgcgagaaagaacaactggacgattttgttaaaaacatcgccccgccctttggcgatccgaaggaattcttcaacgcggcccgcgaggcgacgtttgagcgggtaaccctgtcacgcaaggccgatcattccaagggcggccagcttcacgaagatacgttgatgggaatcgttgacgttgacggtccggacgagaacggcaaatacgtttgccggaaacgcaaaaaactcgccgactacaacacgcttgaaaagcttgaaaaaccaaaaatcaaaaacaccctgcccgatatcgaggaaatcaatcaggcgaaaaaagaactggaggacatcaaggaatcggtccgcaattgcgttatgcaggcaacacaggaactggaagaggaacgcgccgccgatatagcatccggcatgaaaggcaagaaagtatcggatttggcggtctattcccgcgccgttcagttgcacaaggacgcgggcggcaaaaccgccttcatcatttacgaaaagaacaaactggtgaatttgcgccgcgccggaggcggcaaccggccgactggcggctataaaagcggacgcaaccaccgcaaggatttctatctggataaaaaaggcaagcttaaatggcagcttgtgtcgatgatggatgccaacgacgctaatttcgcgccggaagcggaaaaacccggtaaccagctattgtggtcggcccataaggaagatgttctggaaatggacgatcccgatgacgccggacgccgcatccgggtcgtggtcgctaaattcaatgaaacaaaaatgggcgtcgtcccggaagccgacgcccgggattccaaggaaagggtcatgtgggaaaagggcttatctttcttttataaagcgggcgctcaacggatcgtcaccgacgcgctgggggatattatctggtggtttcccgccctgccccgttcgggaaaggcggatacttccccatgagttggcggattatcgacgtggccgaagacggccgctatctgcatgcggagcgtgactggctggtgattcaagacaagcgcacggaaatcgggcgcgtccccttgaccgatgtacagtcggtcctggttcacgcgggacatgctacctactcccacggattgctgttgcggctgtcggctcatgacatcccgttggtagtttgcgacaatcggcatgagcccgtggctatcttgatgtcgcttagcggtcaccaccggcacgccgggcgtgtccgctcacaagcggaaagcgcattgcctctgcaaaaacgcatatggcgcgatctggtgcggacaaaaatcaccgaacaggcccgcagcctcgcgttatttgacatcaccggaaaggatggtctgaacaaactggtttccaaagtgcgggccggtgatcccgaaaatgttgaagcccgcgccgcccgctattattggcctcgcattttcggcgatgacttccgccgcgaccgtggacagcccggtatcaacgcgcacctcaattatggttatacgatcttgcgttccgcgctggcccgggcggtaacggcggcgggacttgtgccgtcgcttggggtaggtcatatcaatgcccgcaacaatttttgtcttgtcgatgatctgatggagcccttccgccctcttgttgacaggttggtgcgggaaaaccgcgaaacatggatgggcgaaataaccgcccatggccgcggcgaacttgcgggtatgatgatgcggactataatgaccgatgaaggtgaaaccgacctttaccgcgccatggccatggtggtgaacagtctggttaaattgttcgcgggcgaagaaaaaaaactgtatctgccaaaagaaattgcatttgtaaaaacaccgtaccttcccggaatggaagcccggtagccatgaaaccatgcgcccatgcgccggtattgaatcatgctgtcatcatacaagatcatgtggcttgtcgttgtctttgatcttcctgtaggcacgaagacggaacgccgtagcgctaccgggtttcgcaatatgttgattgatgaaggctttattatgaaacagttttcagtctatttgcgggcttgccccaaccgccctggcgccgacgcactggcgcatcgtatcggtaagcgtgcgccttcggaaggcgatgtttctattatgttctttaccgacaagcaatatggcatgactcagaactattcaggccgatctttgaaggaaaccgaaaaaaaaccggctcaatttaccctgttttaaccatgaaaaaatcgattttccaaaaaaaatttccttataaccctttgggctataaggaaattatggacaatgtagtgtagcagatgctgatcggtatggcagccgtaactgcagggggtcatgtcagtttctccgttttggggttaggcgaacgtcgcattgataaagtcggggtcatcaacatcgtaggattccagcaaattgacggcccattgaaactcgtcctcgccctgattagggacaaacatctccccggttttcgcggcttgggcgtatgcttctttgatgatttcgtcgcttgtcataccaatttctccattttaggttgggcgtgatagccctgattgataattagagtatagggcaggctgtccgttatggcaacccctaaattcatttttattgacgagaagattcggccgtggtctaattccaacatgctagcgctcattcattactggaagcctggccggtttttgtacggcggccggaatggccctgacagagacgaccttgagcgcgatacgttcatgagcgatttcgataatccgccaaaagttacttggcaatacgtggacaggatcaaccagatagaactggtggaatagcccaaaatccctaatctttccgcagtaaatatctaatcagtgggaattgatatgtttaaatcaatttttggcctagctggagacatcgttaatgtcgtaacagcgccagtcgaaatagctgttgatctaacgcgggcgataacaaagcctgtagcaaaggccgttaaggactctgtgattgatgagtaacacagcccttgctatacgttctcaattcaaattcttaccccatttaaaagatgttcccgatccgttcacacgctaggatgcgcgtagagcgcggagaaggggggttttggtatcatccgtccagaaagcttgtggattggctgtgcgtggcttattctggctctggcgggatgtttacggtctgttcggcctgtggtattgagataaacggctgaatgttcccgttttgttgcggtttggctggtttgagggagattgatgatgttgactagacggacatttttgaggcgggctgggctgggtgttgcggcggcccctgcaattgccgggaaagtggcggctggcaacgatgaggccggggcagacagcgggcagacggctagtgtgacagcccgtgtaggggtgattcgccatgaggattttgagattgatgcgcggaaacgggttagagaggcctccgacttccgcccttgattagctaaacctaatatgtctccgccccgtgggggatggtaactaagtggttgattttgtttcaatccgcgcccccgcgaaggggcgacctagccgggcagcg

SEQ ID NO: 723 - DNA, 24554 bp, synthetic construct
  misc_feature 1..24554: note = Synthetic
  source 1..24554: mol_type = other DNA
ctcgaagcggcgctcaatgtcgtcaagcagtggccgttcggcctggtagttggtggtgccgaactgctcggtgcccttgaacatgaggtgctcaaagtagtgcgccaggccggtggtttcggccgggtcgtttttgctgccgctcctgacggccacgtaacactggatatagggtttttcgtgattgacggtgagatatactttcagtccgttcttcagggtgtagatccgggctttcagcgggtcgcccgccacgctgtccacccggtaggggcgggcgttttcggcctgcagagctatgcctgcggcacacagcgccaggatgcaaagtcgtttcagtcttttcatgatacagagattgtcgtgttaagcaatgacttgtcttttttatggttgcaaaagtacgaaatatgtggcgattaaagttcttaataatgataacacatgctaattttcattgcattcagccggggtgccggcatgtgtcgggcttccgcatttttcttacctcggccggaggagccacaaaggtgccgggtggtttgaattatccgccgggtaaaacaaacagcctgccgggaaaaagaaacggaagccggccgtgtttcgtttctgtccggcggccagtgtgtcggccgcgtatgccggtggccgaaaaataaagtcgggcatgtggggcccttatcgaaaaaacttttatatttgcgtttatgaacaaactgagtggctttttcaggggagtatgggccctgtatgtcgacggattccggcaaatgacctgggggcgtgtcctctgggcgatagtcctggtcaagttgctggtcatgtttctggtgttgcgcgtgttctttttccagcccgcgctggccggcatggatgagcatgaaaagcaggaaaccgtgggccgtcacctcaccgttccggccagtccgtgagccgtgagccggctgaaagccgcacatatccggattattacattacgaaaaaaataaaattcttgttatgatggacttagcattaatcaactggtcgcgggcgcagtttgcgctcactgcctgctaccactggcttttcgtcccgctcacgctcggcctggccgtggtgatggcggtgatggaaacgctctacgtggtgcgcaaggacgacttctggaaacaggccgccaagttctggatgaaactctttggcatcaactttgccatcggtgtggccacgggtattattctggagtttgagttcggcaccaacttcagcaactattcctggtttgtaggcgacatcttcggggcgccgctggccattgagggcattgtggccttcttcatggaagccacgtttatagccgtcatgttttttggctggaacaaggtgggccgcgggttccatctggcttccacctggctcacggggctgggcgccacgctttcggcctggtggattctggtggccaacagctggatgcagcatcccgtgggcatgacgttcaatcccgaaaccgtgcgcaacgagatgaccgactttgtggcgctggccttttcgcacgaggcggtggtcaagtttttccacaccgtattgagcggctggtttacgggcgccgtgtttgtggtgggcgtcagttgctggttcctgctgcgggggcgccatgagcgcctttcgcgtgccagcatccgcgtggctgccgttatcgggctggttggcggtctgggcgtcatgtttacgggcgaccagtcgggcatcatcgtggcccgcaaccagcccatgaagctggccatggccgagggactggagcggggcggcacgcgggcgccgttctccatcgtgcccggcgtcgaggtgcccggcgtactttccgtattggccacccacgacatcaatggctacgtgcccggcatgaccgacctgattgaaggctacaccacgcccgacggccagacacacctttcggcccggcagaagatggcctacggccgcgtggccctgcaggccttcagcaccttccgcaatacgccgcataccgatgtggacaagcggcaggccgcccgcgacacgctcgaaaagtatatgccctattttggctacggatacattcagcatccctccgaactggtgcccgaccggctcgtgccgctggtctactggtcgttccgtgtgatggtaggggcgggcatgctgctcatgctcgtgctgttgctcatgctctggtttgagcgccgtgagcagctcacctcgcagcgctggctgctgtatgccggtttgtggagcataccgctggtttatctggccggccagtgcggctggattgtggccgaagtgggccgtcagccctgggccatacaggatttgctgcccgtgtcggtgtcggtatcgggcgtaagttcggcctcggtcattactaccttctgcctcttcctggtgttgtttacggtgttgctcgtggccgaggtgcgcattctttgccgtgccatccgcaaaggccccgatatggccgactgaagctgtggcccttggtcctgaatccttagaaacatgaataaaagaaccgacaaatctcaatcattatgacctacgaatttttacaacaatattggtggttcgtcatagccctcctggcgggactgctggtgttactgctgtttgtgcagggcgccaattcgctgattttcagtttggggcgcaccgaaacggaacgtcagctggtggttaattccaccggtcgcaagtgggagttcacgtttaccaccctcgtaaccttcggcggggcgttttttgcctcctttccgctattttacagcaccagtttcggcggggcctactgggtgtggatgctgattctggtaacgtttgtgcttcaggccgtgtcctacgaattccagtcaaagcccggccacgtgttctcacgtaacgtctatcgccgttttctggtcatcaacggcgtgtttggccccttgctggtcggcattgccgtgggcacattcttcaacggtgccaattttgtggtcaacaaggctgccatgggcacgggcgtgcagcccgtcatcagtcagtggaccagttcctggcacggcctggaggctgtgaccgatgcctggaatctggtgctgggcatagccgtgctgtttctggcccgcgtgctgggagcgctctatctgattaacaatgtacgtcacgacgagcttcagcttcgtctgcactatcagcttaaagccgacttctggcctttcctgattgcttttgtccctttcctgattcgtcttatggtacagccgggatttgccgttacggctcagggcatcgtgcagccggagccctataagtatcttcacaacctgctggccatgccggcggtaggcgtggtgttggcagcgggcgtagtgctggtgctggccggcgtggtgctgacgttgcgtaaccgccgcttcatgcggggcatctggctcagcggcaccggcaccgtgctcaccgtacttgccctcttcctgctggccggctactgccatacgtcctattatccgtccttgaccgactggcaaagctcgctgaccttggccaacagttcatccagttactatacgcttcgggtcatgacctacgtgtcgtgggttataccttttgttctggcctatatcttttacgcctggcgggccattgaccgccggccgcttacggcagacgaactggaagagacggaacataaatattagcgtttttcgcggtcttttgtaaggctgcaaacggatttttcccccggcggcaggaagtggcccgccgggggctttttgtttttttcaatatatgggcgccgcccattccaaaaagaattcgtaattttgacgctgtatcattctaatcttatgcaaattatgaaacgttttatctggatattttcctgtctcttgggcgtggtttttaatttgtcggcgcagcaggcgcttgagctcaagcaggagcggctgagcaagtggggcatcggtaccggcaatttcagcggaatggctcccttgggcaaccagcggtatgccgttgtcagtgacaaagagccgcaggacggtttttttgtgttccgcatagctcagaatatggagacgggagaaattgaaagtgtcagcatggatggtttttatggcaatcctgacatgcacgtcgacgccaacggcgtcaatctgcgcgactgtgaaggcattgcctacgttcctgccaccaataccgtgttcattagtggcgagggcgaccagcagattttggaatataacctgaaaggtgagcttaccggccggcgtctgaacgtgccggagcagttcgggctcgacaagatagtatccaattatggtttcgaggcgcttacttacagtccgcagcaacatgcgttctggaccatgacggagtcgatgctcgtggccgacggtcagggctcttcgcccgttaatccgggagcgcagaacctgcttcgcctgctgaagttcggtgataatcttcagccggccggacagtatgcctaccgcatggaccgcggccgtaccgaggactttggccgcatttacgcgcacggcgtttcggacgttaccatgctgcccagcggaaaactgctggtgttggagcgtgaggccaacatcacttcgggatacatggggtcggaggtaaattgcaaggtgttcatggtcaatccgcagcaaagctggcccattgacggtacgaccaacctggcccgattggataacaacaagtttatggtcaagcacctgctggccaatttttcaaccaccctctcgccgttcaacaagagcctggccaattatgaaggcatgtgtctgggagccaagctcaacgacggccggcaaacggtgctgctcatcagcgattcgcagaacggggcgggcaaccgcatctatcatttgtacgactacatcaaggtgctggtgcttccgtccgatttctgatcgtaaaatatgctttctggccaatgttccgccgcatgtcgggcggacgttggccaacattgttttttgtaggtgccggcagtttttccggccccctctttattcattcagaacgtaaaatgtatgaaaagaatcttactggtttttaccctgtttttaggtattttttccgtcgcgcaggccgcagtgcccgacagtatcgtactaaaaatgacattgttggccgcccgtgacgataccgaggcgcttcgtccgctctaccgccagtatggtgctcagttggtgccttcggcccgtttgttctgcaatctggcttttgcccgcgagcggcatgacgaccgccgcctgctggagtgtgttgacagtctgctcgaggagtatccgcgtacccttcccgtcaatacccgttacacgctctcggtggtcaaggccggggccttggtccatttgcaggagtttgccgagctgcagtcgttctgtgcgcgtgagatgaagcgctaccgcaaccgtcgcaaataccgcacgcaatatcagacgctcgactatttccgcacaaaggcccgccgtctgctcgattccgtcagtgtgcgtggacgcgtaatgcgtctggttgaggctgacgatgcgctgggcctgcgggcctatgccgattcgctcggtgcgctcgattcctatgcctgccgtatggcacagcttacgctgctcaaggccggtgtgcccgacgggcgtctggccgcggtggccgacagcctgcttgcctgcgaggccgactctctcgaccgcgaggggcgcgagcgctgcctgcgtgccggggtgcatgccctcttctggcagggatgctggtcgcagctggctgacttctgccggcgctgggagccggtcagcgaggggctttcgggctggttgcagcgttatgcccgcatagccatgcagtttgaggggcacgacagcgtgcgtgtggagcgtccggcccgcaactgctatctgcctaccacactggagtggcccatgatgacgagtattgaggttaacggccacacttttgacgatatggtggtggagacgggctatcccgttacgatgatcagtcaggccgaggccgaccgctgcggcctgcgggtgttgagcgatacgctcctggtgggcagtatgttcggcccgctcaaggtgcgtcccgccctgattgaccgcctgagcctgggcgacattgtgctgaccgacgtgcccgtatatgtggctacggccgacaacccctcgctcgcgtccagcttttccgggctgctcggcacgtcggccctggcgcgtctgggggtaattgacattgagccggagcgcctggtgtttccctatcgggccgaggccggcgcttctgcggaacccaacatgcgcctttcgggcgacggcaaccttcaggttgaagcttttcatcagggccgccgccagcgctttgcgctcgacacggggcagagtgcctgcatattctctacctacagctatccgcgagccacgaccgacgttcacgaacttcagctcaccgtggccggacagacgctgcgcgtgccctacgccgaactgacggacatgcacgcctacgaccacgagggcgtattgggcgtgcccttcctgaagagtttcaagaagctgcgcatggacttccgccacatgtgtctgacggcttcgggcgtgcagccctttcattaccgcgacattgagcagtggattaacgacggcaacctcttctgcctcgaccgtaacctcgacgccatttccgtagtgaccgacgacgtgggctgccagatggccgaaatcttttcgctctacggcaagaatgctcccgaggagctttgcgaggccatcgacgagcttttcagcagcgacagcaacagccgcgaggcctctacgctcaacatgatgcgcctgcaggcgctggaggacatggggcgctgggccgaagccggcagccatatccgcaacatgctcgaccacggctattacaaccccgatacgcgcgatacgctggtggccagaatgaacctctacaccaccgaaatggcccacgtgcagcccctgagcatcaacatgggcaatcaggcggccgaattgcagtggctgcctgagcaggacaaccgctccctgcccgcaggtgaggtgacggtgaacggacgtcaggccgaattcctgttcgaccccaccgagaagtattgcgtcattaccgacaaggccgcccgccgcctcaagctgcatcccttttcaaagccctacttgtggcagggccagacggcgcgtctggtcgtcattccgagtctgcacctcggcgccatcgaggttaacaatctggtatgcgtagtggtgccgggaaaaaagaaacagcccctggtgctgggtcacgacctgtggcgccatttcggagccctggagctcgacggcaagcgtctggttatgcacagcgagtcgccctacgacggcacgcgcagcgcccccatgcgtctggacaacggccacctctacgtgtcggcgcgcagcagtcagggcgaggagcacgtgctgaaggtaacctccacggccaacgacctttctgtgccccttgagggcaacctgcgtatcggcaatgtggtgctcgacgccgcgcgtttcccccagtcgctccatgagtccgacgccttcagttgcggctgtgtgtcgtggccctggctggccggaaatgacggccatgtggtgctcgacttcacccagatgatgtgctggcgccggtaggccgttcgtcttgtgcttccggcctgcggttgcgcccggatattcgcccttctcggggccggatgtccgggcgtaattgttggccgcgggggaggcgttcgggccgtagcccgcgcagggaaaacagggccggacctttttttcacaacgtcccgcctggttaaaataaagtcccgtcccgttttgccagcaacccgttgtcagatttttcctgccccttaccttcgtaatgaggttgcggagaaatggccggaagggctttccccatgcccgtcagcgcacatcgggagtatgttgtgcggcatggagagtcagaaaaatcactttttgtttgtcccggcctgctgctttcgctatatttgtggctcacaggagtgtgccggcttagacttacagatgatgcttccggcctgcctgtgcgtaaaaaaccgctaaacgagaaaaagaagatgaaaaacctgtttaccctgctgtgtgtttgtttgctcggcgtgttggtcagtacctcctgccgccaccgtgagcccgaaccgcccaagcccgaggccgaagcggaatatatgaaagcctttaacctgcttttcagcgacagtctgttccgcgatgtgtcgcggcgcgacgtgcaggccgctgccgggcactaccgcaaagccctgtccattgaccccgactatacgctctgccgtacggaatatgccatgctcctgctggccaacgacagcgtggagcaggcctggcagctgattgacgacgaccgcaacgatgccggcgcagccttcctgaaggggcttatctgtcactaccgcggccagatggacggccgccgtcaggcctttgagcgcgccgcctcgctgctgcagcggcgtatgtccgacgggcaggcctcctttggcgattcgctcaactatgcagccagccagtattttgtaggtgggcgcgaggctttcctgaaggctgtggagccgattcacggctttgtttacgaaggtgagcgtgaggagtttattgacggatacgtgcaggtgccccccgatacgattctcaaccagatgctctatcagctcattgtggtgcgccgccccacaagcgagcgcagcaacatggtattgccgcagctggagccttgatgcaacatcgctccttttccctacaaggcagccgcgctccatcctttccgtatgcgaaggatggagcgcggctgccttttgtaaggggcggacagggaaaagtccggctcagaagatttctacgcggaagccgccctgccacgtctgtccgggcttggcttcgttgacgtaggggcgcatggaataatcgccctcaaatccggcgtagtcacacaggccgaaccacggctcgatgcagatgaacggcgcttcagccggtgcccaaagcaaaaaggccggtgcttccgacgacaggtgcagaaacggctggttgtgtttgtcaaagagcgttacgccgcgcagctggctgtggtcaaaaataagtccggagtcgcccgtggtgtggctcttcagggccagcatgccgttattttccagcacgggcgggtcgaaatgtcccggaatcagacagttttgttcgccggtgtgcagaatgctttccacgtcgccctccagtcgtgcgtagccatgcacctcgtcggcagggtcaaagtcgggcagacggaatccggggtgtccgccaatctgaaaccacatggtgcgggcgtcgcaattctgaattttgaaaaccacgttgagcgtgcggccttcaagggagtaggtcacttcaaaatgatactggaaggggtagagcttcagctgttcttcagtggcgttgtgctccagtgtgacggacgaagccgttttttccttcacgttgaaacgtacgtcgcgaataaagccgtggcgcggcgtgtgatacacctttccgttgaaccgggcctcgccgttccatagtccgcccacggcgggaaacagaatgggagaacttctgtcccagaatttggggtcggcctcccaaatgtattgccggttgtcactcagtcgtgtgagttcttttatttcagcgccctgctccgacacacaaaggctgagaaattcgttactgattttttccatagtgaatctgagaataggggttatagactctctaacagacaaaggtagaaaaaaaactcgaaacctcgtcttaaatgccggaaagatgaatgccggctgtttgctgagcctgattccgtagtgttttcgggaaaataatgcggaggcagatgtcttttgttttccaaaaaaaatgtatttttgagaatctttaaaatttgcagtacaatgactaaacagattttaggcctggatataggcactaacagtataggatgggccgtggtgcgcggccagggcgacgacgcccaaccccttcaggaaattgtggcagccggttcgcgggtgattcccgttgacgccggtgtgctgggtgattttgaaagaggagtcagcagcaagtcaaaggcggccgagcgtacggctttccgccaggtgcgccgtatgattgagcggtcgcatctgcggcggcagcgcctgctgcgcgtgttgcaggtgatggactatttgccgcctcactacgcccgctgcctcgaccgctacggcaagttcctgccgcacaccgaacccaaaatagcctggagcgaaacggccgacggccactatgagtttctcttccgtgacgccttcgacgagatgatggccgccttccggcagcgtaatccggagtgggtggcccggggtggaaaggtaccctacgactggacgctctattacctccgcaccaaggccctgagccagcctgtcagcccgtatgagctggcctggattctgctcagtttcaaccagaagcgtggctaccggcaggcgcgtggcgagcagcaggaggacgacagcaggaaactggaagagtacaaatcgctcaaggtcctgtcggtggaggataccggggagaagaagggcgaccagacctggtatcgagtgctgctggaggatggcagtgaatacaagagactgagccgaaatccattgccttgggaagggcaggtgcgcgactttattgtaaccactaccctcgatgcccagggaaaccccaagactgaaaaggacgggcgcgtgaagcgtacgtaccgttcgcccaaagctgacgactggaccctgctgaaaaagaaaactgaggctcagattgcgcaggcacaccagacggtgggagcctacatttttgaggcgctgctgcgcaatccaagtcaaaagattcgcggcaaactggtacacaccattgaccgtaagttgtattatgacgagctgaaggccattttgcaggcccagcagccgtatcatgccgccctgactgactccgccgtgctggagcgctgcgtgcgcacgttgtaccagaagaatgaggcccatgcccgtcaggccctgtgtcacgatcttatggccttcctgctggacgacgtgctcttttaccagcggccgctcaagagccagaaggcactgatagccaactgcagctttgagtcgctgacctattacgaccggcagacgggcgaggagaagcaggcaccggtgaagtgcattcccaagtcgcacccgctgtatgcggagtaccgcctgtggcagttcctcgacaatctgcgcatttatcagctggagggcgaggtagacggaaagaagtgtttcgacatcgacgtgacccggcagttcctgcccgaccacgaggcttatgcccggctgtttgactggctctaccatcgggaaaatgtgagctggaaggatttgccgaagtatccgccctttggactgacgcgcaccaccgccgacctttatcgctggaattacgcccaggacaagagctatccgtgccacgaaacctgggcccacatgcagcagtgcctgaagaaggccgggctgtcgcccgacttcctgacgccggagcgcgaggaggccctgtggcacattctctattccgtgtccgacatgcaggaactgggccgcgccctccacacctttgcacataaaaacgaattgaccgatgacgaggctgagcgttttgccaagtttttcggtaaaatggagccctttgcccacgactatggcgcctgttcggccaaggccctcaagaagttgctgcccctgatgcggcggggcagttactggagcgaggaggccctggcgcccggggtgcgtgagcgcatcgggcagctgctggccggcactgacgatgccgccctgccggccaaggcccgcgaggcccttaaagctctgcacgcggtcagcgactatcagggcctgcccctgtggctggccagctatgtggtgtacaaccgccacgccgaggccaaggatatagtccggtgggagacgccggccgacattgaccgcttcctgctgaacttccgtcccaacgagctgcgcaatccgatagtggagctggtggtgcgcgagacgctgcgtgtggtgcgtgacatctggacccggtatggcagcttcgacgaaattcacgtggagctgggccgcgaaatgaaaatgccggccaagcagcggcagaaactgagcgagcgcatgctggagaacgagcggaccaacctgcgcattaaaatgatgctggcctgcttccagcacccggagttcggggtggatgatgtgcggccttactcgccctatcagcaggaaatcctgaagatttatgaggaatatgtgctgcgtgacgtgaaggatattcccgacgacatagccgccattctgcgtaaattcggcgaaagtactgctgccaaacagccttcggccaaagaggtgttgcgctatcggctctggctggatcagaagtacaccagtccttatacggggcaaatcattccgctgggccgcctttttacgcgagattatgaaatagagcacatcattccgcagaagcgctatttcgacgattcgctgagcaacaaggtcatttgcgagtcggccgtcaacaagctgaagagtgcgcagctggcccacgaattcatcagccagcatcacggcgaggtggtggaactgggcaatggtcgcactgcccgcattctggagctggaggattacgaaagattggttaaggataattattctcatgtccgtttgtcgcacaaacggcgcaacctgttgctggacgaggtgcccgaggccttcattgcccgtcagctcaacgatacgcgctacatcagcaagtacgtgagcatgttgctctccaacatcgtgcgcggggaggatgagcgcagcgtgaactccacgcacctcattgccaccaacggcagcattaccacccgcctgaagcaggattggggcatcaatgacgtgtggaacgccattgtcatgccgcgttttgagcggctcaacgggatggtgcagacgggagaccatatggaaaatgtgtatgttaagctcaatacgcaaggtcacttgattcccaatgtacctcttgaccggcagcgcggattcagcatgaagcgcattgaccataggcatcacgccatggatgccatcgtcatagcctgcgcctcgcgcaacatggtgaactatttgaacaacgagtcggcccgtaagggagccaaggtgacgcgcatggacttgcagcacctgctgtgcaccaagacgcgggcggatgccaatggcaattatagatgggtgatgaataagccctggcctacgtttaccaccgatgtgcgccatgcgctggaggacatagtggccagcttcaagcagaaccggcggataatgtctcccactgtaaattactttgaccactatgaccctgccaccggcaagaagcggcggaaaaagcaaacccaaggcgaaatgcaggccgtgcggatgtcaatgcacgatgccactttctatggcgaaatcaatttgcgcagcataaaggaggtaagtttgaaacaggctttggagcagccgcagcgcatagtcaataaggacctcaagcacaagttgcagacgttgcaggctgagggcttgaacttaaagcagatgacggcgtattttgaggagcatcatgacgaatgggctgatgtcaatgtcaagaaaatagcggtttacgtttattctaaagaagagggtaaggcacgctattttgcttcccgtactgtactggatcagagttttactcgggattatattgagcgcaaggtggccgatacgggtatacagcagatattgttacgccatttggctcattatgagaatgccgagcaggcgttttcgcccgagggtattgaggatatgaacaaaaatttaaaagaactgaacaacggtcggccgcatcagcctatttataaggtgcgaacttatacccaaggcgtaaaatcagctgtaggtcagcgtaattgtaaagctgcccaatttgtgaatggagcaaagggtacgaatctttactttgccgtgtacgagggcaccaaaggggaatcttcgggatgtaagcgaagctttgctaccttttctttacgtgatgtattgccttgtttaaaggacggtaaaccggttattccggagtttgataaaaaaggtaaaaggttgaagttcgtgctttctccattggatttggtatatgtgcctacacccgaggaattgaagctaggacaggtgcagctgccgctgaataagaaaagaatttataagatggtgtcgtcttctggtaatcaatgcttctttgtcttggccaatgtggcttcagctattgtagacaaatatgagttctcttcaaaaaataaaatggaaagatctgtaactgaagagatggaaatgataaaggaaatttgcttgccgcttgacgtggaccgactcggaaacgtgcatttgcgccagtagcctgttgaactgatacatgcaaacctgagcagggaagacgtcggaatcagcgatggctttcctgctcaagtgctttttaacctaaacgagacgaaaatacgatgattaagaaaacactttattttggaaatccggcttacctgtcgctccggcagaatcagctggtcattcagttgcccgaggcggaggaaaatctggccgactgcctgaaggctgaggctgtgcgcacggtgcccattgaggacattggcgtggtggtgctggaccaccggcaaattacgctgacttctgccctgatggcggcactgttggataataattgcgcgttaatcagttgcgacagtcgcggcctgccggtggggctgactttgccgttgagcgggcataccattcagaacgagcgtttccgcaaacagctggaggcttccgtgccgctgcgcaagcagctgtggcagcagaccatacaggccaaaatcagcaaccaggccacggtgttgcagcgctatacccgacaggaggtgaagtgtatgcgcgtgtgggccgcgggcgtgaagagcggtgaccccgaaaatgtggaagcccgggcggcggcctactactggaaaacgctgtttgggcctggatttacgcgcaaccgtgagggaccaccgcccaacgccctgctcaattacggctatgccatattgcgggctgtggtggcgcgggctttggtgagcagcgggttgctggccacgtggggcattcaccatcataaccgatacaatgcctattgtctggccgacgacattatggaaccctaccggccgtatgtagacgaactggtgtggacgctggtggaggcgcacggactggacggctgtgccacgttgagccgcgaactgaaggcggaactgctgcgcatacccgtgctgacggtagtgatgggcgggcggcgtagccccctgatggtagcggccagcctgacggccagctcgctcagcaagtgttttaatggagaaagtcggaaaatagtgtacccggagttatgatggaccgactgagtgaatacagagtaatgtgggtattggtattttttgatttgcctacggccacgccgcgcgaccgcaaggcgtatgcgcagttccgtacgagtttgcagcgggacgggtttaccatgtttcagttttcggtgtatgtgcgtcattgtgccagtcaggagaatgcggcagtccacgtaaagcgggtcaagtccatcttgcccacgtatggcaaggtgtgcattctgtgcattacggacaagcagtttgaacagattgaggtattttacgggcgcaaaacgcagcgtacgcccggccccggattacaactggaattattctaaagcaagcgccccaccaactggcgggacgcttacttttttattttctaatgatctttgtatcttctttattctcagtgaattgtgtagattcagctgtgatgtatggtacaaagttacaaaaatgagagcaaatcacaaccgatttccaccttgtagcccgacagttctgctgtgatgtatggtacaaagttacaaaaatgagagcaaatcacaactgacgaacgccgacggcgtggccgtgtaccgctgtgatgtatggtacaaagttacaaaaatgagagcaaatcacaacttagagtttccaatttattgatttccgcatgctgtgatgtatggtacaaagttacaaaaatgagagcaaatcacaacagatgtcacccagcatctttgccgctgccgctgtgatgtatggtacaaagttacaaaaatgagagcaaatcacaaccatttgatgcgttggttattgatgagctaagctgtgatgtatggtacaaagttacaaaaatgagagcaaatcacaacttcatccccttcacgatgttgagcatggacgctgtgatgtatggtacaaagttacaaaaatgagagcaaatcacaactttgccgggtgcgaggtctttacgctctgggctgtgatgtatggtacaaagttacaaaaatgagagcaaatcacaactttatctctccgtcgtcggtaatgacctgcgctgtgatgtatggtacaaagttacaaaaatgagagcaaatcacaacttaattccaatagtagaatcataaccaccagctgtgatgtatggtacaaagttacaaaaatgagagcaaatcacaacctctgatgctttaggagctttggcacaaaatgctgtgatgtatggtacaaagttacaaaaatgagagcaaatcacaacggaccttcttctatttggcaatataatccagctgtgatgtatggtacaaagttacaaaaatgagagcaaatcacaacttaaattgtcgagcgtaggtgctgctgttgctgtgatgtatggtacaaagttacaaaaatgagagcaaatcacaacgataaacgagcgttggtttgctgctttttgctgtgatgtatggtacaaagttacaaaaatgagagcaaatcacaaccacttcggcattgtcattcttacgctgctgctgtgatgtatggtacaaagttacaaaaatgagagcaaatcacaacaacatcccggtaggtacttactactatgaggctgtgatgtatggtacaaagttacaaaaatgagagcaaatcacaaccgtctgtgatgtagcccgtagcatcacccggctgtgatgtatggtacaaagttacaaaaatgagagcaaatcacaacacggttactccgaggacaacgtctgcatcgctgtgatgtatggtacaaagttacaaaaatgagagcaaatcacaacccagtaaaactattcggcacaattcctgacgctgtgatgtatggtacaaagttacaaaaatgagagcaaatcacaacagctgtgtgtcacatcattactgtccttgcgctgtgatgtatggtacaaagttacaaaaatgagagcaaatcacaacgtaagagctgtcaactatctcattgaattggctgtgatgtatggtacaaagttacaaaaatgagagcaaatcacaactcgaacaccgtcactccgatatgcgggttgcgctgtgatgtatggtacaaagttacaaaaatgagagcaaatcacaaccggaggcaggaaattatatcaacattctgggctgtgatgtatggtacaaagttacaaaaatgagagcaaatcacaacctgccaactgtttgggcttacggccagagagctgtgatgtatggtacaaagttacaaaaatgagagcaaatcacaaccttctggctctggtggtgttaaccaaggtgctgtgatgtatggtacaaagttacaaaaatgagagcaaatcacaactggagcgcaagattagcattaatggcaagagctgtgatgtatggtacaaagttacaaaaatgagagcaaatcacaacaaaccgcggcgccttattgcggtagagcacgctgtgatgtatggtacaaagttacaaaaatgagagcaaatcacaacggcataagctcatcagattaccagcatcatgctgtgatgtatggtacaaagttacaaaaatgagagcaaatcacaacttattcttgcacacacccatcgtgataggtgctgtgatgtatggtacaaagttacaaaaatgagagcaaatcacaactaacccaaaactacattgaaaagtgtacggtgctgtgatgtatggtacaaagttacaaaaatgagagcaaatcacaactgtaattgtcgtatgtgtcgaacggtgccgctgtgatgtatggtacaaagttacaaaaatgagagcaaatcacaactaagtatataagatgctttacatatcaacagctgtgatgtatggtacaaagttacaaaaatgagagcaaatcacaacgcggcgccatgctttaccttaacgtttttcgctgtgatgtatggtacaaagttacaaaaatagagtaaatcacaactcattttccggtacagtgtggatggattacgctgtgaggtacggtaaacttatgataggggtatatgtataaaaaatgcccaccgataaaggacgatgggcttagggcctaaataacacaacggaatcaaatccttattgtgatttgcttcatttttgataggagcaaagtaacaaaaaaatagcgaaatgaacaaactttgcaggcaaaaaatgcggatgacggttttggaggtgttgccataatgggaggtaagacgggattgcttgttatcggaacgaaaaaaaacaaactgaggctttgtttggcacacgctttgcactatctttgcgtataataaaagtggaactgtcaggtatgtatttaaaaagtatattatgggccggcgtgctttgggcttgcgtcagtacggccggtgcgcagagtgcacgtgaggaaataaagactgacgtgaggctctcggccagtaactattgtgcctaccgtgagccacagggagtgcggctgacgccggcgccgtcgggctatgagcctttttatttgagtgcgtatgcccgccacggttcgcgctttcagattaacccgaacgagtatcgggagccgttgcgcgtgttgcagcaggccgactcggtgggggcgctgacgccactggggcagcaggtgctggcggtggtggacagcgtggcgcgtatggcaaacgggcgttacggcgaactgacgccgctgggggcgcggcagcaccggggcattgcggccagaatgtatgcccgctttccgcaggtgtttgagggtagggctgacatcaatgcccgttcgacgccggtggtgcgctgcatcctctcgatgctcaacgaatgctgtacgctgcaggggctgaacccgcagctgcaggtgacgaccgacgcgtcggctcacgacatgtattatatgaacgacgagttcaaccgcgtgacgcgctatcgtggcgaaaaggcggcgcaggcttcgttgcgcgactttcgcagccggcaggtgaagcccgaccggctgatgcgctcgctgtttgccgacacggcttacgtgagccgtcacgtgaaggccggccgcctgatggggcagttgtttgacctggcgtcgaacatgcagagcctggacacgtcgctcgacctttataatctgtttacgacggacgagtgttacgacctgtggctgcgcgacaattacgactggtatgtgaactacgggccgtcgcccctgacgcaaggcaagctgccctacacgcaggccaacctgctgcgtaacatcctgaatacggccgatacgtgtgtagcgcgccggcaaaacggggctacgctgcgtttcggtcatgaggtgtgtgtgctgccgctggcctgcctgatggagctggacagttgcggatatgctacgacgtgtgccgactcggtggcaatgagctggcgtaactaccgcatttttccgatggcttcgaacatccagatggtgttttatcgcaacaagcagaacgacattctggtgaaggtgttgctcaacgagcgtgaggtgcgtctgccggtgcctacgcgccgggcaccttactacaaatggacggacgtgagggcttactaccgccagaaactggcgcaggccgactgaatgagaacaaactgaacaatatattgtatatacggatagatctatgatcatagaaatgagaggcatcaccaagcgttttggtcagctggaggtgctgaaaggaatagacctggatattaacaagggcgaggtggtgagcattgtaggcccgagtggcgccggaaagacgacgctgctgcaaatcatgggtacgctctacaagcccgacagcggcagcgtaagcattaacggcgaggacgtgttgcggctgaagggaaacgccctgtcgcgctttcgtaaccgccatttgggatttgtgtttcagttccatcagttgctgccggagtttacggcgctggaaaatgtgatgattccggcctatatcggtggcatgaagggacatgcggtgaagcaacgggcggaggaactgctcgactttatggggctggccgaccgtatggagcacaagcccaacgagttgtcgggcggcgagaaacagcgcgtggccgtggcgcgggctttgattaaccagcccgacgtcatcctggccgacgaaccttcgggaagtctggacagccggaacaaggccgagctgcaccagttgtttttcgacctgcgcgacaaaaccgggcagacttttgttatcgtgacccacgacgaggaactggctggcttgaccgaccgtaccattcacatggtggacggaatgataaatactcagcatcatgaagatagcacaacaactgactgagctggtggggcacacgcccctgttgcagcttaacgcatatagccgtgcagcgggactggaacagccgctggtggccaagttggaaatgatgaatcccggcggcagcgtgaaggaccgtgcggcaatgaacatcattgctgaggccgagcgctccggccgcctgaagcccgggggcactattattgaaccgaccagcggcaacacgggcattggtctggcctggctggcagccgtgaaggggtaccgcatgattgtggtaatgcccgacacgatgagtcaggagcgccgaaaactggtgcaggcctttggggctgaactgcatctgagcgacggccgcatgggcatgacgggagccgtggaactggccaaccgcttgcgggccaggattcccggttcgatgattgccggacagtttgagaatcttgccaacccgcgtattcacgaactgactacggccgaggaaatctggcaggacactgacggcaaggtggcgatgctgattgccggtgtgggtacagggggaacactgtgcggcacggggcgacgcctgaagcagctgaatgcgaatatcgaggtggtggccgtagagccggccgactcacctctgctcagccaggggcgtacaggggcacacggcctgcagggtatcggtcctaattttctgccgctgaattacgacgggagtgtggttgaccgcatcagtgccgtaacctacgatgaggcgctgcgcgctgcccgcctgttggcccgcacggagggcctgctggccggaatatcctcgggggcagccctggctgctgctaccgaactggcgcgtcagcagccggaaggcatgaaagtcgtgatactgccggatacgggcgaccgctacctctccacgcaggagtttgacgaagagaattatccgttgccctgaggcggactaaaaaacaaagtaaaagattctggcaaaaaagcaatatgtttgaattaggaaaatggaatgacctgagcatcgtgcgctttacggaccacggcgcctatctggacggaggaaacggggtagagattctgatgccccgccgatatgtacgtgatgaaatgcggccgggcgatgtggtgcacgtgtttgtttatctggaccagagcgagatgctggtggccaccactgagcagccgctggcacaggtgggcgaatttgcgtggctcaaggtgtcgtggatcaatgagtatggcgcctttctgaactggggcctgatgaaggatctgtttgtgcctttcagcgagcagaaaatgaatatgatggaggggcgcaactatattgtacacattcatgtcgacccgcaaacctgccgcattgtaggttcggccaaggtggagcgttatctggaccgtcggcgccctgttctgcaccgggatgaggaggtggacatcctgatttggcagaagacgccgctgggcttcaaggccatcgtgaacaatgcctttgccggtctgctgtatgacaatcagttgtttggtgccgagctgcacaccggcgaccgcctgaaggcctatgtggtgcaggtgcgccccgactataaaatagacctttcgctacagcgtctgggcaagagccgcttccgtgactttgcggaggtattgctcgacgagttgcgccaggccggcggcacgcttccctttaccgacgcttcgtcggccgaggacatcacagcgcgctttggcgtaagcaaaaagacctttaagcgcgccgtgggcaccctctaccgccaacgcctcatcacgctggagccaggcagcatcagtttggccgaatgggataaatagtgaccttgcagtgcagcataggagttttgcatagcttcagttcgttgcttattgacaaagaaagaatgcagcttgactgtttcaaatgttgaaaactttgttttccgtttgcctctgtgctcgcctttcactatctttgtggagtaaaaacattataaaaaaccaatttatcgctttaatatatgttcgacgtaaagaaatgcctcagtgatagtgaggaaaaaatggaaatgagtgtgatgcaccttgaggaaaaattggcccaaatccgtgccggaaaagccaacgtacacatcctggatgacatccgcgtcaattcctacggcagcatggtacccatcaacaatgtcgctgctctgaccacgcccgacgcacgtaccatcgctatcaagccctgggataaaaatatgttcaaggtaattgaaaaagccatcatcgactcagaagtgggcattatgcccgaaaacaacggcgaggttatccgtctgggtattccgcctttgaccgaggagcgccgccgtcagctgaccaaacagtgtggcaaagagggcgaggaatgtaaggtggccgtacgcaatgcccgccgcgagggtattgagcgcctgaagaaggcacagaaagagggtctggccgaggatgccgaaaaggatgctgaaaacgagctgcagaagattcacgacaagaagatcaagcagattgaagctctccttcaggctaaggaaaaggaaatcatgaccgtataaaaaactgtgcgcaacatgcaaagcaggtcggatggtcgaccttgtaaaacgttaggcgaatcctgctccaaaaagggcgtttcttttttggagcaggattcattggcttcattaaaaaacgggaaataaatggacaagaagggaaacatacacggaatggtggtgcgcagcaccggcagctggtatcaggtgctgactgacgacggccggctggtggcctgtaaggtaaagggaaatttccgcctgcgcggcatacgctcaaccaatcccgtggccgtgggcgacggggtgcacattacggagggcgatgccgacacggctttcattgtggacattgacgagcggaagaattacattatccgcaaggcctcgaacctgtcgaaacagagccatatcctggcggccaacatcgaccaggcgctgctgatggtgacggtggcctatcccgaaaccaccaccacgtttatcgaccgtttcctggcttcggccgaggcctaccgcgtgccggtagtgctgggtttcaacaagtttgacagtctggagggcgaggcgctcgacatggcgcgctatctgatgcagatttacggcgacatcggttatccctgttttgccatttcggcgctcagcggcgaggggctcgacccgttgcagcagttgctggccgggaaaatcaccctgctggccggccattcgggcgtgggtaaatcaaccctgctcaaccagctcattcctgaagcacacgcacgtacggcagctctttcggacgcttacggcacgggggtgcacaccaccacgttcagcgagctttaccgcatgcccgacggcggagcgctcatcgacattccgggggtaaagggcttcggcacgtttaatattgagccggaggagctgtcgcattatttccgtgacatattcaagctctcggccgactgccgctttggcaactgcacccatacgcacgagccgggctgcgccgtgctgcaggcgcttgaggagcaccgcctggcgcctacgcgctaccagtcgtatctgaatatgctgggcgacaaggacgaggccaaataccgcccggcttattaagttccagctgccggcataggccgtgcggaacatgtatcggatgaaaaaagat

SEQ ID NO: 724 - DNA, 24485 bp, synthetic construct
  misc_feature 1..24485: note = Synthetic
  source 1..24485: mol_type = other DNA
ccgcgtggagcgcgccaatctggaacggaggcagctcgactttgtgctgattgaagacgaaggcgaacgtcccgcactgcccgcaccggcgcgaagccgcggaaaaagtttcgcggaaaaagggaaaaagcgccgcggacatcgcaaataaccaaaccgcccataagcattctggaacgcaaccatctaccctcgtaacaagcaaaaatcatcaacagcgcttggtacaatcaggtagatggttgtgtttctttttttcaaaatctcccccaccaaaaatgaaaccatgtcaaaatcttaactcttttcatttttactctataaaatatctcctgcatttctttcagaatgtcaaccataaaaaacaactccgaattttacacccctgttaaatagttttaaaacaaatccattattccatttaaataaggtctctatgtgcaaaaaaacataaatttgcagtcctgtgaaaacaataaaagaaaaaaaacaaataaaaacccgacgactatgaaaaagaacaaattgacaatggttctttcccgactttcagggggggtgattttactcttcagtcttgcccttgccgtgagcagttgcaaggaaagcattgatgacggtaactttgccatcaaaacggaacagacagtcagcgattatctggctgatgctcccgaaaaattctccgacatcaaggccatcttcgaccgcgtcagactgggacgctccgacgaggcctcaacgctcacgagcgtactctcggcgcgtggcaactacacgctctttgcgcctaacaatgaagctgtaagcaaatacatcaagggactcggcataagctccatagacgaactgacctacgatcaggccgaactcatcgccaaaagctgcatcatcgacaacggcgaactgagcgcctacgaagaagccacattcccttctccatccggttcgtttgccgaacccaacctcaacgaccgcatcctctcctgtactcaggacacgaccgccgacggcaaaatgtactacgtcatcaacggtggctccaaggttttgaagaccaacaacgaggtgtccaacggtatgatacacgaggtggactccgtcattgccccgtcgtccgacaacctttacgagatgatcgcctctgccgacaacatgcagattttcgcccacctgttggagcagaccacctgggcagactctctcgcagtaccctacattgacatggactatgagaacgaagagcgcgaggccgtcttttatcccgctttcggtacacaggccggtcttccctacgatgtgcctatgcaccgctacaccggtttcacggcctttgtcgaaccggataacgtgtttgcctccgaatggggcatcaccctcaacaaggatgccgagggcaacgtgacgaactgggccgaggtgatggccaaattcaagcagaagtgcgaagccgtttacggcacggacgctgccgacgacctgagcaatcccgacaatgccatcaaccgctttgtggcttaccacctgctggacggacgcatggcctacgaccgttttgtgggacactacaatgaatatctctatgacttcggcgccgaccgtgcccgcccgcagtccatcaattatcctaccaatgtgtgggactatttcacgacgctgggcaaataccgcggtcttatcaagatcactcaggtgagcgaccgcagtctcgatcccaacaccaacgcccttgaccaccccatttacatcaaccgcaagtcgatctacaagaacggtcgtcaggaggactatcaggagctgcgtgccgaggtgccgggcattttggtatcggcgttgaacggcaacaacgacaacaactccatgaacggcttctatttcccgatcgacaaggtgctgctctacgatgatgccacccgctcacaactggccagcgagcgcatccgcatagaagccactaccatgctgcccgaaatgcttaccaacaatatgcgcctcaactgcatgggatcattccccagaggctacttcaagaatatcccgaacatgtcggccggtaccatcatgacatacctctcatgtacccacgaccgtctgtcgggcggtaacggctggcgcgactatcagggcgacgagttcctattcctcggtctgttcgatttcaccctgcgtctgccgcctttcccaaaagacggaacctacgagttgcgcatgggactttcgaacaaccccagccgcggtatggcccagatctatttcggcgacgaccccaaccgtctgactcccaccggtctgcctgtcgacatgcgccagtcggccggtaccgtggccattccctgggtggccgacatcgatggcgatgacatcaccaatgccgaaaacgacaagaacatgcgtaatcagggctacatgaaagctccgaagtacatctgctggaccaaccgccagcccaccaacactatccgtaccagttcgggcgccatccgcatgatcgtgaccacggccgatatgaaagccaacaaaacctactacctgcgcttcaagtcggcattgaagaagatgaacggcgagttcttcatcgactacttcgaatacgtgcccacctcagtctacaacggcacaacaaccgaggacatctggtaagaacaccgtgccggtccggccggaccataaaaccggaaagcacaaggaacggcgggcatcctgtctcttccccgcgaagaacggccggctcaccatgtcattttaacacttcttgctttcagccggaaaatatattatctttgtaacagccaagcggggctttccttcggggaagccccgcttttcatgtgtttccggcgataatccaaggcaaaaaacgcatattccaggcgcaaaaagcattacttggattttttatttgccgtatttgtgttaaaattccgatacggacttttggacttccactacttcgaacctaccttttaactcttggaaatgttgtggaaagttaaatatgttaaagtgccggcgttccgccccgccggcggagagtttgcagaaaatacaaagcgtttccaaccaaagctggggccgttctgcaaaaaaatagttaactttgcgcccaacagaacgctgccacaacgaccgccggaaagcggcaaacgggcagcgccgtcagcatgcaataaaaaaacacccgacgatatggaaaacaaattcaaccggacactcgttacggcagccctgccatacgccaacggcggtgtccacataggccatctggccggcgtttacgttccggccgacatctacgtgcgttacctccgcctgcgcggccgtgaagtgctcttcgtgtgcggttccgacgaacacggcgtacccgtcaccatccgcgcgcgcaaggaaggctgcacccctcaggaagtggtggaccgctacaaccgcgtcatcaaggagtcgttcgaaggcttcggcatctcgttcgacgttttcggccgcaccacctccgacacccaccgtcacctggcctccgacttcttccgaacgctctacgacaagggcgaattcattgagaaagagagcgagcaatattacgacgaggaggccggcacctttctcgccgaccgttacatcacgggggaatgcccccactgccatgcggagggtgcctacggcgaccagtgcgagaaatgcggtacggccctctcgcccaccgaactcatcaatccgcggagcaccgtgagcggcggcgcccccgtactccgcaagaccaagcactggtatctgcccctcgacaggcaccagcaatggcttgagccttggatcacgcaagaccacaaggaatggcgctccaatgtgatggggcaatgcaagtcgtggtttgacatgggactgcagccgcgcgccgtgagccgcgacctcgactggggcatccccgtacccgttgaaggcgccgacggcaaagtgctctacgtatggttcgacgcccccatcggctacatatccaacaccaaagaactgctgcccgacacttgggaaaagtggtggaaaagcaaggatacgcgcctggtccacttcatcggcaaggacaacatcgtgttccactgcatcgtgtttccggccatgctcaaggcacacggcgactacgtgctgcccgacaacgtgccctccaacgagttcctcaatctcgaagacgacaagatatccacctcgcgcaactgggcggtgtggctcgacgaatacctctgcgaactgcccggaaaacaggacgtactgcgctacgtgctcacggccaacgcgcctgagacgaaagacaacaactttacgtggcgcgactttcaggcacgcaacaacaatgaactggtggccgtttacggcaacttcgtgaatcgtgccctccagctcaccaaaaagtactacggcggagaggtgccggcctgcggcgaactgaccggtgccgaccgcgaaataatcggtgagtttcagggcgtcaaagccgaagtagagcggctcatcgaagccttccgcttccgcgacgcgcaaaaggaggccatgaacctggcacgcatcggcaacaagtatctggccgattccgaaccttggaaaatcgtcaagaccgaccccgaacgcgtcaaaaccatcctgcacatcgccctccagctcgtaggcaatctggctatcgccttcgaaccgttcctgcctttctcctcgcagaagctccgcggaatgctgggcatgggaaaagtggaatgggaccgccttggcagcctcgacctgctgcctgccggacaccggctggccgagccggaactgctcttcgagaagatcgaagacagtctggtggaagcacaagtgcagaaactcctcgacacaaaaaaagccaacgaagccgccagctacaaggcacagccagtccgccccgacatagccttcgaagattttgagaagctcgacatccgcgtgggcaccgtaaccgcttgcgaacgcgtgccgaaagccgacaagctcctgaaattcgaaatagccgacgggctggaaaaccgcaccatcgtttcgggcatcgccaaacactatgcgccggaagacctcgtaggcaaacaagtctgcttcatagccaacctgccgccgcgcaagctccgcggcatagagagccagggcatgatcatatcggcagaaaacgccgacggctcactgagcgtcgtcaccgtagaccgtgaagtgaaacccggcagccaggtcaaatgataccgacaccaccggcggggcgcatcctcaacgcacgttataaggatgcgccccgtctcattaaaaccatcatcatcggaaatcatcttattccatcattatcttaacaatcaaaacaacacgtatgaaaaaaatcatcctcacactcattcttgcgctcacagcgtctacagccatgctcaaggcacaagccgccatatcgcccgaatttgaggccgacatccgcaaggcactcacactcaccaaaggcaaggaaaccatgtcggccaccatgtcggccacctttgagggcatgagcgcccagctcggcatgaccgcagaagaaacacaggcaatgagccgatttatcgttgataagatctatccgaaagtggaagtgaaaatgatagagttatgggcctcgcatttcacccacgaagaagtaaagggcatcgtggctttctatgaaacacccgtaggacgcaaaatgggcgaaaaagcccccgtactggcagccgaaggcgccaaaataggagccggcctatcgagcgacatccaagccgccgtgatgcagttcatgcaacagaagaaataacaggcacacgcctgcccaggccgccccggcataccgcgctccgcagtatgccggggcggccatttctatatcctcacgtcaagcgcgcccccctgaaaccattccacccaaacaaaccactgcgaaaagttggtattccccgtttaatattcattattttattgtgccttttttttgcagtcaaacggaaatgttttacttttgcaaggtaaactgcctgagcctgctctcaggcgctacggcacacgcgcaaaacaatttattaaatatcaacttaattcaaaaatctatgtggttaactaattcatctatcggacgaaaggtgatcatgtcggtaaccggcatcgcacttattctgttcctgacgttccatgcttgcatgaacttggtggcccttttctctgccgatgcctacaacgccatttgcggagccttgggagccaactggtatgccgtagccgccaccgttggtctggcagctctcgtggtgctccacttcgtttatgccatcatcctcaccttgcagaaccgcaaggcacgcggcgccaaccgctacgccgtgacctcaaaacccgaaaaggtagaatgggcgtcacagaacatgttcgtgctcggccttattgtcgtgatcggcctgctgctccacctctacaatttctggtacaacatgatgtttgccgaatttgccaatggcggctatgccttcgttgccggcgactacgccgcccacgacggcgccggcctgatagccttcaccttccagcaacccgtttacaccgtgctctacatcatttggtttgttgccatctggttccacatgacacacggtttctggagcgccttccagacactcggcctcaacaacaaggtttggttctgccgctggaaagccatcggtaccgcctacgtaaccatcgttatgctcatgttcgtagccgtagctctcgcattctccttctgcggcggtgcctgcagcgcagcataaccattttccaacggtcggcaccggcggacactctttccgcggccctagaggcacacaccgcactacggcccggcccgcaaccgacggctcccgtcctcatataaccatacactaacaaacatccgatcatggctaacatcgattcaaagatacccgaaggtctagtagctgaaaaatggaccaactataaagcccaccagaaactggtgaacccgaagaacaagcgcaaactcgacatcatcgtcgtaggtacaggactggcaggagccagcgccgccgcttcgctgggcgaaatgggattcaaggttaaaaacttctgcattcaggattccccccgccgcgcgcactccatcgccgcacagggcggtatcaacgctgccaagaactatcagaacgacggcgactccgtataccgcctcttctacgacaccgtaaaaggcggtgactaccgtgcacgcgaagccaacgtttaccgtctggccgaagtaagcgccagcatcattgaccaatgcgtggcacaaggcgtacctttcgcacgcgaatacggcggcatgcttgccaaccgttctttcggcggcgcgcaggtgagccgtaccttctatgccaaaggccagaccggccagcagctcctgctcggcgcctactcagccctgatgtgtcaggtcaacgccggaacagttgagctttacacccgctatgaaatgctcgatgtcgttatcatcgacggccgtgcacgcggtatcatagcccgcaacctcgtaaccggcggacttgaacgctttgccgcacacgctgtagtactggccaccggcggatacggaaacacctacttcctctccaccaatgccatgggctgcaactgctcggcagccattgcggcttaccgtaaaggcgcctatttcgccaacccttcctacgtacagattcaccccacctgtattcccgtacacggcgacaagcagtcgaaactcaccctcatgtcggaatcgctccgcaacgacggccgcatctgggtacccaagaaacttgaagacgccaagaaactccagaaaggcgaaatacaaggccgcgacatccccgaggaggaccgcgactattacctcgaacgccgctatcccgctttcggtaatctcgtgccgcgcgacgtggccagccgcgccgccaaagagcgttgcgacaaaggctacggcgtaaacaacaccggactggctgtattcctcgatttctcacaagccatcaaggacttcggacgcgacgaaatagaagcccgctacggcaacctcttcgacatgtacgaggaaatcaccgacgaaagcccgtatgagactccgatgatgatctatccggccgtacactacaccatgggcggcatctgggtggactacgaattgcagacttccgtcaagggtctcttcgccatcggtgaatgtaacttctccgaccacggcgccaaccgcctcggagcctctgccctcatgcaaggcttggccgacggttacttcgtgctcccctacaccatccagaactatctgagcgaccagattaccgttccacgcttctccaccgacctgcccgagttcaaagccgccgaagccgcagtaaagagccgcatcgaccgcctgttcaacatcaagggcaaacgctccgttgactccctccacaaagaactcggccacatcatgtgggaacatgtaggcatgggccgtactgccgaaggcctgaagcaaggtctggcaaaaatgaaagaactccgcaaggaattctacgccaacctcttcgtacccggaacaaccgaaggagtaaacgtagagcttgaaaaggccatccgcttggaagacttcatcctcatgggcgaactcatagccaacgatgcccttacacgcaacgaatcgtgcggcggccatttccgcgaagaatatcagacggaagaaggcgaagccaagcgcgacgacgagaactacttctacgtaggttgctgggaataccagggcaacgatgacactgcccccgtcctctccaaggaaccgctcgtttacgaagccatcaaggtacaaacccgcaactacaagaactaatccgtagaacctcactaaaagacatcagaaaaatggctaagaatataagctttacaatcaagtactggaagcagaacggtcctaaggatgccggccacttcgactcccgcgaaatgcacaacatccccgatgacacttctttcctcgaaatgctcgacatcctcaacgaggaactcatcaacgaaggtaaagagccgctcacgttcgaccacgactgccgcgaaggcatctgtggcatgtgctcgctctacatcaacggaacgccacacggcaagaccgagcgcggcgccacgacctgccagctctacatgcgtcgcttcaacgatggtgatgtcatcactgtggaaccctggcgctcggccgctttccccgtcatcaaggactgtatggtagaccgctccgccttcgacaaaattcaggccgccggcggctatgtgaccgtacgcaccggtcagcctcaggatgccaatgccatcctcattcccaagcaggatgccgacgaagccatggactgcgccacctgcatcggttgcggcgcctgtgtggcagcctgcaagaacggttccgccatgcttttcgtcagctccaaggtgagccagcttgccctcctgcctcaaggacgtcccgaagcggccaaacgcgccaaagccatggtagccaagatggacgaactaggtttcggcaactgcaccaatacccgtgcctgcgaagccgtatgccccaagaatgagagcattgccaacatcgcccgcctcaaccgcgaatttatcaaggcaaaactccacgactaaatagcatcaggctgatatcgccctgaaaaagggctactataccgagaatccccgccgcgtacaattcgcggcggggattctcggtattccatatcttatcggacaactaatgcccctacatttcaataggataacacggttctattctcagcaacaacaacccctttcaaaaagcagactccatacaaagaaatgtatggagccgactcaatgtgtttcacaacggaataatccttattgtgaattgctttataattagtgctggcaaaataaacatttttccacgtaacagcaaaattaattaccgattaatttcgtatatttgtaaaataacattcaaaggtacaacatgaaaaacatcataggcctcgatttaggcaccaatagcatcggctgggcatggatacaacacgaagagaaagaaaaatccgccacaaacgataaattcctaatccccaccggaaggattatcaaaacaggatgccgtattatccccatggatgctgagatgatcggtaatttcgataaagggaacagtatctcacagacaagtcaacgcactaaggcacgaattgcccgccgcctgaaaacccgcttcaaaagtcgccgggaacgcctcaaccgtctgctcagactgacaggctttctgcctgaacactacgcggcccaactcgatggttacggtaagatatctgatcatcaggaaccacggataccctggttaaccacaacagaaggccaatgccagtttctatttaaacctgcctataaagaaatgctggaattattccggcaaaagcatcctgaaattaagagtgtaccttatgactggacaatctattatctgcgtcgcaaggcgctgactgaaaaaataacaggagaggaactggcgtggatactgcacagcttcaaccataaacgcggatacaatcaaagccgtgatgaagtggaagagaccgacaacaacaaaacagtagaatactttaagactaaagtaaaggaaatcagcagcacaggcgaaacgagcaaaggaaagaacatctataaagtcacatttgaaaacggcgtggaacacctcgtcacagccaaagaacggccacaatgggagggcactgtgcgcgagatcgttgttaccacgctattgaatgcccaaaaggacggttccccaaaagtaaccacacggatgcccaaggatgacgactggcaactcatcaagacgcgcacgcaggatctcataaaaaaggaaaatctgactgtaggcgaattcatcttcaaggcattgcttgatgacccttcgcagaaaatcatcggcgaacttgtacgtaccatcgaccgaaacttctacattgatgaactgcaaaaaattctccgacatcaagagaagtcacatcccgaactaaccgaccgcactctctacaaacagtgtgtcgaagccctttacccctccaacgaggcacaccgccggaacgtggaagcatggtctatgtcacactttatcgtaaaagacatcctcttctaccaacgtccactcaaaagcaaaaagtcactcattgccgaatgtcctctcgagagccgcacctttcaggacgaacaaggcaacctacaccggaccggcatcaaatgtataccgcgctctcaccccgcctatcaggaattccgcctatggcagttccttgccaacctgagaatcgttcaacgccaaagccacgaagacggccatcaactcaccgacattgacagaagcacggaaatattgaacgaagaggcgctcgtaaaactcttcaatcatctacggaacgtcaaggaaatcaatcaaaagaacctgctgaaactactgggtctaaaggaagaagactatcgctggaattatgtcgaagacaagacataccccatgggcgaaacccgctaccaactgatttcgcgactgaaaaaggcaggactatccaatgaagtgccggacgataaaatggaagaggcgctttggcatctgctctactccataagcgattacgccgaattacaacgcgccctttccacctttgcccgcaaacggggatgggacgctgaagctttcagaaaagcttttgaaaagtgcccgcccttcaagaaggactacggcgcctacagcctcaaggccatccgcaaactgctccctctcatgcgccgcggcagccattggcacgaaacagcgatttcccccgatgtataccggcgcatagaacactttgtcagcggcgaagaagataccgccatctctctccatgtacgacaaatagtggcagaagagggactacaaaacatatcgcaattttccggtctcgccccctggctggctgcctatgtggcctacggccgtcattctgaggcgacagacgcacaaaaatgggaaacacccgaagaactggccgaacacatcagcaagttccggcaacactctctgcgcaatcccgttgttgaacaagtggcgctcgaaacgatgcgtatcgttcacgacctatggcagaagatggggagcattgacgaaatacacgtggaaataggacgcgacatgaagcaaaccgccgccgaacgcaaaaaagcccacgacagaaatttgcaaaacgaggccataaacctgcgcatcaaggcattgctcacagaattcatgaatccagaaatggagataaaagacgtgcgcccctattcgccccgtcagcagacactgctccacatctatgaggaaggagcgtttgaaaaagcccggcatgacaatgacgccgaactcgaagagatgaacaacatcatcgacaaattccggcaaaccgacagccaaaagcgccccacacgtgcagaaatccaccggtatcgcctatggctcgaccaaaaatacgtatcaccctacacgaaacgccccatccccttagccaaactcttcactacggcttacgaggttgaacatgtcataccacgggcacgctactttgatgattcctataacaacaaggtaatctgcgaagccgaaatcaacaagctcaaagacaagatgctgggcttcgaattcattaaaaaacacggaggcggcaccgtcaactgccaaggccgcgaagtcagaatcctaacgccggatgaatacacctgccttgtggaggaacacttctgcaggaacccgcgcaaaaagaagaacctgttgtccgaagaaattccggcacagttcacggcgcgtcaactcaacgacagccgctacattgcccgcttcgtagtgggcatactctccaacattgtgcgggagaaagacgccaagggccgtctggaacccgaaagcacatcgaagaacgtcatcgtatgcaccggtaaggtaaccgactggctcaaaagagactggggattacaagacgtatggaaccacatcatatactcccgcttcgaacggctgaacgataaagtaaaaagcaaacgtttcggccaatgggaaaacaagaaaggcaaacgcgtttttcaaatcaacatgccgcttgaactacaagccggcttcagccgaaaacgcattgaccatcggcaccatgccatggatgccatcgtcattgcctgcgcatcgcgcccgataatcaactacctgaacaactgctccagcggcgaaaaagaacattatggcctgcgggaaaatctctgcaccggcaagtcccgtttcatcaagaaaccatggagtaccttcactcaggacacagaagaagccctgcgcgacatcgtggtaagcatcaagaagaatctgcgcgtcatcaccaaatccactaatttttaccagcgctacgacccggaaaccggcaaaaagatttttgtccgacaaacccgcggcgaccattttgccatccgaaaatcactacacaaagacacggtctacggcgaagtgaacctgcaaaaaaccggcgaagtaaaattgaaagaggccatcaagcagcccggacgaatcgtagacaaaactttacgacagaaaatacgcgaactgaagcgactgcctaactattccgacaccctcattgaaaagttcttcctccaaaacgccgatccgatctggaaaaactacgacttcaagaaaataaaagtccgccaattctccaaagacaaggaggcaacccgccaggtggccacacgcaaaccgctcgaccaaaatttcaatcaaaagaatatcgcagatatcaccgacacgggcattcaaaaaatcctattccggcatcttgagaaatacgccggaaagagtgaggaagccttctcacccgacggactgaaggccctcaacgagaacatcagggaactcaacgacggaaaaccgcaccatcctatcaaaaaggtaagggtggcggaaaaactcggccttaaatttcctatagggacaagaggaaacagaaaaatgaagtttgtcgtcgcagacaaagacaccaatctcttctttgccgtttaccaacgagaagacggcaaacgcagctacgcgacaatcccgcttaaggaagccattgaacgggccaaacaaaatctgccgcccgcacctgaaactgacgaagccggccgccggttacagttcatactctcacccaacgatttagtatacctgcccacaaaagaagaactcaacgatgaagtaagagaagaacacatagatgtcaacagaatatacaaaatggtatcggcaacaaaagagcggtgttacttcatccctcaccatatagccggcatcatagctccgggagaagaatataatgcaatgaacaaaatagaaatatccgatgacggcctcagcatcaaggaacattgcatactcctgaaaacggaccgcctcgggcgctacaaactcaaaaaataagcccactacatatcgcagcctgcatcctcatcctgccacatctccattcaatatccacctaacctattgaggaccatgataaagaaaacgctctacttcggcaatcccgcctacttgtcgctatgcaacgcacagatagtcatcaagctgcccgccgtagaaaaaagtcctaatgtagccgacatcatccgtcaggaatccgttgtgacaaaacccatcgaagacctcggcgtagtagtactcgaccaccaacaaataaccatcacgcaaggactgctcgaagcattgctcgaaaacaacgttgccattgtcacctgcaacagccggagcatgcctgtaggtctgatgctcccactgtgcggcaacaccacacaaaacgagcgtttccgccatcagctggaagcctccgtccccctacgcaaacagttgtggcagcaaaccatccgtacgaaaataaacaaccaggcaaccgttctccgccaatccaccacagccgagacacgctgcatgcagatatgggccgccgatgtgagaagcggagatccggacaatctcgaaggccgcgctgccgccttctactggaaacgtctctttgccgacaaacatcccggcttcacccgtagccgcgaaggcgaaccgcccaacaatctgctcaactacggctatgccatcctgcgagccatagtggcccgtgccttggtgtgcagcggcctcttgcctacatggggcatacatcatcacaaccgttacaacgcctactgtctggcagacgacatcatggagccataccgcccttatgtagacaaactcatcgtcgatatcattaatagtgcagaagactatacttctctgacacgtgaactcaaagcccgtttattgggcatccccacactcgatgtacagataaacggccaacgcagtcctctcatggtagcagtagccacaaccactgcgtcactctacaaatgtttcgccggcgaattacgtaaaattgtctatcccgaactatcatagacccttttcatgaaacgcctcagcgaataccgcatcatgtggatacttgtatttttcgacctgcccactgaaacgaaaaaagagaaaaaagcctacgtccagttccggcaaacgttacaacgcgacggattcacgatgtttcaattctccatctatgtacgtcattgcgccagcagcgaaaacgctgcggtacacatcaaacgtgttaaaaacaacttgccggaactaggaaaagtcggtatcctatgcatcactgacaaacaatttggtgccatcgaactcttttacggtcaaaaagcacaacatccacaagccccgaatcaacaactagaacttttttaacaacaacaatgaccggtttttttctgataaaaaactcggtcattacattgtccagctctattttttattttcaaacaatttatatatattactataaatcaacaatatacatattataagttgtttcttatagagcaaagatactaatttgtaagcaattcacaaccgaaatgtatggggtaaaggacatatcacagttgtttcttatagagcaaagatactaatttgtaagcaattcacaacatcccgtatcaatcaaaagagacaaaagagttgtttcttatagagcaaagatactaatttgtaagcaattcacaacaacgtcccccacctgaacagagtgaccatgttgtttcttatagagcaaagatactaatttgtaagcaattcacaaccgctcaaccctttctcgctggcacctttctgttgtttcttatagagcaaagatactaatttgtaagcaattcacaacctcggctacagaccactcgaggaaacgaggttgtttcttatagagcaaagatactaatttgtaagcaattcacaactattcctgacgatgaatggcaatggaatacgttgtttcttatagagcaaagatactaatttgtaagcaattcacaacagataagagcgtggatgctataatctgcgtgttgtttcttatagagcaaagatactaatttgtaagcaattcacaacaacgtattgcacccggtcgggaaataacaagttgtttcttatagagcaaagatactaatttgtaagcaattcacaacattgaaagcaatgaattgttatgctgttgggtgtttgaggtactaatttgtcagcaattcacaacagtatctggacaaaactggcggacatagtcgtagttgctgtacatggaaagatcagcgccaagcatctctgaaatgtgggtaagatgcactcctacgtggttcatgaatgtgtcggtgtaggtttctttctttcttttttctatgtcttcctttttgtcgtaatatgggttatgtcctttgatatcttttacaatagaaaagtccatacatttctttgccatattcaacatgaatggctgaattagtttttttgctttttcgttgtcgttgcaggaggccacaataatatttattgttaccaaatcacggcgtatatcttcacatataatctgttcagattcgtttttcttgtcaactattactttcttgatcttctgtacattgaatgttgtctttatgaagagaatccaagtccaaacctgaatgattacgattattaatgttacgaaagtgattaaagtttccattgttttctgttttttaagtttttgataaatttattaaatggtctaaaatactaatttgtcagcaattcacaactgaaagccctttcggagcagaacgacattaacatttttaactttccgtaactttcggaagtgttaagacataggttatcaacaccggaatgttaaaaggctgtattggatttttaacacgaatacggacttttaaaactgcaatacggggaatttgaggaagaaataccgcgttttttcctggaatcgtgccggaaaaacacccgaaaagcgggctgtcttttaaggacagcccgctttgctgttacaaatatacgacattttcagcccgaaagcaaatagtgttaaaaagccatgccgcccacacggagcgccgtttccgagcagcggaacgcctacacgctgtaaccgagcaaatggagaatgaggggggaaagaatggccgtgagcaaaccgttaagcgtcaggcccagcgaagaaaaggcgccgtaacggtcgctccgctccatagccgccgacgtgcccatggcatgagccgctgttcccatagaaagtccttgtgctattggacttttcacattgcccatcttcgttattctgaaccctgccatgccaccgaaaataccggtacacaccaccacagccgccgtgagcgacggaatgcctcccaccgccgaggaaatttccatggcaatgggggtggtgacggctttgggtaccagcgacatcagtacggcctgggaagctccgaagagcctggccacaagcactaccgaaactatgccggccacacagccggccatttcggcaacgagcagcggcaacatctgtttccggatggtgaccagctgcttatagagcggcactccaagggccaccaccgtcggcttaagccaaaagtcaatgtagtcgccgccggcacgataggtggagtagtccacacgggccaggagcagaatgacaataagcaccgttattgaaacaagaatgggattgagcagtctgacgcctgtcttcgcctgcaactgccgggcaaggacaaacacgacgaacgtcagcgctatgagaaacattttattggcaaagaaatccatatcggtcaacatttttcatcggtagaggccacacggcgcttacggaaaatatttttcaggcgcatgtgccgccgcacaagttgatgtacatggcccgtaacgacaagtatgacggccgtgctcacgaccatggcgccgacaatgggcagcagctctttgcccaacagatcgagacagcccatcagtcccacgccggccggcacaaagaagaaaccgagattgtgtacgagaaaatccgacattttctccacctgcgagagtttgaccgccttcagctccaaggccagagtgaggagcaacattccgatgatgctcgacggaacgggaacgtctgtcagccaaacgaccagctcgcccaaagcgagaaaggtgaacagcacgccacactgtagaattacattcataacttatcgtttaaagaaaaaatcgcccatcggagttttctatgagcgatgtttcagatttatcagtaggacgctgcaaaattagcatttattcctgacacagccaaccgcagatgcgccgcatgccttaacgacataataacttactattgttttttaaaaaaatacgacacccgttcatcggaaattccgtatatttgcagtatgttaaggtacttaaaaaggaaatgcccatgaaaagaaaaatcctgtgggggattgtggcgtcaataatctccctgagtctcgccgcatgcagcgatgacaacgatgacgctatggactactatgtgcgatacaccgtaggcgctactgcaggggatgactttttcatcagctacaatgataaaaaaggagagccgcacattgaccagcaaaaaaacgccgcaggaacggtggaaatcgtcatcggccccgtacagcggggattcaaagcagagctttccgcatcggtgaatggcggacatgctcctgcatattcgcaaatagacgtgagctacaagggtaacccctttgtgaggaaggttcatctgcaacaaggcacacacatctactacaccatcaccggcgaagagcgctgacagttcttcacggccggcagcgttcaccgcatatcgggtaagaaccgactgcaacgtaattactgtacgttgcagtcggttcttttaattcttctcggccattacagcctccggcagcaggaacagccaggtagccacgcagaacggagctgtcagcgtaggaatgccccaaggaagcatcagggcgttcatggctccctgaacaagcaccgtaaaaacaatggcagccaaagtgatgacggcagtacgcacgccaggtttgaaaaacgtgtttcccagcgcgatggctgtaagcacgggactgaaaccgtagagaccgttggaaacggcttcaggcgaggcctccaaacaaacggaaattcccaaagctatgcccgaccccaccatggcccaaatggcggcccgccagctggaaacggccagggctatgacaaaaaagaggcctgccacccaggaattgataagaaacacctgagctatacctttgagccaataaacggccagcgaagcgggcgagcagtcgggttccccctcagccaaagcctccgccggaacagacagtggcaaggcatcgaactgacgggcggccatgagcgccagccaggtgagaaacacgaaagggaaggtaagcgaattgattttccacgcagacatcatgccattcagtccccgctgcaaaccgggagcaagtatggccaaaaacaccagcagcgcccacatcagccacgtatctgccagaaacaccggaagagcgcaccccaccagcgtaccgttaaagccccaaagaccggcctcaccctgcgttttgtcgggaactgtcaggaaaccggttgccatggacaagccagccccgacaacggcgccccaagccacttgaggcgtaccacactcataagccccccagaagattccggcaagaaacagccagccggccagggcactgcgctgaaacataacctggctcaccccacgggcaaacgccacagacacggagcgcaatgaatcagcatccgtaacaaaagaaagtagtcttttccgccgtaaactcatgatcattcggttttacagacaaagatacaatgaaatattcaaaagtgctcccgaccgaaatattttcattttcccttacaacccgcggtcacccctctaacatgcctttatcccgcggcattgcttcatcgggataaagtgttccagcccatcgaaacgaaacaccaacgccggtactcactgcataaggctctgtcttctataatcggcatgatgaacatcaatgtcagaaaaacaaacggatttctttctcacaggaaataaaaatcagtaattttacaaacggaaacaatcactcccaacgttttttgattcaattacgacattaaactttccaacaaaaccatgaccagacaaaacatcatgcggatggcggttttcatagtgtgtatcatcctgctcgcaggagctgtctccgtttcgtcaaacactctgatgagcgcatggatacctttcgccggatcaggagcggcagcattgctttccggaacggcactgtggagggcatggcgccgcctgacaaattcggagaaaatcctgcctaactacctctgtcacactatatgcaccggcattgtgctggcggcggcattctacatctgcaactacgcctttgctaataagacagaaacccacaacacccaagttgtcgtagaaaagaaataccacaaagtgaggcaccacacccgccgcataggccaacggcattacacgcaaggacgaccatacaaggtttactacatgaccgtaagattcaacaacggcagtacaaaggatctttccatacctctgaaacggtactgccgcatccgccagggcggcacaatttccctgccggttgcacgcggcctgtttggagttcctgtgattatcaataccaccgccgcccgctgacacgcggcgccggcccgccggaaacatcggcatttatcatctgcccgtagcggaacttttcacatcagagacaggtacagagccatcagcaggattagcccgcagcgtaaccgttagtggaatttaaaatcttttattactcatcaaaataaagtctctctggctccaagaactttctatcagacagcaaaatgcagaaggagccattctcacacgaactctgattctgactgcaaaaggccacagttccatcagcaacccatagatgccatcaaatatcagcgcgacaaacaaattcttattgtttgtcgcgctgatatttgatggcttaaatgcttataaagctttaatactcgtcctcgttgaagagcagcataagtattgataatcagtgtattaaatgttgacagcttgcatttagccaaacaaaccacgccatctgaggcggtctgaggcgatttgagggcaaatggccaaacattggctaaacattggccaaacaaacgccaaaaacaatagtattcatctttcttgtgaggatttcctcgatgcttggcaagtttatttttgacacattccagcataagcatcagtaaatgacctatttaatctcgccaaaaatattcttttggcaagtttataacatttattaacagttgccgtctgtgattgtattcttcagttcaaagttttgaaacaagttcagagcctgtcagaacatccatctttgagaacgcaaacagcttctttccaaggtctttgagagaatgtccgatatgatagacttcctcatcaattatcagaaaacggtcgtgagccttattgtaagcgtgtaaggtcacgcccggatactgggcattgtgtcgcgcaacatcctgacgaagctgttgtgaaattttaccgtcgtaaatatcaacagtcacaccgggatttcgttttgatagttgcaccaacaccgaatcgtcaacatagctgtcaatgacgactatccgttttttagcttttctaattagtttggcaatgaaggcatacgcatcgaaaatctggccattgaagaatacaccctgttcgggttctttgggttcattaaggcgatcaagaatagcatcgaccttttcatcagtcttcaactgtttcatctcaatacgttccatcctttggaaaattgaggcattatttatcaggaaatttcgcatagccacaaaagcatcaattatacggatgcttgtatgtacggcagtttcgcttttcaatacggcagaaagcatagcgactccctgttcggtaaaggcaaaaggattaactgatgagtgtttgagaccattgaaccggtcgcaatttgcgaccagttcatctttctcttgatttgagagctgaaatctaaaatgttccgggaaacgctcaacatttcttcttacctgctcattaagacgtttggtttcaacaccatataattctgccaaatcccggtcaatcattacctgtttgcctctcagggtaaggatacggttttctattggcattgctaactggccacaatatgtgaccggttccttgttcgctgtattttgtattgatgaattgttttcttgtgtagattccatatgcaaaggtacctaatatttctgaaatataaggctatatatgagcaataacttccaatcagcactcatattgtgccgattggaagtttatcacatggggagaatacctgcggaggcatagggttcataatggaatcgtcttagaaagagatccacatcttcctgagtgtaccaatatttatctccctctcttgaatatcctaaatatccattgtcccgaagtttctttagatatttgtctttgatattaagaagggccataatggatttattatcatacactcgtagctccgattccttttcatagcagctgttacacttgtgcttaccctctaaaatgctgaggattctggtcaagagttccctgtcattcagttcttttggattactatccatttgttacaggtatcttgttgcgtggaaggaaatagacagttgtcgggacaatccaactgatagtctgcgtaggcgcagatgataagtgtctaatttgatgtttcatattttaacgggattagtgggtgatttgaccgaatacagagagggtggcccgcattccggactgcgggtcgccggtatctatatttcggctgggattttgtgaaagcgtatgaggcactcggctatcttaggctttgaacgtgtaaccatttatgaactgaaaaagattgctgtctgtcagcactttcccaacttttccataaggtttcccgacatttcccaacttggaaatttgcaggaaacaaacagccatattccggttgtttctatatcgaatccgatacggtacggagctgtctatccgacaaccgacagggcattatcaggatacaggtcatgacatatcctgctatttcttaaatcctgccataccggatctatccctatttttttagtggcaccgaccattatgccaatccgatgtaacggactggcaggctgatctctatgccttcttgcaggataaatatggaggctgcgccaaatcttaacgtgtcttaaaaaaacagggaactacctgaggaatacctcagcagggttccggcttatggcgaactttgcggcataacactaattccgaaaaaatatgaaaacaaaaatgctcacagacttcgccgatacgatacgcgaatacaagaaaatgctgacaatggccatcgtcttccgattgatgcaccacttatataagaatcatagccgatgaggactgaggaatacagcacacttgtcgggcttatcagggaactggcatcggaggtcaggaatatcaagacaggtcttgacagcaagatcgaccatgtggcgaagaaggtaacggaggcttttcaaggcttcggcatccttgacccggacgaagaaacttggacggagcagcaggtctgcgaaagataccacgtttcaagacgcacgatgtacgagcatcgtatcaacggccggataccattcataaggaacggcagcgggaagaactgcaagatcctttaccggaaggctgatgtgatagagttcttctctttgcagaacgcatgacacacctacaacaaacaaataatcccgcgccatttcggtggcgcaagtatcaacccccaaaacactttttaatttatggcaaaagaccagaacttagaagaagtgcttatcgcccgcaacaacg

SEQ ID NO: 725 - DNA, 23471 bp, synthetic construct
  misc_feature 1..23471: note = Synthetic
  source 1..23471: mol_type = other DNA
tggtcagatcgcataccacatgcagcacatgaccgccgccgatggcgtaaccgtttaccatggcgatgaccggtttaggcagtgaccggatttgcttttgtacgtccagcacattcagacggggaactccatctgtgccgatatagccgccatgcccctttacgtgcatatctcccccgctgcagaaggctttgtcgcctgctccggtcagaaccactacattgatatcctggcactcgcggcagtaatacagggcgtcgctgatttccgaagtggtggtgggggtgaacgcgttgcggtaacgcggacggttgatggtgattttcgctattccgttgtaaaagtcaaacagaatatcctgatattctttgatggttttccattctcttgtttccattattcatttttatttttaagtccgtgataatattctcttaacagggtggtgtctttttccttgtcggtaaacacctccagcagcatgggttgcatccgtgtctcgggtgaggtgaatggctgcatcgcttcttccagctcttcttctccggtcactttcatgtaaataaagccgcgttcttccgcccagcctttggcggtggtgtaatgctcggctgtgataaactccctggaacggcttgatttgtccattccaggcagggtatggaatatttctcctccttcgttattcagtaacaggatgcggatgttggcaccgtaattttgattccacagtgcgttcatgtcatagaagaagctcaagtcgcctatgatgatgaaattcagcttgctggaagcggcggcataaccgatggcggtggacagggagccttctatgccgttcactccccggttgcaacagatttccacctggggaggaactgtaaataactgtgcatagcgcacggtggagctgtttgccagatgcagggcacagggttcgggcaatgcccggatgagttttccgataacggagatttcggaataagcaaggtccggcatcggaatggttttgcaatagttttcccacatcagcggataatgggtaggtttgttgtccagcaggaaagctattttttccaagaactcaaacggatccatctcgatgacggtggtcaggcaaccgtataaatcggctatcttcccgtcggcggcaacatgccagtgttcgcgcgggggatgattgcgcaggtatttcttcaattgtttggatacgatgtgtccgccgtaggtaatcagtatttcgggggccatgtcttcctggcgttccggtgtcatggaataaacggcggcgtcgaaattcttgataggaatgccggggatggtctggttgcccagatgttccgtcagccaggcgaaatgtttataaagcggtttcacatattttttctcgaacaggtaaatcagattcatctggcctaccacaaccatgcgcttgttgtacttgttcagccgttcgatcagttccttatagtcacggtcgtacacgctcagtccctgataacgggtgatgacacgtacttcgggaagtgttttggcggtgaagcggtaaatgggttcggaaatgggtacattgatatgtacaggccctttgccgtggtgggtggtttccagtatggcttcgttgataaggcggttgcaaaaccattcgtcttcctcagtatgtacttcgggcaggttgacagacatcttgactaatgttccgaacacatggggctggggcagggtttgtccgtccatttgtcctatccaggcagcggggcggtcggcggaaatgacaatcagaggtacttgttggtaaaaggcttcggctacggcagggtgcaggttcagcagggccgaaccggaagtgcagcatactgcggcagggcctcccccttgtaaagataggccgatggcaaaaaaaccggcactgcgttcatcggttacagaataacaagtgaagtcctctatattggccagagtatgtacgatggcagcattacggctgccgggacaaagcactattttccgcacaccgtgcgctttgagaagtgccaccaactgaagtatgttctttttgtctgaatacattattcttctactttaattgtttccatttatttacttataaagtcaggatgaaggatgctccgcatcgtattcatcttgtctcccgtttccatccattccgattctacttccgaggaagccagtattcctcctcctgcatacaggatggcttcacccggctttatttccatgcagcgcagattgacgtagatatcggtatgcccctctgtgtccagccagccggtgaatccggaataataactgcggtcgtacccttcattgtccggaataaaccggaaagcctcctctttgggcaggccgcagacggcgggagtgggatggagttcttgcaataaatcgcctatatggtctgtatttttcaacaagaaataaaaatcggtcttgaggtgtaccaattgtccggcacgggcggtataaggacctttttccgtcatcttgttgccgaatcttttggcgatccggcggatgtaatcagccacatagccctgctcttcccggttcttcttgtcccagtctgtcggcatcacttcgttctgcatcggcatggtaccggccagggccacggtgtgccattctttgccgtgtccgcttaataagatttccggtgtgctgcccagccaggttccggaagcaggggtgtggcataggtaaatcatcatgcgcggatagttgttgcaggcccggacaaaagcgccgagtggtgaaaaatcatctccgatatgtctggcggaagaacgtgacagaaccagtttctggaaccgcttctcttgtaagggagtgatgaaacgcccgaatgcgcgggtatattgttctttatccgtttcttcggaaacaaaaggggagagttcactctgccggcttttgcaggtgagcagggcatccgcacattccagtgaagacagtgcttcgctgatttcgctccagtcgtatgcggtgacatccggacggataagtaccaagggatgttcctccgatatccggaaaggagccatgacaaatcctttctttccattcagttcctgaatgtccgctaattgttccacatcgcccgaggtttgcaataccaggtagcattcgtctgtccaaggtaaccggtagagggcgaaaccgaggcggctgtgtgtcaggcaatccaataatttttgcgtatgtatatctggtagattcatttctttttcagtatgaaattaacgacacgaacagtagaaaccagttgtccttgtggagtggtgatatctatattccatatatgcgaggatctgccgcggtgaatcagtttgccggtggcgaatactttgcctccgacgggcacggccgacagatgatttccacttacttgtactccgcaggcatattcgtcttcccggcatagcgacgtagagccatgccctgccacaatctcggccagagccagtgacgcgccgccgttcaacataccaaagggttgtgaagtacgatggtctacaggcatttcggcatgtaccgcatcctcggtggagggtagaaaccggatacccagatgttccgccatcgaattcgaataatcaggtttgcaggttgtttcttccatcatttgtatgtctgttcttttctataaggctacaaaaatacataaattttagatgaaaaggtgttgtatgtatgtcttttactaacaaaaacatttatttaaattcaattgtttgggagctttttcgatacttataatatatgatgccgatgacgtccgctataaaccatccgataggaatagaccaccagattccgatgaccccgatggcaggaatgccggcaagccaataggaaagggctacacgggttcccaacgataccactgtgagcactacggacattcccggcatacggatggcacgataatatccgtataacaggaacaaaatcccgattccgcaataaaacgctccctcgatgcgtaaataactgataccgatgttcagaatttccgtttcgtgggggcggacaaaaatcagcatcaatggtttggcgaataaaaagaccagaatggaaatgaccagagagaagagaacggtggtaatcaaggcacttttcactcctttgcggatccgttcctcttttctcgctccgaagttctgggcaataaaggtggaaaaggcatttccgaattcctgtaccggcatataggcaaacgagtctatttttattgctgccgcaaaggcggccatgactacagtgccaaaactgttgaccaatccttgtaccatgagaatgcccagattcattaccgattgttgtacacaggtcagtgcggagaacgaagtgatctctttcaggcagtgacggtcgaaatgcaggtcgttgcggtgtaatctcagttcggggtatttcacgtaggcatatcccataattcccaaagcggatactccctgtgcggctaccgtggcgatggctgctcccttgattccccaatccaactgcaagataaagaacaaatccagcccgatgttcagtacaacggaaaccgccagaaaccaaagaggagtgacggcatctcctatggcacgcagcaatgccgcatagaaattatagataaaggtaaagccgattccccaaaagataatccacaagtaatcatacatcatgccataaatatctttgggaatctgcaatatcctgaggatgggatgaatccagacgaaaaccgctatatttagaatcaatgttactgtgccgatcagcaggacggatacatagatgctacggcgtagggaatccgtccgtccggctccatattgcaaggaaaaaacggttccgcttcccatggacaatcccagcaggatggaaataaggaaaaccatcagcgtgtaggcggaaccgacggcggccaatgcgccggaacctatacattgtcctacaatcagcgtgtcggctatgttgtaacactgttgtagcagtgagcctataatcataggtaaggtaaaacgtagcagagtgccggtgatgcctccctgcgtcaagtctattttagataacatgatgtgcgtctgttcgattcaatttcttatttattttgaaatttattgcgaaggtagggaataaaatatcaaacaacaatagagattgtctatttaatacctggaatgttctttctccttaaaaagagttaacttgataatattttccataggaaactttttattataagaaatatcatgtatgtttgcataaagtttccattggaaaatattaaatcaaataaaatagttcgattatgaagtatatagtaataggaggcgtagcaggaggtgcaactgctgccgcacgtatcagaagaaacacggaacaggcggaaatcattttgttcgagaagggagaatacatttcgtatgccaattgtggtctgccttattatataggaggtgtgattgcggagcgggaaaaattgtttgtacagactccggaggctttcgggaaacgttttaacatagatgtgcgtacccggtccgaggtaatagccatccattctgccgataagacagtggatattcgtacttccgacgggaaaacttatacggagagttatgacaaattattgctttctccgggtgcgtcgcctgttcgtcctcccttgccgggcattgacaatgaaggaatttttaccctacgtaatgtgaatgataccgatgctatcaagagttacttgcagcagcataaggtgaaacgggcggtaatcatcggggccggattcatcgggttggagatggcggagaatctgcaggaagccggtgcggaagtggcggttgtagagatggcaaatcaagtcatggctcctattgatttctctatggcttctttggtgcacgagcatttgttgcagaaaggagtgcatctctacctggaaaaggcggtggcttctttcgagcgcacggtcaacggactggaggttatttttaaatcgggcgaaaggctgcctgccgatatggtgttgttatccatcggggtacgtcccaatacttcattggcgacagaggccggactggagataggggagatgcgcggcattaaggtgaacgattacttgcagacttccgacgagcatatttatgcggtgggcgacgctatcgagttccgtcatccgctgactgatagaccgtggttgaattatctggctggtccggccaaccgtcaggcgcgtattgtggcagataacatggtttttggaaataaggttacatacgaaggggctgtcggtacttccattgccaaaatttttgatatgactgtcgctgcttcaggccttccggcaaagcggttgaaacaggcaggcattgattatttgtcggcaaccatccattccggttcccatgcgggatattatcccgatgctttacagatgtccattaaaataaccttctctcctgtgaacgggaaattacttggagcgcagattgtggggtataacggagtggacaaacgtattgacgaattctcgcaagtgattaagcataacggaactgtatatgacttgatggctttggagcaggcatacgctcctcctttctcttcggcaaaagatcctgtagcagtagccggatatgtagccggaaatatactgagcggaaagatgaagcctctttattggcgcgagttgcaggctgccgatttgagtaaagttacgttggttgatgtccgtactcccgatgaatttgcactcggtgctttgaagggggctgtcaatattcctttggatgatatgcgcgaaaggatgaaagagattcctcaggataagccggtctatttgtattgtggagtggggttgagagggtatctggcttctaatatattgttacagaatggctttggggaagtaaggaatttaataggaggtttgaaactgtataaagcggcaacggctcctctgcccaagccgaaggagttctcaaattccggatcttcaagttctgattcttcaaaagttgatcattctgaacacagtaaagattctgctgaagcttatactattgcctcttccgtcattccttctatgaaagcaataaaagtggatgcttgtggcatatcttgtcccggtcctatcatgaagctgaagaagagtatggaagaactggcggacggcgaacgtctggagattgtcgctacggatgccggtttcccccgcgatgccgaagcatggtgccagactaccgggaaccgttttgtctcagtaaagtcaggagcaggaaagtatgaggtaattgttgagaaaagtactccgcaatcttcttcctcggaggtttgccgggaggataaagggaaaacttttattctgttcagtgacaacctggacaaagttttagctacttttgtactcgcaaacggtgcggcggctacgggaaagaaggtgatcatcttctttactttctgggggctgaatgctatcaaaagattggacaagcctgcggtgaagaaagatatctgggggaagatgttcggcatgatgctgccttccagttctttaaagttgagattgtctaaaatgaatatgggtggaatgggagccaggatgatgcgatatatcatgaataagaaaaatatcgactcactggaatctctgcgtactcaagccattcagaacggagtggaatttatagcttgccagatgtcaatggatgtaatgggtgtgaaacgtgaggaattgctggatcatgtgactattggcggagtggcaacctatatgaaccgtgccgaacaggcgaatgtaaacttgtttatttaaatttgcatggagaaaataaaatcaatatgtgtcatgagagagctgttcaaggctctctctgaacttgaaacccgcttgatggaacaatatggagtgtcattgaatgaggcaatggcactttgttgcattggcggagatacgctgacagccagtgtgatatcggaaaacacaggtctgtctgcttcgcatacctctaaagtcatccgttccattgaagagaaagaattaatcgtccgtaatttgggggataaggataaacggcagatgcattttactttatccgataaagggcgtgaatgtttggaagcgctgaaagcaaatgaaatagaaataccggaactattaaagccattgtttaaataaacccttctcttttccatttgtttattccggatatgaaactggagaaatggaaaaacaagtggaaggagtggagcaatctgcgcaaatggcaaatatggaaactgaagctgattgatgcccgtctgtatttcgtgagcatattcgtggggctgcttacgggactggttgctgtgccttatcactatcttctctggtatttctttgatgtgcggaaaacttttttcacggcgcattatccgtggtattggcatgtattgttgttttttatcttatgggggattctgatctttgtcgcttctttggtaaaacgtatgccattgatagccggaggcggtattcctcagacacgtgcggccaataacggtcgtatccgttatgagcatccttttaaggaactggtggccaaattctgcggaggtgtgttggctctcagtgcggggctgtccttgggacgcgaggggccgtctgttcagatagggtcttatataggaacacttatctcccgttggggacatatcctgaaaggggaacggaaacaattgctggctgccggagccggtgcgggcttgtctgccgcttttgccgctccgttgtcttcttctttgctggtaatagaatccatcgagcgttttgatgcgcctaaaaccgccattactaccttgttggccggcgtggtagccggaggagtggctagttggatgttccccacgactccttatcatctgattagtgcggtcgttcccggtttatcttttatccgtcaggcagagctttatattatctttgccgcccttatggctgtcattgcaaagttttattcgctcatcgttcctttctttcaagaaaggatacctgccatgaaactctccattcctgtcaagatgttgtatttattgatcatagcttatgccatatcgttaacagagacgaatctgacaggtggcggagagcagtttttgatgatgcagggaatgaatggaactcatgatatccggtggcttactatcatgatgcttattcattttgtttttacgctgttttctctttcttcgggtttgccgggaggaagtttcattcctaccttggttacgggaggattattgggacaaatcttcgggttggtattggtacagcgcggatggatagggtatgagaatgtgagttatatgatgctgatcgggatggtggcttttttggtggctgtggtgcgtacccctttgactgccattgtcctgataacggagattaccggtcatttcgaggtgttctatccttccatcgtggtaggtgggttgacttattatttcaccgaattgttacagataaaaccttacaatgtattgctgtatgacaggatgttccgtagccataatccgaagtcttccgaaggggctggtgcccgctatcatctttttgtcgagataatggatgggtcttattttgacggaaaggaagtggatacattggctttacctaatcattgtatcattcgtagtatacaccggaatcgtaaaaacttacttcctcaggggcaaaccctggttcccggtgatcaagtggagatagaaatggatgcgcaggatatagaaaaattatacgaaccgttggtcagtatggcaaatatctattaaaagatgagtctaaaaaagcccccgttaaaggacgagggcaacctaaatgttttcacaacggaataatccttattgtgacttgcttcaaattagtattgcaaaactatgaaataaatatgtaaaggacaagtgattattagaataatttgataactttgaaaagttttgataaaatagttgtcttatgaaaaatatagtgggtcttgatttgggtaccaatagcataggttgggcagtagtaaatggaagtgtcaatgacgatggaagtgaacaattggttaagatacaagcttctggaagtcgcatcatacctatggatgcagctatgataggagattttaataaaggtaattccatatctcaaactgctgaaagaaccagattgcgtggagttcgtcgtttaagcgaacgatatctgcttcgcagagaacggttgcatagaattcttgatattttaggatttttgccatttcattttgctcaagatttagataggcatggtaagatagttaagggcaaggaacctaaattggcttggcgtaagaatgaagctggtcagtttgaatttatattccaagattcatttaaggaaatgctggaggattttaagctaaatcatccgaatctgataacagatgataaaaaagtaccttatgattggactatctactatctccgtaaaaagggattgacttctaaaatttcaaaagaagaattggcgtggatattattgaattttaatcaaaagcgtggatattatcaattacgtggtgaggaagagaaaaaaaatgataatgttatgattattaattcaaaagtgattgatgttgttaaggcagagaaagataagaaatatgaaaaatattggtataatgtactattggagaatggtttattgtatcgagctgcattttataatgatatttctttttggaaaggacatactaaggaatttgttttaaaaactattaaattaaagagtgggggtacaaaacaggaattatcttttttaccatcttttgatgaaatagaaaagatggagaaaaagcaaaaagataaaatgtacttcaaaataaaattgaaaacagaagcggatattgatcaggctcataagactgtaggtacctatatttatgatacgcttttaggaaatcctagtcagaaaattcgtggaagattggtgagaaccattgagcgtaaatattataaggaagagttgaaactgattttggataaacagaaggaattccatccggaattgcaagatagagcattgtatgctgcttgtgttgaagaactatatacaataaatgaagcacatcggaataatattggtaatcgggattttacttatttgtttttagaggatatactcttttatcagcgtcctcttaaaagcaaaaaatcattaatagacaattgtccttatgaggagaatcagggtcttgataaggaaacgggagagataaaatcttttcctgtaaaatgtattgctaaatcacatccgttgtttcaagaattccgcttgtggcaatttataataaatctgcgtatttataggaaagacctggcacaagatgtggatgttacaaatgagttattgaagacagaagaagattatgttgctttatttgactggttgaatggtaaaaaagaaattgatcaaaaggcttttttgaaatatccggtttttggactgaaaaaagagatagagaattatcgttggaattatgtgcaagacaaaccttatccatgtaatgaaacccgtttattgatgttggcgaggctggagaaatgtgatatttctattgaattcctgacaaaagagaatgaggaagctttatggcatatattatattcggttgaagataagaatgaaatagtaaaagctttgcagaaatttgcggataaacacgacctgaatgcttcttttgttgatgtattccggaaattcccgccttttaagaaagaatatggttcctattcggcaaaagcgattaaaaagttattgcctttaatgcgtatgggaaaatattggagcgaggattccatagataaaggaacgcgtaaacggatggataagataataacaggagaatatgatgagaaaatagaaaatagagtaagggagaaagtaattcatcttgctgatgtttctgatttcagaggtttgcctctttggttagtgtgttacattgtttatggtcgtcactctgaagcaaaagaaataacccagtggaaatctcctgctgatattgattcgtatttaaaatcttttaagcaacattcattgcgtaatccaattgttgagcagattattattgaaacactacgtgttgttcgtgatatttggaaacaagtgggaaatattgatgagatacatgtggagttggggcgtgagatgaagaatccggctgacaagcggaagaaaatgacacagcaaatgtctgaaaatgagaataccaacttgcgtatcaaatatttgctcacggaatttttgaatcctgaatatgaggttgaaaatgttcgtccttattcgccaagtcagcaggatattttgcgtatttatgaagagggtgttttaaatagtgtttccgatttaccggaggaaatatcggatatattgaaaaagtttacagaaacagacttgaagaagcgtccttcaaggtcagaaattttgcgttacaagctttggctggaacagaagtatcgttctccttataccggtgaagtgattccattaggtaagttgtttacgcctgcatacgaaatagagcatgttattccccaatcatgttattttgatgattcttttagtaacaaggtgatttgtgaagcggaagtcaataagcttaaaagcaatttattgggacatgagtttatagtgaaacatcatggggagatagtagaacttccttttggaaaaaaagtaaggatcttcactgtggatgaatatgagcaatttgtgaaagataactattcgcgtactcgtggtaaaatgaaaaaacttttgatggatgatattccggaggagtttgttgctcgtcagctgaatgatagtaggtacatcagcaaagttgtaaagtcccttctttccaacatcgttagagaaaaaggagaggaagaagcaatttcaaagaatgtaattccttgtaccggaggagttacggatcgtttgaagaaagattggggaataaatgaggtttggaataagattatacttcctcgttttcaacgactcaatgagttgaccggcacaaataaatttacaactaaaaatgttgggattcaagaaattccgacaatgcctttggaattgcaaaaaggttttaataagaaaagaatagatcatcgtcaccatgcaatggatgccataataatagcgtgtgcaaataggaatattattaattatttaaataatgagtcggcaacagctaaggctgaattatcccgatatgatttgcagaaactgctgtgtgataaagctaagactgataataacggtaactataaatgggtgatcagaaaaccgtgggcatcgtttacacaggatacatatttggctttggaaaatataatagtcagttttaagcaaaatttgcgtgttataaataaagctaccattataatgaagaaggcaaaaagatctttgtgaaacagggaaaaggggacaactgggctatacgtaaatccatgcataaagatacggtatttggagaagttaatttgcgtaggataaagactgtagctttaaatgaagcgatgaaaaatcctcaaagcatcgttgtgaaagacttcaagagaaaattattggaactttggaatttaggatttgacgcgaagagaataaagaagtactttgaagataatagagaaacttggagtgatataaatctgtctaaaatagaggtttactattttagtaaagatactaaagatcgattctttgctactagaaaaccgctggatactagttttgatagaaagaaaatagaaaataatattactgatacgggtatccaaaaaatattgttacgtcatttggaactgaaagataataatccggatattgctttttcgccggatggtattgatgaaatgaatcgtaatattattcagctgaataatggaaagtatcatcagcctatcattaaagttcgttggtatgaacaggctgataagtttgcggtaggtcaaacaggtaataaatcttctaaatttgtagaggctgcgaaaggaacaaatttattttttgctgtatacgagtcgaatattctagataaaaagacgaatactataataaagaaaagaaattatgctaccattccactgaatgttgcaattgaacggcaaaaacaaggtttacctgttgcaccggaagatgagaatggtaatgaccctatttttgtattgtcacctaatgatttggtttatcttcctactgatgatgaattagctaatggtattattgcccagcctttggataggggaaggatttataagatggtaagttcctcaggtgaacaatgctttttcataaaacatattgttgcgaatgtactagttgacaaatttgaattttctcctttaaataagatggagcgggctttaactggtgaaatgataaaaatgatatgtatacctataaaagttgatcgtttaggaaatgtcttagaatcaagtagttcacataaaaaataatatatccttattttatggaagaaaacaaaggacaaattcttttatatcaaacggtagatggtgagtcaagaattgaagtaacactatgcaatgataccgtttggctgacattagatcaaatggcagaattatttcaacggaacaaatcaacgatttcacgccatataaagaatgtttttgagagtggggaattacaggaaaattcagttgttgcattttttgcaacaactgcttctgatggtaaaatatatcaagtggcttattataatttggatatgattataagcataggctatcgggttaaatcttaccgtggtgtgcagtttcgaatatgggcaacacaaatactaaaagagtatttagtaaagggatttgtaatgaacaatgaactgttgaagcgtgcaggtggtggaaattattttgatgagttattatcacgcatacgtgatattcgttcctcagaaaagatattctatcgtaaaattcttgaaatttatgctttgagcatagattatgacccaagtactgagtctactcgattgttttttgccacggttcaaaataaaatgcatttttcagtacatggacatacggctgctgaggttatttacggtcgtgcagatgcagggaaagattttatgggattaactaattggacaggagcagtgccaaagcggaatgatatagaatatgctaagaattatttgacagatgatgagttggatacattaaatcgtattgtaagtttgtatcttgactttgcagaattgcaggctaaaagtcatactcctatgtatatgaaagactggattcaaaaattggatgattttcttagactgtcaggaaaagaattgttacaacatgctggtactatttcggctgaattagcaaaggaaaaagcaaattttgaatatgatgaatttaagaaacgcattagtaatcagttatctcctgtagaaatagatttcattgaaaatttcgaaaaagagcagaagaaattgcgaggtaagtaatatattaacctttaaaatatgatactatgataaagaaaacactttattttggtaatccggcttatttgtcattacgaaataaccaattagtcataaaacttccggaagttgagaaaagtgattcattgccggatatctttaaagaacaatcggaagtaacgaagccgattgaagatataggtgtcgtagtactagatcataagcaaattactattacttccggtgtattagaatctctattagagaataattgtgccgttatcacttgtgatagtaaaagtatgccagtgggtttaatgctccctttgtatggaaatacaactcagaatgagcgtttccgtcaacagttggatgcatcattgccattgaaaaagcaactttggcagcaaacaattaaggcaaaaatagataatcaagcatctgtattgagagtttgtgtaggtgaagaaatgaaatgtatgcgaatttgggcgaatgaagtgaagagtggtgatccagagaatttggaagcacgtgcggctgcttttttttggaaaaatttatttgcagatattattggctttactcgtgacagagaagggatttctcctaataatttattgaattatggttatgctatacttcgtgctatcgttgctcgtgctttagtggcaagtgggttgcttcctaccttagggatccatcatcataatcgttataatgcatattgtttagctgacgatgtgatggagccatatcgaccttatgttgatgaattagtatttagtttagtgaaattgtatggtgcaaatttggaattaacaaaagaaataaaatcacgtttgcttgttattcccacattggatgtacgtattaatggtaaacgtagtccgttgatggtggctgtcgctcagactacagcttctctatataaatgtttttgtggagaaattcgtcgtattagttatcccgaacgataatggaccgttttagtgaatatcggattatgtgggtactagtattatttgatttgccaacggaaactaagaaggacaagaaagcttatactgattttagaaaaaatctacaaaaggatggctttacaatgtttcagttttcaatttacgtccgtcattgtgctagtagcgagaatgcgactgttcatataaatagagttaaatcttttttgcctgaatatggacaagtgggaataatgtgtatcactgataaacaatttgctgctattgaacttttttatggaaagaaactacaaggtgtaactactccaggacagcaattggaattattttaaaaataagaaatcccgtttcagacgggatttcttattagataacaactttgtttttaattcctgaatatatgtgtaactaattggtaattagtttgtaacatatattccgttgtttccaatggttcaaagatactaatttgaaagcaaatcacaactaattccactattaacattagaaccaaaagttgtttccaatggttcaaagatactaatttgaaagcaaatcacaactgtctacgctttcgggatttcaacttagagttgtttccaatggttcaaagatactaatttgaaagcaaatcacaacgggtttcatgcaggtcataaagtaaccaaagttgtttccaatggttcaaagatactaatttgaaagcaaatcacaacttccgtccggtttggtgatggcgctgacacgttgtttccaatggttcaaagatactaatttgaaagcaaatcacaaccagagtggcgtggaaaaatcaatgtcctcagttgtttccaatggttcaaagatactaatttgaaagcaaatcacaactataaagcaaagtggatcttatttcacaacgttgtttccaatggttcaaagatactaatttgaaagcaaatcacaacgccatgaacgtcatcgatatatccctgtttgttgtttccaatggttcaaagatactaatttgaaagcaaatcacaactatgatttctatagcaattctcaatgggaggttgtttccaatggttcaaagatactaatttgaaagcaaatcacaacaacagtgaagtatggaacttgaacttagagttgtttccaatggttcaaagatactaatttgaaagcaaatcacaacacaattccgtcttccaaatggaaagcccaggttgtttccaatggttcaaagatactaatttgaaagcaaatcacaactagtaatagcagccttacctgtgttagaagttgtttccaatggttcaaagatactaatttgaaagcaaatcacaacgtaatgaacatcatcaatatatccctgtctgttgtttccaatggttcaaagatactaatttgaaagcaaatcacaacagcttctgtagattggtctagagcagcagagttgtttccaatggttcaaagatactaatttgaaagcaaatcacaactggcttaaactcatatattacgtcatacacgttgtttccaatggttcaaagatactaatttgaaagcaaatcacaactcacagatgcatcctactcaatctactgttgttgtttccaatggttcaaagatactaatttgaaagcaaatcacaacgcacggagtgcgcaaaggcaagacagcttcgttgtttccaatggttcaaagatactaatttgaaagcaaatcacaaccaataacaatgaggaagaattgtggtatgagttgtttccaatggttcaaagatactaatttgaaagcaaatcacaactcattaaaacaggcatagagtatgagaagagttgtttccaatggttcaaagatactaatttgaaagcaaatcacaacccactttgacaagagaccgagatacaagtgttgtttccaatggttcaaagatactaatttgaaagcaaatcacaactgattgtgactatactggttgtatcggtgtgttgtttccaatggttcaaagatactaatttgaaagcaaatcacaacagttcgagcaaatgacacctacgcaatttggttgtttccaatggttcaaagatactaatttgaaagcaaatcacaacggttgaacctacggggatcagccgtgtgaagttgtttccaatggttcaaagatactaatttgaaagcaaatcacaacaagcatggggaaaacattgcggcatcgattgttgtttccaatggttcaaagatactaatttgaaagcaaatcacaacgttcgaagaaattgtttactgctaaggttggttgtttccaatggttcaaagatactaatttgaaagcaaatcacaacacctgaccaaggggaactacctgtatcctcgttgtttccaatggttcaaagatactaatttgaaagcaaatcacaacgaagtgcaagctatatacaaatgaaaacatgttgtttccaatggttcaaagatactaatttgaaagcaaatcacaaccagtaacgagtgctaagcgtacacccgagggttgtttccaatggttcaaagatactaatttgaaagcaaatcacaacaccagcctgataatagccaagaatgcaagtgttgtttccaatggttcaaagatactaatttgaaagcaaatcataacatattagctgagaatccctagtcgagtaagaaatcaaaaatttcatctgggttctcatctaggttttctgggtcatcataataagaacctaggttatcaagatagaaatcatattctgatgattgattaccaaatctctgatcatactgttgttgtgatagcttagtaactttatcaggattcctatcggcataagcagatgcctcttctattgacatttgtttggtagaagtaaataccaagtaatataattgtggcttggtataatgagtatctaaagttacttgttgataaccagatttccttgcagtaactattacgttttctggtgtgatagtagttttcaagatataggtatagattctttgatttctaagtgaatcccttagtaatttaattgaatctactttagcaaagaatatagaatctcttctaagttcttctttatatcgttttacccttttgatagaatcctctctgctctcctttatataaggaggagttactctcctaggttcattgtttaatagaacaagacccagaagagaaactccaaatatagaaaatggaagtaaaagatgattcgtttttgagttcatacccactagttttgtattgatctttaatatgagaatttaagtacctacctcttagattcactttttaataatcttttgaattgctctttagaactttatcatatcggtatactttgttatttttaaaagatacccatagatgatgtttctttacgttgtaaccaatactttctatattagaagattctactgatgttatttctattccagtatttattttaactaattcaaaatattcttctctgtccattctattaaaattttagaagtcttaacaccggatgtaatacgttggtatatttttgaataattgcccatgctctcagatgttatccattcttctttcattttttataggatatgagagcaaacatataactgatactttgtaagagttttattatgttatctaatacccctcttatttctccctcttcaatctgaagaagttttttaaaaagatagtgatctgtatcctctcaattatgttgttttcattgattcaaatatactaatttagatatgaattatccttaattattaattcttattatattaaagagtttaaagtgggttggaggtaaaactttgcagcatataatgtgtatatagaaaaattatacgaaccgttggtcagtatggcaaatatctattaaatttgccgtatgaaaaagaaattccagcttgaagttccgggaggagccgacaaagtgttgcttcatacttgttgtgctccttgttcatcagccatcatagagtgcttgatgcagcatggtgtcactccggttatctattattgtaatcccaatatttatccgttggaggaatacattatccgcaaggacgaatgtacgcggtatgcccagtccttgggattggaaattatagatgccgattatgatcatgatgcctggcgttgtcgaatggcaggaatggagcaagagcctgaaagaggaggccgttgcttgcgttgtttcaagatgcgactgcaggaaaccgcacgttatgcccacgaacatggattcccggttatcactactacgcttgcttccagccgttggaaaagtttggaacagatagaggaagcgggccgatatgctacggctccttatccggatgtcacttattgggaacagaactggcgtaaaggtggattgagcgagcgtcgcattgctatcattaaggaatataatttttataatcagcaatattgtggctgtgagttcagtatgcggaaagaagaaaagggaggatgacgggaatgaagatgttcaaactgtggatggttgtaatgttattgggactcttgcccgttgtttcagaggcgcaagaagaaataaataatgccattaatgtacagttggagtatctgaaaaagtatcctaaagacaaagaagcacttcggaaagttagttttctctatctgaataaagcagattatgatcaggctatcttttatggtcgacaattgtttgagttgggttataatgaacgggattacaatggcgctgtaatttattctcatatttgtctggggcaggcccatatgatgaagggaaatgtaaaggaggcttatagtcatttagggcaggccaggctgataggtgaaagtaataaaaatgattccgccttatgttccgtatataatgggctgggactttatgcatcgaatgtccaaaaagactattatcgttcacttacctatttcttcaaaggagttgaagctgcaagacgttgtcattatgacagactctattccattttgctttctaatattgccggtatttattatttgaaaaatgatagcacaggattgaaatatgctcttgaatgttatgaactgggacatgaacggaaagatccttatctgatttatagtggttcaaccaataccgcttatatgtattatttgaagagtgactataatacagcattgaaatatattcaggaggcggagttcaccatggtgcagaatgacttttatgatcaatcaaacgtttacaatctttatggatatattctgcataaattgaataaagatgatgaagcgctggtttttttccggaaggctttggatttgaaagaacagggaaatatttcttcagtgatgaattcttatttgggctatgccgaaattttaatggagcatcaccagtatgaccgggctgtccggatgctgaaagccggaatagaactgtcttaccaacaggctaatgccatctatcgaagtgacctgttgaaggctttatcccgatgttatgaagaagatggtatgctggtagaggcgttgaagtatcataagctctatcagctggaaacagatagcttatataatgcggaaaaggaacgtgctgtgggggagatacgtgcaaaatacgatatggaacggcaggaaaacgagataaaacaaaaccgtctggaattattggaaaaggaaaataagatgcaattgcttatagccggatttatctgtatcttcatagctgcctctttactatattacttatattacagaaaaaataagctgtaccttaccattgtgaagcaaaatcaggacgctatccggcgtgaacagcaattgcagaacaagatagatgagcagtttgcagagataggccgccagtccgctcttttacaagaatatcttacggattcgacgaaaacttctttgccgcaacctgagaaatatgcttcatcctcgttgacagatgaaaagaagcaggatttatttctgcgtttggaaacgctgttgtgggaggagaaggtatttacagacaatttgctgaccaaagagaaagtagcggaaatgttgggaactaatcgtacttatctctctcaaattattaatgagcagaccaagcagacttttactcaatttgtaaatggtttccgcacaaaagaggcagtccgtttactttccgatcctgataaccaaactccgctaaaggcgatttcagctgaattgggctttaattccatgactactttttatagtcagtttcaggcggctactggtatgactcccgctcagtatagaaacaaagtgcaggaattgcataaaaatagataatctattaatttgctatcataaatttatccaaatgcggcaattgctgtatttggataacctatttttgctataatttaaaattttatgcattaatttgctatcgacgcaatataagctgcaaaactgttttaacaataaaacgggacttaaaaagtgattataaacagtattaatattaaatctatgaagagtatgaaacattcagattaccacggaaagctacttcgactggcgatgtttttcgttgcattgtttttgtgtggaacaatggcatatgcacaaacagaccggatgatcagcggtatagttgtagatgagaatggagatcccctgcctgccgctcacatccgtcaggtgagccagacgaaaggggaggaactggctgctgtcataaccgatatgaacgggcacttccggctgaccctgctccgcacagcgaaagagatagaaatctcttacttgggctatgaatcaaagaaagtaagattgacaagtgcgaacagttacagaattgtcttggagccggcctccgaactgctggacgaggtggtggtaaccggatatcagactatctccagggaacgggctaccggttcatttgcgaaagtagattcgaaaaagttggaaacccaacggttaagtagtgtcagctcattgatggagggaagaatagca

SEQ ID NO: 726 - DNA, 22715 bp, synthetic construct
  misc_feature 1..22715: note = Synthetic
  source 1..22715: mol_type = other DNA
gggtcacaatggtgatattgccagacaccgcagattgctccgacttcagcacatagcaacctttatataccgtgccctgctctggagccgtctcgtccactttcacatcgccgcccgtattgtcgcccatctcattctccttcacatcgattgtccaggtctgctctccggcccacgacacaccattgatcaagcacttcagcgacggttctgccactctctgataattcacggtcatatccaccttgtagtttgccgccagcggtttgtcgctgacatatctgaaggtcttcaccttgccgtcggtcgtcatgaaattgaaagtcactacaggattccccacgctctccatcaggaatgcgtcacactgcttcgtccattttccatcagtccccttctccagcaccacgctataggcgccattctctccgcaatactctccagccacgttgattccctcatacagaggactgacatccgccgttatagcagccacattctccggcacatcgcttatcgtcacgttgcggagcataaacaccttgcggttcatcgtcagcgtgacgtcagtttcctcgccgtccgtcagcaccaccacactatttgccgccattatgtcgccatgtgccattccttctttcaacgccaccacagactgcggagtagcctcctcctttgtcggcaacgaatagtttgccgcatctgctcccgccacggaatacactcgatacgatccggcggcaagcttgaagtttgccacatccttttccgaagccaccgatttatacgccacacattgtcctgccgtatcaaatacatacaggtttatcggtgtcgccacggtcatttccgacgcagccccgctctgtccacgggcctttatcctgagtgtcacaccacccaaggcgtcatcgccatcagccaaatcttttgaacacgatacgaacattgccaatacaagcagaaaggcaaaagaaaaaagcattttatccttcatagaattattttttatgggtttgcgtaaaattcatcccgaatcggtataatgccgctttggggttaagttccaacaaaagtaatatttttctacaaaagcgacaagaaacacctacgtttatttcaaattatccatcgaatttcttaaagtccatatttttcccaatttttctgtacaaaaacccttgccaattttgcaacattagttaacaataaaaggaaatttattaacacttacaaacaaattcgatttgttttcataatacaataagtgtttaaatatgcaaacgtcaaataagaaaaaagatataataaacccatccagatctctcgaaaaggatgggctgaaaatatcaactaagatttttttgtcaaaccgaatgatgcatccggtgcaatcatcaggcctccaactgaccgatgatttcagtcaccgatttgcatccatgcttgtcaagccattcattgatgccgttcttcaccttcaccgtcacctgaggatccaggaagttcgccgtaccgatttctattgcagaagctccggcaagcataaactcaatggcatcgttggcattgcagatgccgccgagtcccacaacgggaattccgacagcctttgccacctgccacaccatgcgcagagcaacaggcttcaccgccggtccgctcagtccaccggtattgatgctcagcatcggcttgcgcttctctatgtctatcgccattcccatcagggtgttgatgagcgacacgctgtcggcaccctctgcctcaacggcacgtgcaatctccgtaatgtcagtgacgttcggcgacagcttgactatcagcgtcttatgataactcttgcgcacggctctcaccacactggcagctccctcgcatgtcactccaaacgccattccgccgtctttcacgttagggcaggaaatattcagttctatcgccggaatcttgtcgagagcgtctatccttgccgcacattctgcataatcctctggcgaagaaccgcttacgttcactatcatattggtgtcgatatcctttatctccggatatatgtgctcacagaaatagtcaacgcccttgttctgcaatcccacacagttgagcattcccgatgccgtctctgccattcgcggatagtcgttgccttgtctcggatgcagggtggtgcccttcacgataatgccgcctatctcactaagttccacgaaatcagcatattccggaccgtatccgaatgtgcctgaagctgtcatcactggattcttcagctccagatttcctatttttacccttaaatctgccatgacaaatcatttacgttaaacactggaccatccttacaaacacacaggttgccgctcttcgtgccttccacgcaacacagacaggctcccacgccacatgccatcttgttttcgagcgacgcctcacaacatataccctcagaatgtgcatatttcgccactgccaccatcatcggtttcggtccgcaggtagaaatctggtcaaacctcactcgctgcagcacggaatggtttgtcacgaagcccttctctccctccgatccgtcttcggtagtgatgcacacctcaccgtatttcctgtattcatcaaggagcagcaggtcttttgccgaccgagctccaagcaggaacaccggcgtcataccattgtctttcagcactttaccgaaatatagaagcggtgcaacgcccacgccgccgccgacgagcaacaccttggcatccttgttctcagggatggtgaacgtgtttcccagaggtaacatgctgttcagcttgtcaccagccttcagctgtgccaaggcacgtgtgccgtcaccgatggcagccaccagcaaccacagctcatttgcttgataatcaacgaagtttatagatatcgggcgtctcaggaatgtcgttgcagatccgtcgatgcgtatctccacgaactgtcctggtgccatttcgggcagcttctccgcatgggtcaactttatcaagacgtatttgtcgttgatatggtcaaccgaagaaacaatcaggtctaaaacgtattttttcatcagttccatttataagtttcggcaaaattaggcaaaaaatccctaatatctaccgataagctcacattattatctgcaaagccgccaaaaagcccattatccccaaccgataatcagtacgtgattggggtctgattattcagaagagcgagataatcacttcttcggcacgaaactttcccacgtctggtcatcgtaaaacactcttatttcagttatcctccggcgctccttctccttatatacgatgtccgtgtgtacgggcgactttgcctgctgcctcacgttagtagcgaaagcgttgcccatcggggcgctctgctgcgatgttgcccccgcatttccgtcagcatcaccgaagtcgagcatctgctcaccggccataccactctcctgtggggtagaggaggagtcatccgccgacgcttcgtcaacgaacatcattccttttccaaacatgagccagtcgagactgatgttcggaaatttcgactttatagagtccacggtgttcagagtcggttttgtacgtccctgaaaaattccactcagtgtggcaggagatattccgaggaagtttgcaaacgtctgttgagtcatgtgctgcgcttccatcagctgtctaattctgtccttcattttcttctcttatagtaaaaataggggttgtagccctgattttgtttgactttacaaaggtaaatcaaaaaaatggaatacacaacaaatgtagaatatattttattttctaaatattagatttctaaatgtaaatccgtaaaatcaaatctttaaactcaggtttttaggttttgaatttgtaaatgtgaattttaggaagctaaacgtccggaaagcctttgtttacgggattttcggaattaactggctgtgatttggttatttatatatgtttaggggtgtaaatagagaatatacattaattttgtaagatattttgtataattcaccctgtcagctactttaaaagtataaaactcattggttttcagtgatttataaggcttattttattctgcataataattcgtgtgaattttaatatttaaatattcggatgttaatatttgaatttgattcaataaaatgtattcaagttttcaaatatacaaatagcatttactaaattaaacttcaatgttttaaaatttaaatctttgaatttcacaaagatatatcaaaacaattgttaacgctgaatttgaagtcattttcagagtcgtttttttcagaaacaaaaggatcccgaacgaggggaaagtaatgtcaaaatcatgctattctcaggataggaaaaatcacgcaaagccctgatttcaagcggaaataaggataaaatttatgttcgtgaaaatcatttctttttacaaaatatgcaccaaaaatgtaaaaaaacgcatcatttcggggtgcagataccataaaacagcatcccctcaccacccgaaaaacggtgatgaggggacatatatatataaggtgtaaccatttctggcagaaaattctctgttccctgctcaatgcatgataaagaaaatcaactcctgcagcagctcgccggtgggagtattcggattgtcgagccccttgcacttggtgtcagcctcacggattttgtctattatctgcatcactttcccaccactgtagtttctcattcccagcatatactccttggcggcccatggtccgcgcaggtcgagccatctcgccacctcggcatcattctgtctgttgggagcgtagtaggcaagcatgagattctggaaatacgagaatatcaccggtatcagagcgaacgccccgcctgttttcggattgctgtcaaaatatttcaatatcaggttcgccttcaccacatccttcgctgcgatggcgcttctcagttcaaaggcattgaagtctttgctgatgccgatcctcttctccaccatctgcggcgtgatgcgcgtgtctccctcttccagcgagagcagcagtttgtcaatctctcccgtcagcctgctgaggtctgccccgatatggtcggcaagcatctgcgccgccttgttctctatcgtcacctttgtgcgctttttcagatatgcctcaatgaatggcggcagctcgtagtctcgctttttcttgctctcaaacactactcccgcattcttgaatctcgtcaggatcttcttccgtccgtcgatagtaccgtttttataacacaccacgagcacagtcgtctttgccggtttttccagataacgctccagctggtcccagttttttatgttctgcgcctccttcactattatcacctgccgctctgccatcacgggatagctcctcgccatgtctgccacctgggctcccgtcacatcggctccgaacactatctgctggttgaaatctctctcttcgggctttatcgcatgctccgcaatgaagtctgcaatctggtcgatgtagtaagcctcctcccccatcagcagatacgacggtgcgtagttgccggccttcagatccgacatcacgctctcaaaagtcattgtcgctgttttctcagccatactatatttttaactattttatacattatcagtttcgctgcaacatttttctatttgtataataatgttaacaacaaaacatccttaccctctcaagaatgccatcaaactgttcgtcgccaataccattcccgtaaacacggaattttgaagcatggtcaatcactgctcttttccgacatctcatatattgagattcacgaaatatcattacttttgcaatgccatagacacgagccgccacctttgcaggtcatcgtctcacaaggatgaagtctcccgtcatgggccaaccgtcctgtcgtgtcatggcgacgatatcagcaagacgcattctgattgcaaaattaataaaatgaaccgattaaacctacctccttacgaaataaaaacgcgccagcaagatggcagacagtatatcctcgacgtattgcgcaggaaattcatagcgctgactcccgaagaatgggtgcgccagcatttcatccatttccttgcagaccacaagggctaccccactgccctccttgccaacgaggtggaactgaccatcggcggcaagaagctgcgctgcgacagtgtgttgtattccagggatctgaagccgcgtatgataatagaatacaaagcgccgtcgatagccatctctcagaagaccttcaaccagatcttcgcctacaacaccctactccacgccgactacctggtggtgagcaacggcatcagccactactgctgcaaaatcgactataccaaccgttcctactccttccttagcgacatccctcgctatgaggatctgtaactgacaacgcacacgcataaaacattttcctcaaaaaaagtatcatagtatcattcttggccaccgccaagtccctaaaatactatagactaacgacttagcccaatgatacttttctggaaattttacagaaaagtatcattgatgtatcatagaagtatcatgcctttcggcatcccatatttccccccacgccagggggaagacatccccacataagggggttctgttccccacggcgtggggagaatccgaggccaatattttacgaattacaagtctgtactttagagatttcaaatttgtgttttacgaatagcaagtctatgtttcatgaataacaagtccatgctttatgaataacaagtccatgctttatccatgaaatgccggttgtccttgtcattgcttatggttttgtttgggcaaactttcccaccagaaaaagttcacgtatgatcgggaagacaaagggagtgcccatgggcactcccttttatcccaaatcggccattagggcttgcttggattttgattttttagaagagtggattttgtttggcttttaatgagtaatagcgagctattgcgaattaaaaacggacaaaagacaccttataaaaagcaaaagactgcaagcagtcataaaaaaataaagtaaaacgtcctaatgaccgttttgggtttatcacaaatatcaattcaatctttacgctccatgaaacaagtattcctcctgcactttcttcgtaagatgggtgaatagagtgttgagcagctgcttgctgaagtcgtatgcacgcttctgcatggcgatgccggcagccgtgagagcctcaacggcattatcgggagcttccttgcatgtggcgagatattccttctctatcttccgctgcgtctcgtcaaactcagtttcaagttcaagatatgccttcttgattatcggggcaaaatagttgtagtctgtcatacccagggcggcaatcttgcggaaggtccaataagcggaatagtcgtcgctttcgctattggcacgatatgtatacctctcgtccacctccgtagctccctgatagaaggggataaacacgctgaggtctgccataccaaacgccacgtatgtcacttcgccaatagccgtcggcagctccggacgcacctgcatgatatgcgtctgcgtagtacggaagatacttaccgggcggtatggctccttaccgttggagtggaggtaagggtcgtggtcggtattgtcgtagtggaagcggaaagccttgcgcaggtctgcaagggatattttcctttcagcctcggcaaacacggggaaagtgtttttcgccacatcgttatttatagccggcgagaacatccgttgcagtccccacacgcgcggatagttgtatgtagtatcgagtttctcgtctctcgaataagcctcgtggaaatcaaattcaccgtcggcagaattatacaacccgtttttctctgcaaactctatcagatctgccgatgccaggaaattctccttgtcttccgggtcatacttgcggtagcggctttggtttccagtcacgaaatacttgtcctttggcattctgcacgccagccatctgtgtccgccggcattctccagataccaggtctccttggcatcgataaaaccgatgccgaaaccttccgccgacccgtattcctcaatcagcgctcccagtctctccacgccctcgcgggctgtatgcacataaggtaaaacgatgttgtaggtacagttctccgccagtccgtcctccacatacgggtcagcctcaagagccttctcgctgctgaagatagtctctgtggaactcattcccactcctgccgtgttatatccggcgctgccccactctcccggatatgtatagtccggcagaccggtatagccgagtgctttcttcggcagtttgcagcggaacttgctgtcctgcgccacgaactcctccggtccgtcgtcggtatccctgtgcacctccacgttgatagccatcaaagcgtcgaaatcacttgagcggcacagatatctcgcaccgtccacactctgttcctcccccacgataatcgtagtacattcagaaggaagttttcctgaaatcttttctttctccatagtccctgtttattttaatatatggttctatagatgcaaaagtatgaaaaaacagaataacacgaaacaaaaagacatattaaatatgtataaaatagagaaacccttgctccacaatgacaccattctgacattttttcatatttacgggtctggaaacgtacagattgtcagtcaccaacccttgcaaagccattggcacacatgttgcgatatgccttaatgaaagccgaaagccttgaagcttgaggcaagaaaaaaacataaaacaacaatcagaagtcccgacggatccgcatggtgaagggaggacgagaaaaataaaatttggaggtattcactatgttgatggttcgcagaaacaactattctaattggttagacaatttctttgatgactcactttccgacaccgagctgatgccgcaacgcaacactacggctccggcactcaacgtgaaggagacagccgaagattatattatggaaatggcagttcctggactggaaaaggaatgggtgcgcattaacgtcaccaacgagggacttctccatgttgccatagagaacaagatggaacacaaggaggagaacagagacaaccacaagtctcgccacacacactacctgcgccgcgagtttgcctatggcaactacgagcagagctacactctgccggatgatgtagaccgcgacaagatcagtgccggcgttgccaacggcatcctcacaatcaccattccaaagactactccagagcaggaggccaaggtgatgaggaatatagaggtcaagtaataccacttaaacccaaatctgtcatttgggttaaaataaggacaagccccatacttttgttatcaaggcaaaagtatggggcttgctttatacataatctgtgattggcaatagataaatttgttgctataaatcttaatagccttcaagttcacttcctgtagcaaacacctccaaaaccatattccagtcttcggtaatcacattaaaccccaaacggtcattaggacgtttattgtatttttatatttactgcttgcagtcttttgtcttttataagacgtcttttgcttgtttttaattcgcaatagctcgctattactcattaaaagccaaacaaaagccactcttctaaaaatcaaaatccaagcaagccctgacgaccgatttgagttaaaaatgcccaccgttgaaggacgatgggccaacctaatgttttcacaacggaataatccttattgtgatttgctcgaaataatgatgcaaatatagatataagaaacgaaaagccaaaatattcctgataaaaattggcattctgcataataaatcatacatttgtatgcgtaaagacacattaccaatgacatcaaacatatttatatatgaagaacatcttaggactggatcttggaaccaacagtatcggatggtctgtaatccaagaaaaacataatgataacaatgaatgccagaaacttattctcggagcaggaagcagaatcatccctatggacgcagctgtacttggtgattttgcaaagggaaacaccatatcacaaactaaagaccgcacgcaatacaggggcgttcgccgactacgcgaacgctgtctgttgcgccgtgagcgactgttcagggtactcgacattatgggatttctaccacagcacttctcaaatgcactcacaagatatggaaagttcaaagatgcagacgaggagcccaagatagcatggaggaaagatgacgaagggaagatgcactttctctttgctgattcattcaatgaaatgatagaagagttccgttctgtccaaccggaacttctaaaaagaggaatgaaagtgccatacgactggactttgtattacctcaggaagaaagccatgagagaagccgtcacaccattcgaactggcatggctaatactcagtttcaatcagaaacgaggctattatcagcttcgcggcgaagaagaaggtgaagccgacaacagcaaatgtgaggaatatcttgcgcagaaggtcgttgacgtaatagacacaggtgagaagaaaggcaaaagcacatggtttgacatcgtgcttgaaaacggcatggtatatcatcgctctgctgaaataaagcctgactggattggcaagacaaaagaattcatcgtcaccacccaattcgacaaagacggaaatccgaagaaagacaaggagggaaacgtcaagatgtctttcagaatgccaaacgaaaacgactggaatctacagaaaaagaaagcggagaaggatatcgacgaatccggcatgactgtcggagaatacatctataatgcgctgcttcacaatccgaaacagaaaatcaagggaaaactcgtgagagtagtagaacgcaaatactacaaaaacgagctgcaaaagatattggagtcacaaaagcgcttcatcccgcaactttccgactctgcgctatacgaaaaatgcataaaagagttataccaaagcaacgaagcctatcgcaactccatatccacaagaaatgatttcacctatctcttcgtagacaacatcatattctatcaaagacctctgaaaagcaagaaatccttgatagacaattgtccatacgagagtctgacttacacaaaagatggcgaggaacacaaagcacctgtgaagtgcatagcaaagtcgcatccgctatatcaggaattcagactatggcagttcatctcaaacctccgtatctaccaacgccaaaagcaggtcggcgacaaagtgaaacttgacgttgatgtcacagatgagtttctgcctacagatgacaggcgagaagcactttttgattatctcaacgacaaaacggaaataaagcaggacgtattgctcaaagaattcttcaacatgaagaagcccaagggcaaagacagcgtatatccatacagatggaactatgtagaagacaaaagttatccctgcaatgtgacaagaggaaagatactggctaaactgaacagggctgggatttctgccgatttcctgtcaagcaacggcaatgaagaatcattatggcacattctttattctgttgaagacaaaggcgaattaagaaaagcactagcccgtttcgctgcgaaaaacggacttgacgacgcttttacagaagcccttgccgacatagagccatacaagaaagaatatggagcatactcagccaaggctttgaagaagctgttgccactgatgcggttgggcaaatactggaactatgacaacattgccccgactaccaaggcacgtatcagcaaaataattgacggagaatatgacgagaacatacgaaaccgcgttagagaaaaggcgatgtctctcacttctgcatctcaattccaaggatttccactttggcttgcgtgctatatcgtttacgaccgccacagcgaaagggcagactctggcagatggtcttctcctgaagacatcgacaaatacctgagcgacttcaagcagcactctctccgcaaccctatagtggagcaggttgtcactgaaaccctgcgaacagtacgtgatatatggaaaagatatggcgagataagcgaaatccatgtggagttgggacgcgagatgaagaatcctgccgacaagcgtagcaagatgaaccgccgtatgcttgagaacgaaaatgcaaacatgcgtgccaaacttcttctcaccgaattcatgaatccagaattcggaatagagaacgtgcgttcttattcgccaagtcagcaggaactcttgagaatatacgaggatggcgcaatcagcaatgccggcagcgaaatagacgacgagatttccgacatcatgagccggctgtctcaagtagatgtcaagaagcagcctacggcgtctgaagtaaagcgctatatcctatggcttgagcagaactaccgctcaccatataccggacagatgattccacttgcaaagctcttcactcctgcatacgaaatagagcacgtgataccgcagtcgcgctatttcgacgactctttctccaataaagtcatctgcgaagctgaggtgaacaagctgaaggaccgcatgctcggatattaattcatcaagcagcacaagggcgaaaaggtatcgctcagtatgggaggcaccgttgaaatcctctcccccgaggaatacgtgcgccatgtggaatctcaatacaagaacaacaaagcgaagatgcgcaagcttcttatggacgacattcctgatgaattcataaacagacagctgaacgacagcagatatataagcaagctcatcatttctcttctctccaacatcgtgcgggaggaaggagaggaagaggctacctctaaaaacgtaatcagctgcaacggcagcatcacagacaggctgaaaaaggactggggcataaacgacgtgtggaaccatatcatcctgcctcgtttcagaagactgaatgaaataacgggaactgacaagtttaccacttcaaacaaagagggtcacgaagtccccgatatgcctcttgaactgcagaagggatttaacaagaagcgcatcgaccaccgccatcatgcgatggacgccatcgtcatagcatgcaccacacgcgaccatgtgaacctgctgaacaacgaggctgcgatgtcgaagaacaatgccaacagaatccagctttcaaagaaactccgtcgatacgagtccgtagaaatcgaaaaagacggcatacgcaaacagatttctgtggcaaaggaattcaagaagccctgggagggatttaccgcagacgtggaacgcaccctgagagacatagtggtaagcttcaagcaaaatctgcgtgtcatcaacaagaccaccaactattaccagcattttaaggatggcaagaagatatactcccctcaatccaagggtgactcatgggcaatccgcaagtctatgcataaagaaaccgtatttggcgaaatcaatatcagacgcatcaaggaagtctcgctgaaggaagccatgaagcgcaccaaagacattgcagacaaggaactgagatcaaagattgtcgaactgatggcattgcaatacaatgagaaaaagataaagcaatatttcagcgacaacaaggatgagtggagcgacgtgaacccgaagaagattaaaatccattacttcaccaaggagaccaatgagcgtttcttcgccacaagaaagccattggacacttcattcgacaagaagaagataaagacccaagtggcagatactgccatccagaaaattctgctaaaccatctgtctgcacacggcgacaaggcggaaacagcattttcgccagacggcatcgacgagatgaaccgcaacataattgtgctaaatgatggtaaattccatcaacctattctcaaggtgcgcatatatgagaaagcggacaagtatgctgttggccaacaaggcaacaagaaaaagaaatacgtagaggctgccaagggaacaaacctgttcttcgccatctatgcagaagaaaagatagacgaaaagacaggagatatcgttatcacgagaacctacgactccatacctctgaatgtcgtcatcgacagagagaaacgagggttatcgcctgcacctgaaaatgaaaatggagccagtcctaaatatgtgctgtcgccaaacgatttggtgtatgtaccaaatgaagaagagagggaaacaggaagaatctgtgagcctttagacaaggagcggatatataaaatggttagttgtacaggaaatagatgcttttttattccatattcaacagccaagcctatttacgacaaagtggaatatttttcattaaacaaattggaacgaacacttaacggcggaacaattaaagaaatctgcatacctatatcaataaaccgtataggagaaataacattgcgttaataataacagccgaatagtttatcaaaaaacgataaaccattcggctttttgttttacaacttaaaagactaagcccatgatcaaaaaaacactttatttcggaaatcctgcctatctatcgcttcgcatgggacaaatggttataaaattgcctgaagtggaaagcaatccagaccttcctgagcgtatgaagcaggagtcggaagtgaccaagcctattgaggatataggcattgtgattctcgacaacaagcgcataaccatcacccagggactgcttgaagcattgctcgaaaacaactgtgccgtgataacatgcgacagccatagcatgcctgttggattgatgctgccgctttatggcaattctacgcaaaacgagcgcttccgtgagcaactggattcctcgctgccgctgcgcaaacagttgtggcaacagaccataaaggccaagattgacaatcaggcagctgtattatccctatacaccggtgtttccacaaaggttctcgaaagactctcggcagatgtcagaagcggcgaccccgaaaacgccgaaggtagggcagctgcatattattggaagaatattttcagcaacattccaaatctcagcgacttcactcgcgacagaaacggtatgcctcccaacaatcttctaaactatggttatgccattctcagagctgttgtggctcgggcattagtgtcaagcggcatgctaccaacactcggcatccaccatcacaacaggtataacgcctattgccttgccgacgacataatggagccataccgcccgtatgttgacgaactcatcatttccataatcaaggaatttggacgcgctgatctgcaactttcaaaggaggtcaagttccgtttgctcggcatccccaccatcgatgtcgtgataaacgggaaacgaagcccactgatggttgccgtgacgcaaaccacagcttctctctacaaatgtttcactggcgaattgagacgcatagcatatcctatacgtcttgatgcctgacaagaaggaaaaatagttatggaccgttttagcgaatatcgtattatgtggattcttgtattttttgaccttcccactgaaaccaagaaggacaagaaggaatatatgctgttccgcaagcggcttcagcgcgacggtttcaccatgtttcagttttccatatatgtgcgccactgcgcaagtatggaaaacgctgaggtgcatataaaacgcgtaaagtcatttcttcccgaatatggaaaggttggcataatgtgcattactgacaaacaattcggaaacatcgacttgttttatggtaagaaacctctacctccaaatgctccaggacagcagcttgaactattctgaacttttacaaaagtttatccgcattacacacaaattaactcacacaaatgactttctatggtcaaataagttaagaaacctctaaaaacagaaaagaagaattccgtcaacacatacagaattcttctttctcaacaacattttttatttttctaataatccatgtaacctactgtaacacagcatcttacacagactatattgttgattctaccacaaaggtaggaaatttcgagcaaatcacaacactttcttgccgttctttatcttggaataaattgttgattctaccacaaaggtaggaaatttcgagcaaatcacaacatgacactttcgcggcgagttcttcggctgattgttgattctaccacaaaggtaggaaatttcgagcaaatcacaacaagctgctcaaaatatcattggtaactttggttgttgattctaccacaaaggtaggaaatttcgagcaaatcacaaccttaatgtaagaaatcataaacagtagaatatacttctttgaatacatatataattaacgtataccctcatgttctttacataaattaaaattgaaaggttttcctttatgcttttgataatcacacataatacagtttgtatccaaacaatgtcttaaaccaaaaaaaccatgtccaaattcatgtactataaccgcaacaaaatcatccccttttgctctaaaatctgatactatagatttatttttacctagaggagtcaaacccataattccataattagaagtattatgtattttaaaagatatgtccttatgagttaatccaattatgtaaataggactacttctattaggtaaatcttttaagagaacatttgcaagataacgatgtcttggcttataataagcttttattggtagtggtctacttggtaatactttaattgaccaatacccataatacagtttatttaatttctttaataccttattacctaatatctctgcttctttttgactaaagtcttcatatggctgtaaaaatatagtagcacaaggttctaaagaaatagaatcagtaaaattatctactggttcaactttttctttgttagtattacatgcacatagacataatactattaataaattaataattttcatcaataaccttcattatattttaatggtaaatttacttcaattccataatgcttttctgtcatattagtaggtttattatcatagtgaacttttaaagggtgcccttcttcactagattcatatagttgttgattctaccacaaaggtaggaaatttcgagcaaatcacaactaatttctcctatatatatgttcatactgttgattccaccacaaagttgaagattttgcagggtgtatggtaaatatatggcactcttggtatgtcaggaattgctggaagtaaaacatttcaaaaagcaaaaatacaggcatgaccgttggataattatcaaaaataccgtaaatttgctgattgaataataaatgcagcattatggcagagaaatacatcaatccacatactgatttcggctttaagcgccttttcggttctgaatgtaacactgaattgctcattagctttctgaacaccatatttcacggcaaacagaatatccagaaagtaacatatataaattcggaatcacgttctggtttcttcgttgtacgttgcgagaatgacaagggagagaaattcatcgtggagatgcagaacgtataccaggagttcttcaaagaccgcaccatctattattctacgttccccatcagagaacaggcacagcgtggaggagactgggatttccatctcaatcctgtatacacgattggcttgctgaacttcaactttgccgacggtcttgagaatgcaaagcgctggcaccatgaggtgaagctgatggaggtggacacacacgaggtgttctacgacaagctcacatatatatatgttgagatacctaagtttgataagaaagagagtgaactcgaaagtatgtacgacaagtggatgtacgtgttgaagaatctctccaatctgatgcaacgccccgcagccctgcaggagcgtgttttcacacgtctgttcgaacaggcagagatatcaaagttcgacaaacaggaactgaaactatatgaagacagcatcaatgcataccgcgacatcgtgaatgccatacggactgcggaaaagaagaaatatgcagaaggacgtgcagaaggacgtgcagaaggtgagaaaaaggcaaaagaaagaatagcctccaatcttctggcacttggagtgcctatagaaactatcatgcaggcatcgggtttgtctgaagaagaaataaagaatatccaataagacatcttttgcctgtctataatgagcaatagcccgttatggcgaattaaaaagcaaaatccactcttctaaaaaacgaaatccaagtaagcacttatgaccgattggggggcagaattgggcacactgcttacccaaatggggcacgctgcttgcccatcatgggtaacgtgcttaccccggacgggcagaattgcggtcagacgtctgcccaataagttgatgttgtaatactcacattcccattttcaggattccgccaacgagttaagcattactatatttttttgagacttccatgatacttctgtgacacttctatgacacttttctgtaaagaagaaagaaaagtatcattgaagtattattctggttttcaagagattaggtatggaaaaagtctcgaaaatgatactatgacactttcctccggaaaaaagtatacgtgttacgtattacaagatgtaatgaccgattcgggattattggaaaacaataatgtaaggaaccaccctttggcagcaatatggttttccccattctattttagggatattccctcagtggagttggagggaaaactatacttttgccaacggaaagaaaaaattattgtagaacgtattaagaaaggacaactattatgaagaagtttatattggcagctctggcgataatgactattggctgcacggctcaggctcaggcttataagaacagcagatattacaaccagcgaactggacatctggactactcccgccgaccgggcacgggactgtatcagagcggcgagaactactacggactgcgcatcggaccgtcgttttctaccgtgagctccgatgacaagactcttgatggcggcaacgcgcagacgggcctcaacgtgggtgccgtggtgggcatagcgttgtctgaccgtgctcctgtgtttttcgagacgggactatactataccgagaagggcggcaagaagaagctcgacgacggcaagaagatgacctacgacctgaactatctggaggtgccgctgactgtgaaatatgcctaccctatcgacgaccacttctccatccagccttttgccggcggatacctggcatgtggtgtgggcggaaagataaagaactatcgcgagagagaagcagacccgtcgttctcgagcgaccgcttcaagcgcttcgacggcggactacgtttgggctgcggcgttgcctacgacatgttttatgccgacctgacctatgacgtgggtctggcgaatatctgtcacgatgagttcgacacgtcgcacaacggatgtctgacactgaacttcggagtgaacttctgagttccaaaatctcaatatatatttccgggcatggcttctcgaaagcgaggggtcgtgcctttttcgtttgcctatgccaacgtctaatagagtgatcatctctctaatgatattgacaagcagggctatagtgccgagttcagctccacgatattctgtgattaagatgctcgacagggaataataggcgaagccactgttgatggccatgcagtcggcaatgccacgatgcagattatccaagaatccgattaagcgagggaaatgggaatgaaaagcccccaaaggctacattcctgatacggaacagcactttgggggcatgcctatagtctatggattgcaaatacgctacacggcctgcttcttcaccaccagcgaggctccgatgctcaccaccagcacgctgacaatgaacacgagcgacgatatggcatcaatctcaaagaactcatggataagcatcttcacaccgatgaacaccaggagaacgcagacaccgagcttaagatagcggaacctgtcggctatcgctgccaggaggaagaacatggctctcagacccaatatggcaaagatgttggaaaagaacaccacataggggtcgagcgacacggagaataccgccggtatgctgtcgaaggcaaagataaggtcgctgaactctatcacgagcaccgtgacaaagagcggagtgaacagcaggcgtccggcacggcggatgaagaacttatcgccctcgaactgagggtgaatacgtcccgtcttggacagtagtctcacgagcggatgcttctccacatccatctcctccttcttgttgcggttgagatacatcttcacgccgctatatacgagcaccgcaccgaagacgagcaatacccagtcgaaacggcttattatggcagcgccaaggaatatgaacacgaaacgcaagacgatggcaccgagtattccccagttcaacacatgctgatattcattcttccccactccgaaggatgtgaaaatcatcatcatcacgaagaggttgtctacagagagcgtcttctcaatcagataacctgagatatatgacaccgtcatgtaatggcggtattgctgcagactcgactcgaaatcgtcgggattgagtttcagatgcgaggcatagcgcgaagccactgcctggagatcgctgaaattctctattccatgtaccatatcaccatgaaaccacaagaagacggaaaacaggagcgccaaggctatccatacggcagtccaggtgccagcctcacggatggacacctcgtgagccttcttgtcgattacaaacatgtcaagcaaaagaattgcggcgatgaaaaccacaaaacctcctaaaaacaacatttctgataattccatatttaaaaatttatagttgacgagtgacgagttgacaaaggcgggaggaatatcctcaagccagtcttctcaagcggatgcaaaaataattatcatttattacaaagttgttacaaaaacactgatatttagactttttaagcttgtctgaagagttttaagccctaaacaccctattggagatgccggaattaggatttttacactaactttgcagtcagaattagcttcacaataaatgtattacgtaaaaaagaagatggaaatagcaggctgccacaaactcagtctgccctacgagagcaaatgcaccaacctgcatggtcacaactggatcgttaccgtatactgcaaggccagagaactgaacgaggtggggatggtgattgatttcaagcatatcaagaacaagatacacgactatcttgaccacggcaacttcaacgatctgctgcctttcaaccctacggcggagaacatagccaaatgggtgtgcgaccagattccggaatgctacaaggtggacgtggaagagagttccaacaatatggtgacatacgttaaggacgaggaggaatgatgcggataaacgagatattctatagtctgcagggagaaggacgccacacgggaacgccagccgttttcgtgcgctttgccggctgcaacctcaagtgttcgttctgcgacaccgaccactccagatccttggagatgacagaggaggagattgttgaagaagtgaggcaatttccggcacgcttcgttgtcatcaccggcggagagccttcgatgcaggtcacggcatcgctgatagagaagctacatgcggagggatgctatgtggcaatggagaccaacggcacatacgaactgccagaagactgccagatagactggataacatgttcgccgaaagggaaaccgctgaagctgcacaggatagacgagctgaaggtggtgtatgagggcaacgacgaaggagtggacaaatatgccaatgtaaaagcaaaggaataccgcctgcaaccatgcgacgtgaaagacgagacgctgaacaaggcaaacctgcatggagcgatagactattgtctgaaacatcccaaatggaaactgtcgttgcagacacacaagataatcaacgtgagataagtttcaatacgcatcaacaaatatatttctgtttgttttttggagtaaataaaaaaaatgtatctttgcattatcttatagacaagtttgtaattaacttattttgaacaacagacagaagaacatgacactatatccgctattattcgaacccaacctgcacaccgtggtatggggaggcgacaggctctgcccctataagggactcaagccgcaagatacccccatcggcgaaagctgggaggtgagcgccgtaccgtcgagcacaagcatcgtgagcaacggcgaatgggcaggcaaagaactgacaaccgttatcgacgcacatccgaaggaaatcctgggcgaatcggtgaacaagctgtatgatggcaagatgccactgctcgtgaaactcatcgatgccaaaggagacctcagcattcaggtgcatcccaacgacgagatggcaaagagagtacacggcaaatcgggaaagacagaaatgtggtatgtcatcgacgccaatcccggcagctatctatatgccgga

SEQ ID NO: 727 - DNA, 22634 bp, synthetic construct
  misc_feature 1..22634: note = Synthetic
  source 1..22634: mol_type = other DNA
aactggagattgcagaaattatacatccattgaaagcggcggaagcaaaagaacggagcaaacgctgcgtaagtcattgcttgaccagttcaaacttgtcgatgtctgttgcccatccgtaaggatttcccatttctactttattatatccttgtttcagttcaacggggagggttacggtagctgtttccccgctctcctgtaagtcggttagcttcttcgtcactccgtttatgcttacttccagttgcctgtgtttggcagggatgtagctgatggtcatcaggtaatctcctccctgttcgctgtaaacgttgtcccagcgcaggatgttttccttgcgtcctcccaagtacgctacaaccatgcttcccgaagcgttttcgttgaaagcatataacacttgcttttcgcgtttgcctaatgcgtcgaagcaaggcaggtacccccattcggcctcgtatctgcgtggttcgagcctccgttctccttcggcgcggagtatcatcacgctgcgcggcgggaggttgtacgacaggctgtctgtggctgaatcaatattccggcgggcgtatcaggtcacgcagttttaccttgcccgccagttccaattcgctcaggggtacggacacatggcaagcggaatccgatggattgtacaatgccacggcgcgcgtgttgcctctccgtttttcaatgtccttcaccagtacgtaagcaccggaccggcgttgcactacataggtttgcagccccaacgggtcttggttgagcgcaatcagctcttcgtttttcagcaagtcgagcgacggttgcggaatcgtggtcaggtcgcacccgataagcagcggcgaactcatgatgcaccataatccgaaatgtgcctcttcttcgttggcaggaagccctcgtccgatttcaagcatatccatgtcgttataatgcccgtctttacagtaagccgacaggtaaagattccggtttacgatgtcttttatcgaagcccattccgggcggatgtccggactgatgcgccacgatgcagcgatgtctttcgcccacgtgccggggaaagtccagcggcagatgtttatgctcacattgctgcatcccgccttgtcgaacgcctcgcgtatttccgtatagcggattcgttcgtcgaggttcagttcgtatcccgctccgcagtaatctattttaatgaagtcgaatccccattctttgaaatacagcagggcatcttgggtttcatgtccgtatagtccggcaccgattccgttcgtgtcgttatcaaactgcgacccgcaggtatcggctccggcgtcagaataaatccccgccttcagccctaacgaatggatgtaccgggcaattccctccagcccgtttggaaaacgctgcggatgcgtgtgcattcgtccggtactgtcgcggtaaccgaaaaatccgtcatcgatgttgatgtagccgtatccctttgctttcagcccattgtctattaaggctttggcttgttttcttatcagcgaatcgttgatgtttacccgatacgtgttccatgaactccaccccatgatgggagggttaaacggttgttccgttttcgggttggttgcatttcccattagcgggagaagacaaagagctgttgctgccagtcggataatagtgcttgttttcatacctgcgtgttgttaatcggtggtaaatatagaaagaaatattgaattgagaggtgctttagagtttgtttaaattttgctcggcaaaacaacttattggaaaatttaaacaagctctacggtctttgtccatgcctattcaaagaactaaattatcaaacttttaacaaacgtacaaatgtacgacaggctcttaaatgcaattccaaacgcaagccgtagcactacccaacgcaagccgtagcatgggctgacgcttgcggtagaaatgcttggtacatgcggtagcgtttttgtgttccattccgatgggttttccggtacaaatagagtaaaatccgtgaagctttgggcagggtatgacgtaatttccctatttttgcgcgatgaatccaaacccgaacagaaacagacgatatggcgcagtctctttatctttttaatccggaacatgatatggctttggctaactttacgccgtactataaagctccttccgaaatccggcgtatggcaaacgacttgtcggtgcttccggcgtggtatgccgacgaggaggatgaggcattggtgaagattgattccgccggacgtgtagaggggtgggagtctccgctttatccggagaaagtggcgtggattaccgggtggagggatgccgattaccgtccgtggggatggaatccggcgttgctgcacaggcttcgcgaggcgggagtcggtgagggatgcctgctctccgatgagcgcatggagcggattcgccatctttcaggcaggcaacgctgtgtggatgtgttggacgggtttcgggggatgtctttcgtatgtgggcaggcagtggtttgccgttcagtggacgaagtgaagaaacgtgtctcggagtggggtacggcggtactgaaagctccgtggtcgggcagcggcagagggttggcgcgcgtctcggaagcgcagtggagtccgtcgttggagggatgggtgtcacgcatactccgcacgcagggagcaatcatgacagagcctttctataataaggtatgcgatttcgcaatggagtttcgggcagacggtagcggcagggtggactttgtcggctattcattatttgaaacggatgggtttggaaactacaaggcaaacctgctggctgcggatgcggagatagaacggcggctgtcccgatacgttccggtggaacaactgaatgccgtgtgccgtgagttggaatgccggctttcgctgctgttagcggcagactacgcaggttatttgggagtagatatgatgatttgctcagacaacggcggtctgctgattcatccgtgtgtggaaatcaaccttcgcatgaacatgggagtggtgtcgcacgtgctttccgtccgttacctgcatccgctcgctacgggcaggtatgtggtagagcattattcagccgacggggaagcatgggctttccatcagcagatgagccgtgatttcccgctggagatgcaggcaggcggtatcgcgaaaggatatctctcgctcactcccgttcgggaagatacgcactatcaagcctacatcacggtggggtaagcggaagaaaaccgttatactttcccttccaaccatgcgtctatcagccggcgggctatgctcagtttcttgggaatctctggcagattgtcgcgggtataaaacgctccggcactcagctcgtcgtcttgcagcttgatggttccgctttcatactcggcggtatagcccaccatgattccgctgggataaggccacggctgactgccgaagtatctgaggtttttgatgcgcagttcggtctcttccatcacttcgcggcacacacattcctccagcgtttcgcccggttcgagaaatccggctaccagtcccttgaacgttccccggaagttacgcgcatgtaccagcaggatgctgtctcccttcttaatcagtacgatgaccgccggagagatacgcgggtaaatttcctgtccgcacttcgggcaacgtttggcaatggggcctacctgtacggtggcaactccgcaggcgggacagtagcggctgttcttgtcccacgtcaggatttgtgaggcttttccggcaaggtcgtattcacagtgcgaaagcacatcgaacgaagcccgcaggtctttcagcaaatacggcgtaccttcttctgctatcggtgcatcgagcgcatacgcccgtgcggtaagtccgttcaggctgcctatctcgtgtacggtgtttcccgcagggacggctacgggaggcttttcccccgtgggaatatgataaccgtctgcctgtttctctatcaatacttgtccgttgtaaaaagcgaaccagccgtatgcagcggcttgtttcatgtctttttccataatcagttcagtcctttcattgttagttggatgcgttttcgttcgcggtcgatgctcatcacacggacacgcacgtgctggtgaatgcttaccactgtggaggggtcggagatgaagcggtcggcaagttgggatacatgcaccagtccgttctctttgatgccaatgtcgacaaagcaaccgaagttggtgatattggtcacaatgcccggcagttccatgccctcctgcaaatcatcgagcgtgcgtacatttttgtcgaactcgaacatctctatcttccggcgcgggtctcgtcccggtttatccaactcctgcatgatgtcggtcagcgtgggcagtcctaccgagtcggtgatgtaattttctatctttatccggctgcgcagttccttatcctttatcaagtctgttaccgagcagccgaggtctttcgccatacgttccaccacagaataactttcgggatggacggcagagttatcgagcgggttttccgcccccggaatccggagaaatcccgcgcactgctcgaaagccttagcccccatgcgcggcactttcagcaattcgcggcgcgagcggaacgcaccgttttccgtgcggtaatccacgatgttctgagccaaaaccgcacccagccccgaaacgtatgtcagcagatgcttgcttgccgtgttcacattaacccccacaaggttcacacagctctccacagtctggtcgagcgaggctttcagtttgctctggtctacatcgtgctggtattgccccacgccgatagacttcggatctatcttgaccaactccgcaagcgggtctatcagacgcctgccgatggataccgctccgcgcaccgttacatcgtagtcggggaactcctcgcgcgccgtcttggatgccgagtaaatggaagccccatcctcgctcaccacgaatacctgtatctcacggtcgtaccgctgggaggtgacaaactgttccgtctcccggcttgccgttccgttccctatggctatcgcctctatcttgtattgctctactaattgggtcagcttgcgtgccgcctgcttatattccgacttgggcggatggggataaatcgcctcgttatgaagcaaagccccttgcgcatccagacacaccaccttgcaacccgtgcggaatccggggtcgatacccatcacgcgcttttgtcccaacggcggggcgagcaacagttggcggaggtttccggcaaaaacacggatagcctcatcgtcggctttctctttgctgatggcagcgtattcggtctcgatggaaggtttaagcagacgcttgtacgcatcgttcaccgcttcggctacctgatgtgcgcactcgttattggtttttacgaacagccgctccagccgttcgccgcattccgtttcatcggcaggcgtgatgcttaccttcagtatgccttccttctcaccccggcggatggcaagcagacggtgggacgtgcatcgcttcagcggctcactgaaatcgaagtaatcgcggtacttggcagccgcctcatcgccttccttaccctttaccacctttgccgtaatcacaccctgacgctcaaactgccggcgaatctggttgcgggcacgctcgtcctcgctcacctgttcagctatgatgtcacgcgctcccttcagtgcatcttcctcgtctttgacatcgcccttaacgaaagcgcgtgcctttgcagcaaggttgttttcgcgctgcatcagcaacagaaccgcaagcggttccaatcccttctgtcgggctatctcggcgcgcgtcttgcgcttcggcttgtaaggcaggtaaatatcctccagctccgtgccctcccaacagtcggcaatgcgtttgctcagttcaggagtcagtttcccaagctctccgatggtcgataaaatcgtttccttccgtttggcgagttcgcacaacttttcgtaacgggcgtttatttcgctgatttgtacctcattcattccgcccgtagcctctttgcggtagcggctgataaaaggaatcgttgccccgtcgagcaacagtttaagcgtattctgtacgcgatgttccggcagcttgagcgcatcggaaatcatccggctaaattcttccatgtcttgtttctgttcagattcggaacgcgaagttagcgaatccttataaattgcggcgataatatatagaatttaacaaccggacgcagaggatgcaggttatgtgcgcttctgttgtaaatggcatgaatagaatatgttacattcatgtagagaagtctgtactgataacaaaaaattctacccgtaggacgatggagttctatgggtagaatgagtgtgttcttccgcatgagatgggtgacgctaaccgaagcgttttttgtaggataactgttgcggttttcttggatgattggttggggttatcattcctttccgtcggaatcagggttgctcaatttcatccgcagtatggggaacggattgccttgatcgtccgttttcatcgcgacggaaagtttcgaagccgaggtgacggtaaaaacctgctgcatggggattctgttcgtttacgtctacgtaagcaactttatagcggttgacggcaagatgcacgagctgtttccccaatccttttcctatgcaggagggagcgagaaaaagcatctctattttccggtcttgtatgcccatgaaaccgacgggcacatcggcttgaaaagaaacgagcaaggtttctgtttccttcagggcaggagctacccacgggctgaggcggcggatgtcctcgcctgtaaggaagtgatgggaggcgcgtaccgaggcttcccatactcgaaccaactgttccgtaaattcatcggtacgttcagtccgcccgatttcccgaatcagccggagcgattgccattcttccgctgtaatccgcatgaaatgttccgtgcgtacatcgccgagcggagagacattgccggtttcggtgtgatgatacgtcagtccgcacttctccatcacccgcctcgaccggttgttgccgtcataatatccgcaccatacagccgatactcccaaatcgatgaaacatctttccagcaggcatctcacagcttcgggtatcagtccttgtccccaataaggcacgccaatccagtaacctatttcagcctcgttgtcctgcatggctgcactgtgcatcccgtcggtaaacatgatgcctgcgcttcctaccggctcgcccgtttctttcagcaccacggcgtaagtttcgggagcggcgaaaacggtgcgtataatctccagactctcggctacggaggtgtgcggatgccatccggctatgggaccaatggcagggtttttcgcatacttatataaagcctccgcgtcggcttcctgccacgggcggagaatcagtcgtgaggtttcaagatggttgctcataagtaataatctttctttggatggtttgtatgaattgcagtgctttcgttgcctgtaaagtcagttcttatttttcctgctttaaaatctcctgcatacggggacggaaattgtttccccattcttccaacatgcggatgataggtattaaggtcaaaccttcgtcggtaatgaaatattccacgcggggaggcatttccggataaatctttttccgaatcatgccgtggcgttccagctccttcagttgctgattaatgacacgcggactggtgtcttcaaaatggcggtgcagttcgctgggacgcttgcagcctttttccagctcgtagaggatacatgatttccactttccgcccatcacttccattgccacagccactccgcaatcaaggtctaaaggtatcttctttttatacataagttccgttgattatggttctgccaacaaaaataattgttttgcccgaatataaaaaggagaaatttatccctatctgaataattcgaccctacttgacctgctttttccaatcgtttatttttgcgggtaaaagaacggacgtatggacaggcgcaaatttttcaaaacggcaagcatacttgttgcggcagcgggcacccattgtctgcctgccggaggcaatgagctgttctataatgttattcagacggaatcattgaatcattataataaaaaacgtatgaaacacaaatgtaagataaccgtattaaagcgagaatgttacaaaaacctgcaagctgagtatctggcagacccacagtcgggaccctgtccttatttccatgaaggacaagaaattatcgtagacagcgacaactttttccgtatgctgaacggaggattctgttcggaagcatgggactgcatcagccggtatgtttatgctgccttgcaaggcggctcgattatgcgtggttggacaaacgacgagaaagtcatgataacctgctgtaacgacggcacacgcccggttatcttcaagctcgaacggttggacgaagaagaataacaccgagtctctgtaacaggcaaaccgacccgaatcgaaccttcggaaatttattgtcggtttgcctccttgatgctccaaagcgaaacatgctcgttacggtagcgggcgttaggatttatctcgccgcgtgcaagcaacgggtcgtcgggcagcgatttgaactgtattgctttctgcgggcagttctggatgcaggcaaaacaaaaatcacagtcgccctccgtcttcactccctgcgaagtcagcttgtaattacctcgcggacaaacctccgtacagattccgcagtcgatgcaggcatctgttactgcaaagtatttttcgctccgcatcaggaatcctacctccgggtcaagccccgtataagccatgaatccctcatgttggcgacgttcgtcatcgctgaaaggttcgtgccagtggcgtttcgcctgaaggtcggaggtgatgcgcttcagactttcgggaatctgtttgtctaatttcatctcttccgccatatcaaaattcggcaaccagttatccaccataatcatcgtagtgatataatcgaaaggacatccggcacgttgagtaatctcatcccatatccctacggcattacatttgcgcctgccgtaagtcagcacggcaaacttatatcccgccgccagtttcgcccgtttgatgtactcgcgcaccatgttgggcggcatgtgtccgtagataggataaacgataccaatctcgtccgcctccagttcgtaacgcttctcctttaccaactgcggcatactgagcagctcagtatgctcgtcagctaactgacgtgccacatataaacaattccccgtccccgtaaaataaagaatgatacgtttcttttccgttttgccacacccggtaagcgaagtcattccccatgcagccgttccagcaataaacgcccccatccgcttgagagcagaacggcgagatattcctccggtatgttctttttccatagacacttgtttttagtttttacaaatgtacgccgaatcacatactccattaatacacaaattacagaataattcacctattttacagtaaaagaaaggcagaaatgcggtaaatcttgtggaggttggcaaacggcttttctgtaacaatggaagtaattaggtttttatgcttgcggtatgctttccgttgatagaaagattaataattgaataggtaattcaaatgcttatttttcttgagcgctgtaaaatgagaggaataaaaaatcccccgttaaggtcgagggaaacctaatgttttcacaacggaataatccttattgtgatttgcttcaaaatagtattgcaaatataatataatagttaaagatagccaagtcttttgcggaaattttataactttgaaaaataagagaatttttatgctataaaaaacacgttatgaagaatattttaggacttgatttaggaaccaatagtattggttgggccgtaattaaggcttcgacaaatgaagaagggaaagaacaattacataatatagacagtgcaggttcgcgtataattccgatggatgcagcaatattgggcgattttgataaaggaaattcaaaatcgcagacagccgaccgtacacaaagccggggtatacgccgtttgtatgaacggtctaatttacggcgtgaaaggttacatcgggttttgtctttgcttggctttttgccagctcattatgctcgttatatagaccggtacggacggtttattgattatgcagagcctaaattgtcttgggataaggatgaacaggggcatcccgtttttatttttcaagattcgtttgatgaaatgttgaatgattttcgtcagtttcagccggctttggttgataacggtcggaaagtgccatacgattggaccatttattatttgcgaaagaaagcacttacccaaaagattcggaaagaagaattggcatggattttgcttaatttcaatcaaaaacggggatattatcagttgcgtggggaagaaaccaatacatctactactgctaaaagtcgtcagtatttcgatagtcagatagttattgatattattgatacaggacaactttataaagggatgaaagttcttaccgtagtattggaggatggctcaaaaggtaaaatttttaagaaagaaattccagactggattggtcagaaaaaagacattatagcatctgttgatattgataaggatggtaatgataaatacgatgaaaatggtgaattaagttgccgtttcaagattccttcagagcaggaatgggatgaaaaatgggaattgataaaaactaagacacagcatgatttagatgtgtcagataaaacagtgggtgcttacatctatgacactttgttgcaaatgccttgtcagaaagtacgtggaaaattggtaaggaccatcgaacgaaaatattataagaaagaattgtatcagattctggaaaaacagaaagagtttcatgaagagttccgtaatcgagacctgtatttggcttgtatcaatgaactctattctctgaatgaagcacatcgtaatgaaatagccagtcgtaatcttgtttatctgttcattgaagatatcttgttttatcaacgtccgttaaagagtaaaaagtcattgatcgctgactgtccttacgaggaatatacttgtacaaataaagaaacaggagagatagagcatttcggagtgaagtgtattgccaagtctcacccattgtatcaggaattccgcttgtggcaatttctcgcgaacttacgtatatatcagaaagaacaagtagacaatggaaaaacctgttatgatgtagacgttacttctgattttttaaagacggaagatgattatacagaattattcgattggttgtgtgagcaaaaaagcataaagcaagacagtatattgaaatgcccggttttcggcttgaaaaagaatgatattaataagtatcgttggaattatgtggaggataaatcctatccatgtaatgagactcatgcacttcttcttgaatggttgaataaagcaggcatagcatcttcttttttgaactctacgaccgaagaagatttatggcatattctttattctgtttcggataaaaaagaattagaaaaagcattaaacaaatttgcagaaagatatggacttgccgcaaaatttgttgaagtattccagtctgttccgccttttgagaaagattatggagcttattcagctaaggctataaaaaaactgttgcctttaatgcggatggggaaatattggagtgaagataacattgatgaacagacacgcaggcgtattgataaaatgatatcgggagagtatgatgataccattcgaaatcgggtaagagaaaaggctattcatctgacggatgtaacttcattcagagggctcccgctgtggttggcctgttatattgtgtataatcgtcactctgaagcacgagatgtcaaaaaatggacagaacctgccgatattgatgattacttgcgtaagtttaaacagcattcgttacataaccccatcgtagaacaaataattcttgaaacattacgtacagttcgtgatatatggaggcaagtaggacatattgatgaaatccatgtggagttagggcgtgaaatgaaaaatccaaaagataaacgcgctaaaatgactcgccagatgcaggaaaatgaaaatgcaaatctccgtattaaagcaatgcttgtagagtttatgaatcctgaatttgagattgaaaatgttcgtccgtattctccaagtcaacaagagttgttacgaatttatgaagaaggggttctcaatagtgtaagtgaaatatcagatgaaatagctaccatcattaagaaatttaatgaaagcgatataaagaaacgtcccactacatcagaggtattgaagtacaaactttggctggaacaaaaataccgttctccttatacgggagagatgataccactgggtaaattatttacaccggcttatgagattgaacatattaagacacaataaaaattgtatctttcaagctatgagataattaacagagaaacaaaacagacttgttaacggtttagaaaccagcgaacttctataatctgcctcattttgcatcaagcgaaagaacgtccttactttttgcaaaggtacaaaacagtccccgtctttgcaaaatttcccgcaattttatttcgcccgcaaattttatcctccatcatttttcctgttctgaaaacggcttccggcttgatgtgcgcaagcccatttcagaagcagcacaagcaaagaaaagcccacgacgaccacaatgtcaccagtgacactgccatcgtcgcggacacttcttttatgtgcttgtgctgaacggccaagaccgtcttattcgtttttcttttttcgtttccgttgtcagccggaaatgccgccggatgcaggaaacggcaagcgtgaatctgctcctgcgactattcccggctgtcatgtgtggcctgtcttccaaccgtcttgccctgccgttgccaatcggagcaatggcaggcaagaccattttcagacagatgccgccggaggaacacccgcgaccgcaagccatgcccgcatgacaatgacggtcacgggacttccgtcacggcggcaggaaagcgaggctttcccttgtcagttgcgccgccctttcgattttcctgtggcgcgttgcgccatttcacatacttcccccttttcctttccgtctctccaagtgtatgccaatgtccccatgccgccattccagacggcatcagtggtcattttcgttgcaggggcaaaggtaaagacgggattaggaacacaaattttttagccacaatctccacacttcgcaggctcaggtagtattctgtcgaaaaaatttgctgaacctactcccctgacctttgctttttcccctgaaacgaaaacgaccggtgcgcggtcggaagacgtcacaaggagacatcggacatacggagaggcgaaaagaaaaaggactcgacccgacctccccatccgagcaagacaagtaacaacaatctaaaaattggaagatatgagaatgacattgaacgacatcggaaaggctatgcggagcgtattgtccgcaatggtgagagcagcatggggcattaccctttgcgcaggaggtttggcggtgggcatcgcaggggaaatcctgctgggtatgttgaacttcatgttcggcatcctcaccgccctgctttcagtagtggcagctatcggaattttcatttggttattaaccctttaattcatacggatatggcgaaaagacacagcaagacagtggcacaacaatgcaggtattacgaggtggacaacatcttcgagtatatggtagaggtgtgcatcaacggtaacttttcctcattcaggaggttgtaccacgagttgaacaaggaggcaagaaaggacttcatcgcctttctcatcttggaatgcccgccccaataccacatagagattttacagaaaaccgtataaccatcttaaattacagacaatggaaacttttgacttttatatggattgcaaggtaacttgctgggaacgtacccgcttctccatcaaagcgaacagctatgaagaagccaaatccatcattctttcatgggaagataaagacgtgaacagccatatcggtatggacgagaacgtcatctattgcgactacgaattgaaccccgaaacggtggaaggactgtcccctgcggaaaacgacaacaaccctacgatggaaatctacggacgggatgacgagttgttttatcacaatatgttggacgaacaatagagcaaagttatgagaacggaaacgaggaaatacgaagtttacaaggtggacgagctttcggacaaggcgaaagagaacgcctattggaagtggttgaaaggctttgaatatgacgcatccgacaacagggcaacgttgaaagcctttgaggagattttcaaggtaaaggtaagcaggtggaattatgatgcctgtacctataatttccaattcatctcaaattacagcggggaagaggaagaactgtgcggtgtgcggttgctgaaattcatcgtgaacaactattggcacaaccttttcaagcccaagacctattggcacaaaaaggacttccacaaacagcgcagaagtcggatatccgtaaccaatgattgtgtgctgacgggttattgtgcggacatggacatactgaaacccatatacgactttctgaaagtccccgacaagcatacgaacttgtatgacttgatgaatgactgcatcgacagctttttccgcttttgcagggatgatgtggaatatgctagcaacgaggaagcctttgagcgtgattgcgaagccaacgaatacgagtttttatccaacggagaatttttcaaataactaaaatacatacagatatgaacggaacagaccatttcaagcggaccatccaagcctatttggacagccgtgcggcggaggacaagctgtttgcagcaagttacagcaagccgaacaagaacatggacgattgcatcacctatttgttgcattgggcgaaaagccaatgcaatggaggcaacggcataggcgttaccgcaggggaagtcttgtcgcaagcggtacactattttgacgaggacgacatcgacatcggcaaaccaatcccgtgccaagtcatggtatgcggagttgaactgacggacgaggaaaaggcggaagcaaggcagagagccatccgccaataccaagacgaggaactgcgcaagatgcaaaaccggaacaaggctaaggcgaaccaaaagacaaacgcacaacaagttgaactttcattattctgaacctatgaaacccaagacacccatacagaaagaagtcatccgtctgagcgcaaccctgcccgaactgacaaacgcacagagaacctacgctttccaccattgtttcaagcactacggcaggcggactgcaaaaggcgtcattacctgcacggagtgcggacacgcatggaaaagcggacacagccttgccgacacgctttgcggatgcacctgcccgaactgcggcacggcattggaaatcacggacacccgaaagagggtgttcgtggacaacgagtatttctccatcatcaccacctgcaaaggctaccaggtaatacgtttctttttcgtcaggagccgtcagaaagtcgggcaaaaggcggagtattccatctttgaggtggcacagcggtggattgctcctgacggcaagtccgagacagtggcaaggttgcgtggcttttcacttctctactacgacttgtggaacgaggacagcccgatggaaatccgcaggaacaaccagcataaggtgtatgacattgacccgatatgcacctatccacgccgacggattatccccgaaattaagcgaaatggctttgacggcaacctgcacggcatactgccttacgacttcttcaaggctatcctttcggacagccgtgcggaaacattgctgaagtcgggcaacatcgaacacttgcgctatttcctctcccgtccgcaggtacttgacagatgttggaactcgtacaagatagccatgcggaataaatatgccataaccgacatctcattgtggtgcgacctcgtatatctcttagagagattgggaaaagatttgcgcaacccccgtttcatatgcccgcccgatttcaaggcggctcacgacctgtatatggggaaacggcaagtccaattggagcgtgaacggcagcagcaacacagggagtgggaagccgagcggttggagcgtgagcggaagcgtctggaagaaatggcgaaagagaaagacgagtatatccgaaagaaagccgcattcctcaaccttgtactgacggacggtctaatcatcgtcaaggtgctgcaaagcgtggacgagttctacgaggaggggaaagccatgcaccattgcgtctatgccaacgcctactacaacaatgagaactccctgatactttccgcacggatagacgagcgacgcatcgagacagtggaggtggacttgcggacattaaaagtggtgcagagccgtggcgtatgcaactccaacaccgaataccacgaccgcatcatcaaattggtggaggacaatgccgagcagatacggaaacggatgaaagaagcagcgtaatcgtttaacaacttaatacttattgatatggaagtgagaatagaaaacatgattttcgggtggcacgagaaactgcctgaaatgttcatcgaattgttgaacacgcttgtactgacaaaggacgagcaggatgtaaggggggtaatggaggtgttcgcccgaaagaaacttttcaacgcccttttcgcattcgggtatggcgcacaccatctgtgggtgacacagaaaaaggcatccgaccccgaccaatgtttggagaacagattactgattgttgaattttaattgataaggctatgacaacaagaatgactattaacggagtaagcacctgcacggcaggtgagaaatacgagaaattccaactgaaaatcgggcgcaaagtccgcacgatgtaccaatatgactatcgggacaccacaacgggagaactgttctcctgcgtgaaacccacattggacgagtgcaggcggttgcgtgacgaatggattaaagcgaaggagggcagacgatgagcgcaggatatgaaacgctgatagtgacgttcagcgaccctatcaaggttttggacaatatgttcgccgatgcggacgcatggggaacggacagcctcaaaggatgggtggaggactatgaaagtacgaggtttacgcagataaacgggcatacggcagtcatcacttccgaatacaacatgccctgcgtaaaggaatggctcacacgctgcacggctatcgccgacataaaggaattttgagtgcgtggcggtggaaacaccgcccacactccattcgtaacaactgaaaaaacaagcgaaatgaaatactatttcatactgacagacggcagggacgcatgggtgcagttcgtttacctgcccacgcaagatgaagcgtccggttatatccgagatttgcggagcgtgggaatatccgtacacgggtataacctttggaacaaggacacacgccccattgccgagcgcacacttgagcgtgtgctgcaaaggataaagcggtaaaatcgggcggcaggcttgccgcccgctactttctttcatgagcaggtcggcggataagaaagtagcaaagaaaccgttgcccccatcttcgataagatggaaaaatccaatgaagtcattaattatatatcccagtctggtttgataattgtaggataacgttgttgcctgacaatctttaatttttctatataatataaatatatctctttgtatgaaccaaaccccggttgctgcatatcctctttgatggataagccatcaaaaacaagaagccataatcttaaagcaacccctaaatagccccaaagaagatccatttcgtgcaattccagtttagtaaccaaattttctattcgaacatccatatctggatgggttccaccaccagaaatagaatcctctcccattaataaaagggctgctaatgtagttgcaattcctgccttataggttcttccccatgcagagttatattcagtttgaataaagctaattgccatatcatctgctgcaatttcatcatttattgaacgagaaagcgtttgctgtatttgtgtatgccccaaataattatgtgaaaactcgtgagcatatataaatgctattgcagcacaatagacatcattcgcatggcttataatattttcaaattgctgcggattacagatatttggagtaacccaatatgcatctctattaaagttatgtaataattgccgtcctctgaaaaaacaatcattgccatattctacatctatcatattgggcttatatccatttttattaataccaacagcatccatcatagggatatgtataacattttcaaaatatgcgataagatagacacaaacagaccataaatactgacagaaattttcgttgatatatatatgatttaatttattattatcttttttaatttccgcaacatcactaatagctttctcatctcttatgaaagtaaatcggcgagaaaaattattgctattgcaatcattttttacagcatctaataactcaaaaactttttcaatatattgaataacatcatcagataactgttctacaggtaaataatagatttctttcggctctttcatttttcgaaaatttatttgtaaagataatatgtttatttgtattggaagcaaaaattccttgcgaaattatttaccgcaaggaattttaatcatatcacggaatatatagcaacgcaaattctgtttttcttcgattgaatagcatggcgtgctgctttcctttgtaccggcagtaagcgatatattcacggtaaatgtctcgattcccggcttccagcttgcggatgagtttgcttttcgggtgtccgccgtgaccaagcaataccccttgacccacattgaaacttaatacggtaagaagcaaggcatctttaccaaatttgcggaacagcttgtagcgcaccgccaaatccttgcggagcagggcttcggcttccgcctccgtcatgtcataggaaaggttttcgttgggcaacctgcgatgcccgtagccgtagtaggggtaatcggaacggtcgtgcagtccctcgtacttttttatcagttcaacggcgatgtcagccttgggatgattgttaaacgatgccagcagttccgccatgctgtccgtgtcttgtgccggcaggctgccacagagggcagccgccagcagcaggagcaacgccttgcgcatcatcggctggcgttcaaggtgtcagacacagcgacgcctccctccgtttccgcgtccgagtcgttgttgaactccaattcccactcgcaggcattgccgaaattgtcctccaccgtgatggtcaggctttgcgactcgtcgcactccgaggtgtaatataggcggaatttttcgttctccagcaggtagcggtcgttgggctgcaacaccaagccgttatccagcttcaacgtgccctccccgtcgtattggaaatagcggatggtatagaccgccccgtcaaactcgccctcgcgtaccagttcgcaacggatttccgccgtctcgccctgcgccagttccttcggcacgggcatggcttccaccgtgaacggataggcttgcgtcacgtccaaatcgtcatcgcaggcggtgaagcatacagagagcagccccagacaaagggttgccaatgattttactatgtttcttttcactttccgtgtattgtttaatttgttcatgttcataaccgttacattttaagtttgatgttcttgttgttcttctcgttttgtttcagacggctttgcagatactcgttcaagtccttgcatccgccgtagatgccggagcagtccgacaccctttcgccgtaacgtgtgcgcagggcttccaatgtccgccgcccggcttcgtcgttgtcaaggtggcaccgcaccgttccgtagccgtccagatgccggtacgccctcgccacattggacaccgagttgaggacaaggtggtcctccccgccgccgatgcctaatgcacgggcggaaaggtagtccacaaagccctcgtacacgttgcaaacggcagagcctgacggcagcagggtgacgtcctttggcggcacacagcccttgaagaacgggttgcgtatctcgtagccgccaccgcagttgccgaaagccacggcgaaataccgtttcccgtgcgtggagtagcgcatctccttgcagttcgcgatggctatggcggacggtatgcccctttcttgcaggtaatggagtaacgcccggctctgcaagggcagcacttccacgtcctcgaagctgtgtccggctggttgccgcacttcgggggtgcggcgttgctcatagtcctgcaacggcatgtccgccacctccgccacatacctcgcctgtgtgaggaagtcgccgctttggatgaactcccccgcaagggcgaagatgttaccgcccttgccctcgccaaaatcaaaccagaggttcttttccgggtttaccttgaaggaaggcgtgtgttcctcccggtacggcgacctgtaccagatggcgttggcacgtctttgcacgggatgatgccccagccgtgcaaggaagtcctccagcggatagcgtttcatcgcttctatatccatataggcgcacattcagttgatgatgaacttcacgcctatcccgtattccgtgtggcacacgcccatgctgccgccccacaggaagcgttcacgcagcgaggccgtcagcgcaatgaagtccacgaggtacagctccatttccagcgtggcggcgcagccatagacaaaggcgtccttgttgttcagcctcgccccgtcgtacagcgtctttccgccccagttcaccgtctcgtacccggcaagggctgacgcgccagcgtagaagaacaccacctttttcgcgtccgagaggaagttgtagtagtaaccgccctccgccgtgaactgtgccgcagggatggtcgtactccggtatccgtggctggttttcaggtattccagcccgtacacccacttgttcccacctttcgcgtagctcgaaagcatggctcccagcacatagccgtccgcctcgttcagcccggctctcaactcgatgccccgcatcttcggcaggcaccgttgggcttccgcccgtcctgccaggaggacgaacagaagcgttacaataaacagtacctttcctttcatcgcacgcgcagttcgttgatggtttcagcctgtaccaagtcctcgttctccacggtaaacgtctggtggcgtccgccgtccttctcgttcatctccaccacgagctgcttgccgtcggggatggtgaacttcggaaggcagaacaccgtgcgttcggaccgcttcccggctacacggacggcgtagttgtaggcgcggagcgggaacagcacctgttcctgcatggcggtacgcttcgccaccttcttgtccacaatcttgaacgtgatgtagtccacgtcaaacggcacattgctttggttctttatctccgtgtagaaatacagcaggtcattgtggacataaatccctttcagcaggtactggatgccgaaacgcttgcagccgatgtgcttcaccttgcgcttgtcctccttgtgcagcgacttcatgatgaggtgtaccagcatcgggctttcgctgcccagttccttcaggtagatttcctgcgcgttgttcggtcggttcaccgtgctgccgtcgtggataaagtccttcatttccacgttcaggataagcggctcatcggcgtatttcacattaaatgtgtaaaatgacccgtcctccgtgatgacgctcatgttcgtctcgttgcggaaattcttgaccgtcgccttcacacggatgacgttctccgcaccgtccgccttgcccgctatcaggttgggcgaacccaagtccacgtagcgcaccgccgccggaaacaggatgtggacggtcttgtcatacgtgacttccaagccgtgcggcggtatcatgcggtcgaacatcagctttttcgtcagaccgtggtacaggtcgccgtcctcctccgtctgcggatagacgtccttcaccagttccagcccgtcctccttggcggtggcagtgctgtcgttcgtcactccctgcgcgtagctcgcacaggcgatgcccatcagcagggcaaacattgtcattactttcttgatactcattttacgttggatttagtggtaaataaaaattagtttgttgattattttttctttttttgcctttatgtttttggactgttcattccttt

SEQ ID NO: 728 - DNA, 22508 bp, synthetic construct
  source 1..22508: mol_type = other DNA
  misc_feature 1..22508: note = Synthetic
gttgacagaattggatttgagtaataatgcagagctaaaagaactttggattgatagtaataaaatcaaaacgattaaagcaaagaaattcaatcaattaagaagaattatttgtcaagataatgaaatcagtgcaaaatcgatgattgaacttttcaaagcagtacaacacgttgaaaaacccggaggtgctgtagcagaagtgagttatgacaccgaagaagatttgaatgaggtgccgtaagaagcggtggatattgctaaaagcaaaaactggcgacttataaaaactacaagagagggtgaaatagagtattagccatatgaaagtcattgtaaatagaacagaggttgaactcttcagcggcgcaaaagtcgctgatgcagttcgagcatattatgttcgtcgaaagctcaaaattccaaatccattacctcctgttgaggatcgatacggaaacagtgtagcccacgatggcaggctgtcagaggggaacagattaagagttcaattaaaaaaatagaaaaatgaaaaataattgattaaacataaacattggcgattcgtatttgaatctttttctgggtcgattattgagttgatattccacaaaattaatataatctgtaggaatacaatcaaaatcaacttttttcggtatatattgcctgacgaggcgattaaaattttcgttcgaacctctttgccagcttgcatatggtttagcaaagaagaaatcgatatttaaatgtttggctaccaattcatgagcggcaaactctttcccgttgtcagatgtgattgttttaaggaaaggtttccattccatcaaacaatcaatggtagccgttgcaagttgctgagcatcttttccatctaatttatgaagttttccgaatccggtagctctgtcattgatggttaagatagcgcctttgtgatttttacctataatcaggtcaatttctaaatcaccaaagcgttcgcgcagttcaacttcaggcggtctttgagagatgtctgtgcgattggggattataccccgtttatcgtaaatcacacttcgctttttatagcgacgtcctctgtttctaagatcaagatacagcgttcctttttttcgcttatcttgccaaataaactgatagattcgctcgtgtgacacacatttatccccgttctttttggcaacacctgcaatttgttcaggactgtgttttagacgcaatctatctctgacatattcctctacttcaggtgtgaaggttctggttttagctttatactcctgacgcttcaggtatttacgatgggctaaatcatctctgtaaacgccggatcgggcatctgcattgcgccggatctcccgactgacaactgatttatcttttttaataacaagggctatttctttttgattatagccgttttgcaatatcgatgcaatagtatatctttgttccctggttaaatgactcataaatgtgaactttaggcggagaacaattatagtcattttttccatcggagcaaaagggggggggagtctttcctccctggctctgaaaaaataatctatactatcctgccgtcaaagttgcatttactaattgaatttacaaatgtaatatatggatggaattttaaatgaaaaagtaataatctgttcatgaatagaataaacgcgcaagtaaacaatatctttgagaaaaggaggaaaaactatttacctggtttactactccctaaaatatttcaatacagagaaaaaacaagaccaaatacctgtttgtttgctatgaaaattaggattaatagatataaagcaccaacctcacttgctatacttgttgtgttgctgataattggttttttctgcgattgctcagatgctcaaaaacagttgcagcaagcggaagcaaatcgaaaagagatttccgccgttttatacagaaacagatacagtgaagattctctgaaacttttgctgaaacaatatattgatgaggagaacgattttgctgtaatgctggtttataagcagttaggtgtatttatgcgtgaaaactcgcgtttcaccgaagcaataaataatcatcaggaagagttggcacttgctatgaagctcaatgataccatcgaaatagtgcaggcatacaataatctgggaacagacttccgacggatcggctcgcatggcgaagcatcagattatcattatcaagcattggattatgctgaagcatattcacaagcacatgtgccgggagttggaatgaaaaacagagttgtttctctaaatggaatcggaaacgtgagcctgacacttggatattatgaccatgctgaaaaatatttcagaatggcgttggaagatgagctgaagctgaaaagcaatataggtcaggccattaactatgccaatattggagcaatttttgaagagcggggacagttagactcagcacatgcctattataataaatcattggagcataatcgaatagccaaatcggacatgggaattggactatgccttattcatttaggcaagctttatgaaagagagcaaaaatatgaaaaagcgaaagatgagtatattcaggcatacgacctcatgcatcaaatatccgacagatggcactggttggaagcatgtatctcaattgccagaattaatttgttagacaataatatttctgaattcgaacactatatcagtcttgcagagcaaacagcaaatgaaataaaatcgccagaacatttggccgaaatatatttgcttaagcacgactttgatgtgagcacacaagatttcaaaaaagctcttgagcactatcaattgcaatcactcatgcgagacagcgtgcagggattgcaaaaaactaataggtttatagacgtgcgcctaagttacgagcaaaacaaaaacattaggaacattcagagaattgaggcggagaataaatccaaacaacggtcgacgcatttgacattatatttcaccttggctctgtcgcttgtaggaattatcatcacagcactactatattatgcatatcgacagcgcgtcaggagcaacaaagcgttaaaacaattggagcaaaccagaagcgtttttttcacaaatatcacacacgaatttagaactccactaaccgttataaagggttttaatgacctattaatgagcagcaaacacttatccgaaaaagaaaagcatgtttatagatcagccatagacagacaaagtaattatttgcttaatctcgtaaaccaacttcttgatattgccaaacttaaatcgggaaaagaggctcccaactggaaacgtggcgacataatttcgtatcttagaatgtcggccgaaacatttaagctttttgcaaaagagaaagatgtaaaccttattttttattctgtgatagagtcacaagaaatggatttcattcctttctatatcgataaaattattggcaatcttttatcaaatgctataaaacatacaaaagagggagataaaatagactttatagttgtcgaaggacaacgctctggaaccatcaaaattaaaattatggatactggtgatggaatacctaaaagtgacttgaaacgtatatttgaaatgttttatcaaagcgaaaatagtcaaagcgaatcaggtagtggcattggattggcatttacaaagatgatggtggaaaagatgaaaggagaaattgaggttgacagtgaattgggcataggctcatcttttattgtgactttacctataaagaacaacagactaacaaatattgagccacttcttgaacaaaagagctctttttcacttttaaagcttaaacaaagagttggagccatagataccgacttagaaactgatgacaacgaagaagatattacaaaagagcaacccataatcttgattgttgaggataacaaggatgtgagcacatatataaaaactatcctaagcgataaatacagagtcttagttgccagaaatggccaagagggtcttgagttagcaaaaaatcatattcccgacttagtggttacagacgtgatgatgcccgtgatggatggcacacagttgtgttgcgaaatgaaagataacattatgctcaatcatattccaataattatgcttacggcaaagagtagcgacgaagaccgtataaagggcttgagatgcggtgccgaggcatatattaagaaaccatttgatacagaggagctgttcattactatccataatatactggaaagtcgcaaaacgctgattgaaaaatttatggagtctgccaataacataacaaccgacactgttaatagagcagagagtgaagcaaatctcaaatatctacataccataacaggtattattcttactgaaattcaaaaccctgatctaaacacagcctatcttgctgagagaatgtcggtgagcacatcgcagctcaatcgaaaaatgaatggtataacgggcaagtcaacattgtcttatattttgcatgtgaagctaaacaaggcaaagaagatgcttcaggagacttctctccctatgtcggaagttgctcatgaatgtggattttatgatgccaattatttttcacgcatattcaaaaaagaatttggaatttccccatcgcaatttcagaagatacatgtttagcaattagcttttagctattagccaacagctaaaagccaaaagccaacagccaattagcacatacaaaacacacataatcaatatgataccacaaacaaatgcactaattgtgctaattatttaaacgttaatgtgtgctttatgctaatttctgcgtgatatttacagacatatataatggattaatctcaattttgctgtacaaaaagatcaattaaaaccttattaatatgaaagcaaaattagccctactcctgattagataatccggagcatatgcacccggtccagaaggaaaaggaaagtcaaataggatcaaaaagatttgatttatacagccattccggcgcatatgggttcttcgtcaaatttggtgcaaaataacggttcttaaacaaccagtataattgacttattgtgttgatatacaggcaaataaataacaaaaagctagtataatagaattatttttattatctttaaaggtctgacactaaaggatttaaagatgattgacaacactagccaacccaaagataataacttttttataaacaaacattcgctccaagctatttttggaatcccaggtgttgtattctatgattccgttataagtgataatttgattcttctatctgcccgtcttaaagacaagacagcaaaatgtatctgttgcggtaaaaggagtaaaagtgtccattcatcctatatgcgcaaattaacagatctagctgtagttggcagagctgttaaaattatactgaaagtcagaaagtttagatgccgttacagtaattgcactcaaacagttttctctgagcaacatctgcccttaacgcggaaacactcacgactgacagatcgcacaagtcactttttgcaaaaactgctcattgaggtctcttctcgtaaaggtgagtatataagtgagctcctatcaataaagcagagcagttctacctgtcttagaatcgttaagtctatagaaatgccccattttcaggaactaactaccataggcatagatgactgggcatacaggaaaggcaaatcgtatggtactattattgtaaatgcgattaatcaccgtcccgtagaactactaaagagtagagacaaggaggaggttgcagattggcttataagacataactccatactgtatgtaaccagggatcgatcaagcagctactctaatgctataaagtctggggcatccaaggcgtcacaaatagcagacaggtttcatttagtgaaaaatctgggagatcacatagcacatgaaatacgaatggagtataaaaccattaaaaatagttggttggctcacaggaagagtctttataaaagcaaaaaaaaaaacatctgcttaagtagtggagataacgaaaataccagcgattcacaatataacaaacacaccaatagtgttaaccatagaaaacaggagttgtttaacaggattcatgagcttaaaaacaacaactactctcaaagagcaattgccaaggctttaaacattagccgtaatactgtaagatattattttgaaatggaagagttgttgccacgagcaaccatctattataataattatggagattttatggatctgattaaggagtgttgtaatcaggggttaaatgtaagaaatatatttgtgtctctgaaaaaacagggattcaagggtaatcaaacatctttttatcagtggttcaacaggcacttcccggaatatcagaataagaaaagattaccagtagcattaaatacctctccgatagtttatgaagaaactcgatttagcggaatgtcacccaacagacttgctatacatttaacaaatagtgaatggggtgtttcaaaggaaacaggcgagtgtagcaagtctcacatactggcagaggatattattaactcctctatgttattaaaaagcatgagagaggtatacaacacttttagagaggttttgaacagtaaagatgaacttagattagaccaatggctcgagaagtataagtcgacccaaatacggaggattaaaagttttataaatggcattattcatgatttggaagcagtaaaaaacgccattaaatacccttggagtaatggagttgtggagggtcatgtaaacagattaaaaaacaagaaaagagagatgtatggcagggctggatttgaactgttaagacgaaaggtcgtgctttccaacttaggataacctgcaccaaatttgacgaagaaccacttttgaactgttatttatagaggccgtaatgaagagatgctttatgcagattatatcgatggcaagagatcctatatggatataatcccggatcccctataaagctccaatccgtcattacaaggattcaaatacacatattcctgtattctaatttttctcaagcgattattaaaaagattagtcggtacatttttgtgaaaaagtatatactttgtggatcatttattatgagttttaaagttgaaagtcctcaacatttttcaggacgggtcataaacttaaaaaatagcgaaaacagtcgagtaggcctgagcatttcagctcaagcctctcacagaaccgtgcgtgacagtctcccgtcacacggctcttcttattcagtcttataagattaccatttactgttagctgttggagtcactccccactgccagtggtaaaagagtttagactctttccgggagatgtttcccagccagtagtaagcccgatagggtttccccttgaagcgcttgaacttggctgtaacccatctggccagatgtctgtttacttcatctaacaggattttgagtcgggtaggataaaatttaccataataagtaatccatccccgaagcaccggattgatgcttttcgccagggtttccagcgatagaaacagttgtttccttgttttccagctgcgcatcttttcacggatgcggttgcaggccttgttgctgattgccggcagaaagcctgtaaagttgatgccatttctgccttttgccttccggggtcggaaggtgtagccaaggaaatcgaaagagattgtatcaaactctccctttctgcggctgtctttacagtacacaatctttgttttgtcatcgttcaacatcagtttacattgagcaaaccgttgttgaacagctactttcagtgcttcggcctgggattgggtggcgcagtgacagatggtgtcgtctgcatacctttcgaagggaatgtgcggataatacctgctcatccacttgtcgaaggcataatgcaggaacaaattggccagcacaggtccaattacggacccttgcgggacccctttgtcccggtcgattttactgccatcctgcagttcgtagggaactttgagccaccgttcgatgtaaagcagcacccatacacaatcggtatgaagtttgactgctttaatcaacagttcatggtcaatagaatcgaagaacttgctgatgtccatatccaatacccagttgtacttccagcaccgctcgcgtgctttggcgatggcatcgtgagcagagcggttgggccggtaggcataagaatcctcgtgaaaacagggttcaatctgtggctccagtatcatcactgctgccatttgagcaatcctgtctcctaccgtaggtatacctaacggacgtttatctccattgggtttaggtatttctaccagtttgaccgatggagggaagtagcttcccgaactcatgcggttccagattttgtagagattgtctttgagatttttctcaaactgctcaatcgatacgccgtcaatacccgcacttccatggtttgccttgactcgtttgaaggcctccatgattaaaaacttagaaatctcatgcgactttgcgtctttcatttgcatcctcctgttttaatagttgtacatttactacgcttgaataagctgttcccttggctccatttccattacagaaacttcatcgctactacggaacagtccgcccctgcctccggtcctcggtacgctggttcttgcagggcttctgcttgaacttctcccttcacatcccggcgcaggttcctgcgttccgtgaaaaagcctctgtacaagtcatgctatctttgcaccggatgccacccggaccgtaaacaggttccttccggatttatcccgggtctgacagaaaagccccggttctgacatcgtctgaacagttttcgatgcttcatcaatagttcccttgcggtcatctcttgtacagttacctgacgatttatatcgccttttggtgtatcgctcaccaccttgtctcttaaacaaagcagcatacactggtttgtaaccatctcctgtaagacggttacgaggggcctgccctcatctctttcacagttacaaacattgccgcctgcaatgttttcacagcacactctgtcatccatcatttatagagcttaataatcagtttatcagtgtgttaaaaaatgacagatgcctaaatcatctatcattttatctttcatctatcatgccgctaaaatcgactctttaaatgttttaaatccattatggtgttgatatacaattgaatacaagaataaagaatgagcgtttaagaccaatcatttcctaattaggatggtgtaaattacaattactataacagcatttatccccaacacaaaaggaaagtaatccaaatacagcgaagacgtatcattttgacttataatatctaatcgttggaccatggttcaacgatatctcaaccatggtccaacaataagtagaccatggtccaacgaaagattgacccaggtccaacgattagttattcgtattgttcgtaattaatcttcgtttatataatggttaaaggtaacaaggaatatgactataaattaggttgttgcaattgatctattacgtgaataatggatcaaaagtgaaagataatttgtaaagtgaaacataaagtgaaggatattagtagaaaagtgaaggatatttattttaatatttaggataactatctgtaatctagttggatgagtttgcaagtgaaggaagtgaaggatattttcgcaaacttattgagaatttgatacacaacaaaggcgagttgccccgccttagttgtaaacacaacggaataatccttattgtgattagcttaaattgtatgcagcaaaaataatgtttattatttaatttacaaataaatatggaaataatttgtaaaattaattctattgattagttttacaattgacactattattttgtagaattaaattgaaaaccatgaataaaattttaggacttgatttaggaacaaacagtattggatgggctgttgtgcagaaagatgagcaaggatcttatgaaaaaattattaatgctggaagccgcatcattcctatggatgcagaaaccatgaaaaatttcaataatggaataacacaaacccaaacttcagaaagaaccaggttgcgtggtgtaagaagattgcttgaacgttcattgttgagaagagaacgtatccatcgtctattaaatactatgaactatcttcctccccattatgccgaaaagatagattttgtaaatagattaggaaagtttattggagaagaggagcctaaatatgcttacatggtagatgaagatggaaagttccaatttatatttaaagaatcttttaacgaaatgctgaaggatttccaggacaaacaaccagaattggtactcaataataaaaaagtgccttacgattggactatatactatttaaggaaaaaagcattggatagagctatatccaaagaagagttagggtggattattctccaatttaacaataaaagaggttactaccaacttagaggtgaagaagatgaaacactcaaggagggtaaaaaagaggagtattttgccctaaaagtaattcgggtcgaagcagatagctcatctgccgggaaaaaaggagaagtgtggtataatgttctattagaaaatggatggatttacaggcgtacaagtaaaatacctttagattgggaaggtaaaactaaggagtttattgttacaacggatgtagacgaaaatggaaatgctttaaaagataaagaaggcaaagagaaaagaaaatttagggctcctgcagaaaatgactggactttactcaaaaagaaaacggagtctgatttagttaaaagtggaaagactgttggtacttatatatacgatacgcttttgagtagcccggatcaaaaaattaaaggaggattaatccgtacaatagaacgtaaattttataaatcagaacttattgcaattctgaataagcaaaaagaatttcatccggagttaaaagataaaactctttacaataaatgcgtagaagaattatatagaagtaatgaatcacgaagactctctttatcaaattatgactttacacgatttataacagaggatgttattttttatcaaaggcctcttaagagcaaaaaatcactgattgaaaattgttcattcgaaagacgttactttctggatccaattacaaaagaattagcttatgcacctattaaatgtattgctaaatcacatccattgtttcaggaattcagactttggcagtttattaaaaatctacgaattatcgaacgtgaaaaaatagtaggagataagctgatgtttgaccaagatgtaactacagagtttctccctacccagaatgattatgttattctttttgattggttaaatgaacacaaggagattgatcaaaaggctttgctaaaatatccggcatttgatttaaagaagaatatagataagtatcgctggaattatgtagaaaataaatcatatccttgtaatgagacccgtgctttattgaagacaaaactaaataaagcaggaaatattccatccgaatttttagataatgatacattagaatcattatggcatattctttattctgtagaagataaattggaaatagaaaaagcactaacgtcttttgcgacaaaaaaagaattgagtgaagagcaaacggtagcttttgtcgaacagttcataaatattcctcccttcaaaaaggaatatggatcttattctgcaaaagcaattaagaaattacttcaactgatgcgtatgggaagtcgctggtcagaaaacgaaatagcagaatcaacaaagggtcgaatccaaaagctgattgacggcgaatgcgacgaatcaataaaaacaagaacaagggataaagctttaaagtttaatgaaataaatgattttcagggtttacctctatggcttgccagctatattgtatacgatcgccattcggaatctggtgatgttatgaaatgggaaactcctgaagatattgattattacttaaaacatgtattcaaacaacacggacttcgaaatccgatagtagaggttgttgttgttgagacattaaaggttgtaaaagacttgtggaaaacctatggctcttttagtgaaattcatatagagttgggaagggaaatgaagaatcctgccgataaacgtatcaggatgacaaaccaaaatgtagaaaatgaaaatacgaatttacgaataaaagcacttttagcagagcttgccaatcagaaagacattgaaggcgtaagaccatattctccgtcacaacatgaaatccttaagatttatgaagaaggagtcttaaatatgctaacaaaggaagatccggattatgacacaataagtaaaatcattgctgtcccattaaaatctaaaatagttctttgaaatatttgaaatttagttagttatagaggtttttcgagcgcgacgatttcaattgataactttgcagcccataataaaggctgcaatgaataaagagaaatatgtgtttgcccagttgatctcatttctgaatgaagataaattccgacgtattgtcaacaagttccaagggaatcgttacatcaagcatttcacttgctggaatcaactactttctttgatgttcgggcaactctccaatcgtgaaagtttgagagatttgattatcgctcttgatgcccatcactctaaatgttatcatttaggaataggaaggaatgtatcaagatcatctctgtcaagagccaatcaagatagagactatcacatctttgaagagtatgcctactacctgataaacgaagcaagacaaaagcgagccacggaaatctttaaacttggagggaacatctatgccttcgattcgacaaccattgatttgtgcctggccgtattctggtgggcaaaattccgcaagaaaaaaggtggtatcaaagtacatacactatacgatgtggaaacacagatacctgcattcattcatatcactgaagcggcagtacacgattcaaagacaatgaaagaaatcccttatgaatctggttcttactacatctttgaccgggcttataacaattttaagatgttgtataaggttcatcagattgacgcattcttcgttgtcagggcaaagaaaaacctgcaatacaaatccatcaaatggaaacgcagactccccaagaatgtactttcagatgtgacaatcgaattgattggtttttatcccaagcaatactatcccgagcagttccggcttgtaagatactgggatgaagaacaaaaacgagagtttgtatttctaaccaatgcgatgcacatttctgctcttcaggtggctgaactttacaagaaccgctggcaagtagagttgttcttcaaatggctgaagcagcacctcaaaatcaagaagttttggggtactaccgaaaacgctgtccgggttcaaatctattcagccatatgtacatactgcctggtggcaatcgttcaacacgatatgcaactggatagaagtacatacgaagttcttcaaatattaagcatttcattgactgataaaactcttcttcgagacctctttgataaaactaaatttcaaaatgacaaagaacgatttggaccaaatgggccaaatttatttaattataaataacgtcctatttttaatgggacactagtgaagtaaaatatcaaaaatggcgctaccgtcatcgtcagatcttgttagatataaatgttggcttgagcaaaaatatcgttcaccttatacaggacaggttattcctttggcacgtctttttacttcagaatatgaaatagaacatattattccacaatcccgttattttgatgactcattttctaataaggtaatttgcgagtcggcagtgaataaagacaaagataatctgttggcatacgaatatattaagcaaaatgaaggcaaaataatagagattggtttagggaaaaaagtaaagctgtttactgcagattcatataccgagtttgtccaatcacattatgtgggttctgtagcgaaaaagaaaaagcttttgatggatacaattccagattctttcatagaaaggcaattaaatgatagtagatatattagtcgtgaaataaagaaattattgtcgagtgtggtaagagaaaaagatgaggatgaggctatttctaaaaatgtaattgtatgtacgggagcaataacagataaattaaaaagagattggggtctgaatgatatttggaatacaattatttacccacgttttgaaagattaaatcagctaacaaacagtgataaatttggacaatgggaaaataaacaggggaaaaaagtttttcagattgagatgcctttagaattacagaaaggtttcaacaaaaagagaattgaccacaggcatcatgcaatggatgcgattgttattgcatgtgcaacccggagtcatgtaaactatttgaataatgaatctgctcattcaaagtcgaaagaaaaacggtacgatttaagaagaaagctaagacgtatagagattttggaaaaacaggagctaaaggatggtgttactactacgaataagatcgaggttgcgaaagagttttataagccttggcctacatttacgcaagacgctcatgaagttctacaatctattatagttagttttaaacaaaatttacgagtcgtaaataaagcaactaataggtatgagtgttttgtccatgggaaaaaagaaattgtaaaacaatcaaaaggagagagctgggccataagaaaaccaatgcataaggacacagtatcggcagcagtatctttacgtaaaattaaaacggtacgacttagcctagctattgatgattgggcaaatattgttgataaaacattaaggaaagagatcggccttctttattctaaatatggggaaaacggtagtaaaaatattatcaagtattttaaagatagggataataaacacaacggtttggatgtgtcgaaggttaatgtctactcctttgataacgattgcgctgcttctcgcgttacacttgatgatacttttaattctaccaaaattgaatctattacagacacaggcattcaaaagattttattaaaacacctgtcttcctataatgagataaaggaaaataaaattattgagcatccggaacttgcattttcaccagatgggttagatattttaaatgccaatattagagaattaaataatggcaagtttcataagccaatcaaaaaagtaagaacctacgaaactcttggtaacaaatttgctgtgggacaaaaaggaaataaaaaaaagaaatttgttgaagcagctaaaggtactaatctcttctttgctatctattcatcggaagatggcgttagaagttatcaaactataccattatatgaagtggcagaaagacaagaacaaggtttaattcctgttcctgaaaagaatgcaaataatgatcgcttgttgttctggctttctcctggagatttagtatatgtaccttcaatagaagaagaggggcgtattgttgagattgagaaaaatttaaaatgtatcttgaatatttataaaatagtaagtttcacaggtaacagattatacgctatacaagcatttgttgcaacaactatagttgataaaaaggagtattcattactgaataaggtggaattttcaataaacgaaaatagacctattaaacaatattgtattaaaattaaagtagatcgattaggtaatattttaaagatatgattaagaagacattgtactttggaaatccggcctatttaagtcttcgtaattctcagctagtattacgattgcccgaaatagaaaagaatgatacggtttccgatttctttaaaaaggaatcggaacgtaccattcctatagaagatattggtgtaattatattggaccatcaacaaatcacgattacccatggactattagaaatgcttctcgataataattgtgcaataataacatgtgactcttcacatcttccggttggactaatgttgcctttgtgtggaaatacaacgcaaagtgagcgattcagagaacaaatagatgcctcgattcctcttaaaaaacaactttggcaacaaacaatcaagtctaaaattgagaaccaagcttctcttttggaagaaaagagaaaggtgatagttaaaaatatgagaatatgggctaatgatgtaaaaagtggagatccggataattatgaagcgagagcagcggtttattattgggcaaatctatttactcatattcctgattttactcgacatcgagaaggaattgctcccaactccttactgaattacgggtatgctatattacgtgccatagtagccagatctttagtgagtagtggccttttgccaactcttggcattcatcaccacaataagtacaacgcttattgtttagccgatgatattatggagccctatcgcccttttgttgataaattaattgttggattgtcagagaaggatttgaaaagtgaaacacttacacccgaaataaaaatgaaattgctttctattcctgttttagatgtaatgattaatggaaaacggagtcctttaatgatcgcgatttcccagactacagcttctctttataaatgctttagtggagaggcaagaaagattagttatcccgaatggggttaaataatttttatattgaatatggaacgattcagtgaatatagaattatgtggatactcgttttttttgatctgccaactgagacaaagaaggaacgtaaaatctataccgattttcgcaagaagattatatctgatggtttcactatgtttcagttttctatatacgtaagacattgcgcgagtaaagaaaatgcagatgttcatataactcgtgtaaaatcaatattgccagaaaaagggcatataggaattttatgtattacagataaacagtttgctggtatggagattttttatggtaaaaaagaaacgaaagctcaaccagttggtcaacagcttgaattattttaaagtaataaatcccactcattgagcaggatttactaaagaaacatcaactttttttgtttctaatttatggcttaaatatctatgcaacagatagatgtgaacatcctgttgttgctaataagccaaagatacaattttgcaagctaatcacaacacgaggaataatgctaccctcgtggtttttgttgttgctaataagccaaagatacaattttgcaagctaatcacaaccccagccccatgtcaaggaataagccgggggttgttgctaataagccaaagatacaattttgcaagctaatcacaacaatgcgccatacaaaacccattggatatatgttgttgctaataagccaaagatacaattttgcaagctaatcacaaccagcctttcctaacttgttaacaccctcaagttgttgctaataagccaaagatacaattttgcaagctaatcacaacgattttgccattccgagtatctcaaatgccgttgttgctaataagccaaagatacaattttgcaagctaatcacaacccgtttccagagttaccccaaattatccaggttgttgctaataagccaaagatacaattttgcaagctaatcacaacccagacagtaacacgcctatatttttatagttgttgctaataagccaaagatacaattttgcaagctaatcacaaccattaggaaggatactttccgtaagcttcggttgttgctaataagccaaagatacaattttgcaagctaatcacaaccagcagctattgaggatgtcagccgattatgttgttgctaataagccaaagatacaattttgcaagctaatcacaacggcagaaccgactgcaagcatggcgttcttgttgttgctaataagccaaagatacaattttgcaagctaatcacaacaagtatcacgtaaatcgtactgactatccagttgttgctaataagccaaagatacaattttgcaagctaatcacaaccgaccttgatacaggtgaaatcagataccgttgttgctaataagccaaagatacaattttgcaagctaatcacaacccactaatccgagtaacctgctggtcaacagttgttgctaataagccaaagatacaattttgcaagctaatcacaacatgccaggagattttttgatatttaaagagttgttgctaataagccaaagatacaattttgcaagctaatcacaacaatcaacgcggaagatagggggttgccgatgttgttgctaataagccaaagatacaattttgcaagctaatcacaacaggaagcagtttggtcccttccgcttttcagttgttgctaataagccaaagatacaattttgcaagctaatcacaacacctctgtagtaacatcttcctgcgttttcgttgttgctaataagccaaagatacaattttgcaagctaatcacaacaaaccacttcgcagggaatgtctgtgtcaagttgttgctaataagccaaagatacaattttgcaagctaatcacaacaaaggttgcttacaactctcttgaagaggggttgttgctaataagccaaagatacaattttgcaagctaatcacaacaatctatcggcatagtatgttcggatttgagttgttgctaataagccaaagatacaattttgcaagctaatcacaacatgatagtatgttttaccgtttgatctcttgttgttgctaataagccaaagatacaattttgcaagctaatcacaacccattggctctgtactttgcttttacggcttgttgttgctaataagccaaagatacaattttgcaagctaatcacaacgtactgcaaaaatcatagatttgcaacggggttgttgctaataagccaaagatacaattttgcaagctaatcacaactgttcggttgtccgaacatggtacacaaatgttgttgctaataagccaaagatacaattttgcaagctaatcacaacacgggcggcacgcacttcggtttcgaactgggttgttgctaataagccaaagatacaattttgcaagctaatcacaacagatgcagtatccaatcaatcgattttgtagttgttgctaataagccaaagatacaattttgcaagctaatcacaacatgctcaagaatcatgattttaacagaaatgttgttgctaataagccaaagatacaattttgcaagctaatcacaacggcctgcccatagtcgataaacaggtaaggttgttgctaataagccaaagatacaattttgcaagctaatcacaacaggcgctcctgtgcatcttcaattgcttttgttgttgctaataagccaaagatacaattttgcaagctaatcacaacatgctttaattaatcttaatggataccctcgttgttgctaataagccaaagatacaattttgcaagctaatcacaaccatggttatggtacaaagagatgcaagcgtgttgttgctaataagccaaagatacaattttgcaagctaatcacaacttgtcccctaaataccttccgcctgtgtgaagttgttgctaataagccaaagatacaattttgcaagctaatcacaacatgccaggagattttttgatatttaaagagttgttgctaataagccaaagatacaattttgcaagctaatcacaacaatcaacgcggaagatagggggttgccgatgttgttgctaataagccaaagatacaattttgcaagctaatcacaacaggaagcagtttggtcccttccgcttttcagttgttgctaataagccaaagatacaattttgcaagctaatcacaacacctctgtagtaacatcttcctgcgttttcgttgttgctaataagccaaagatacaattttgcaagctaatcacaacaaaccacttcgcagggaatgtctgtgtcaagttgttgctaataagccaaagatacaattttgcaagctaatcacaacaaaggttgcttacaactctcttgaagaggggttgttgctaataagccaaagatacaattttgcaagctaatcacaacaatctatcggcatagtatgttcggatttgagttgttgctaataagccaaagatacaattttgcaagctaatcacaactgttgtcagaatagagatacattcaaatttgttgttgctaataagccaaagatacaattttgcaagctaatcacaacatgatagtatgttttaccgtttgatctcttgttgttgctaataagccaaagatacaattttgcaagctaatcacaacccattggctctgtactttgcttttacggcttgttgttgctaataagccaaagatacaattttgcaagctaatcacaacgtactgcaaaaatcatagatttgcaacggggttgttgctaataagccaaagatacaattttgcaagctaatcacaactgttcggttgtccgaacatggtacacaaatgttgttgctaataagccaaagatacaattttgcaagctaatcacaacaccctactttactaccttatcatccttattgttgttgctaataagccaaagatacaattttgtaagctaatcacaacgatttattaatccaattagctatttcggtgatatccgttcactttttcctttgttttgccagacttctctgatttggtagatttcgaattgtttgttaagccataaaaatgcatatttgattttggatgggtgtatatgcttcggattatcttgttacagtttccgccacgatgtctggagcttcgtccaaaatttgttccggaatcaattgtaaataatttgtcaaattgttaaatattacactttaatttgtaagtttgtatcagcttataacatccggttaagcagaggcaaaacctgaggggcaagggggcagcgagcgtctgtaacagctacagcgggtgttaaaggctaacccctataagccgggcaaccggcttatttcttttttacaagtataccatttcagacagtcctagtattcagctctattcgttttttgatgtaaaaagttgagaaaacacatagacaatgcctcccaaagttcccgcaagcataagcagtacgaaagtccaggaagcaataaagaatactatatttaagattgaatctatcatacgtacaaatatatgaataaattgacatataaaatacagtttgtggatgctttaaaatctgtggcttatggtacgtatagcgattaaaagggtgtatgatgactttgatccggaggatggataccgggttttggtagacaggctttggcccagaggggtaaagaaggaggcgttgctctataactcatggaataaggatttggctccttcttctgagcttcggaaatgggttcaccagaataaagaggagcggtgggaactctttgcaagtttgtacatcaagcaactgggtaattctaaagcggtggatgatttcttgttggccataaaggactttgagagggttacgttgctgactgccactaaaagcatggagcagaatcatgcgggtatattgaaagaatatgtagaggggttgcttgggtaaagcagggtacttgccgcgtccattaacggattaacagcaagtacccttttttatacatggtctatatgctgcttatttgaacagcttgggcgcgaattccgacaggtagatgcgccagttcttccagatatggccttcgccggtttcgaaatattcgtacttgtagcctttttcgtccagcatcttgcgatagtctgtgtttgcctgatacaaaaagtcggtcttgccgatggcaatccagtatagggccggcttcttgtcgaattgtgttttcagcttggcttccaggttgtcgtagatcggtgattttacatctttgttgggcatgatggctgcagagaacaagcctacgtagttgaacatgtccggatattgcttggagatgtgcatggaatgaaatcctcccatggatagtccggcaatggcacggttctgtttgttcttgagggtacggtaggtgcggtctataaagttaaccacatccgggaaagcagcttcgaaggagccttccatggttttaggtaattgcatggatgccggggcatagcctaaagaggattctccgggggcagcctcttgcgatgcattgccgttggtcatcaccacaatcataggttttgctttgccttgtgcaatcaggttgtccagaatctgagcggtacgtcccagttcgctccaggcattttcgtcgcctcccattccatgcagcaggtagaatacaggatagcgct

SEQ ID NO: 729 - DNA, 22109 bp, synthetic construct
  misc_feature 1..22109: note = Synthetic
  source 1..22109: mol_type = other DNA
acgtgttccatgtgttcggagaagtatccgtacttaacgtcacatttggaaaaggctttccaggcattgccaatgagtacatgttccagttttcaagtggtgttacgcctaccgtcctgaatcttcctgaaggtgtgaaatggataggaagcagtgttgtcagggccaacaggacgtatcaggtaagtattcttaataatatagctgtgatgggaggtactttatgattttgttaagacgcagattgcttatactggcggccatgaataatggactgcctaatatgccgattcggtttaagaccggcgaaagggcggtattcagtgacgggaagcatggatatttttcgatggacagaagatttgttcgtgataagaacatgtcacgaatgtatttcaaagacgggaaacggattagtgtgctgaagaaaaggaactgaactaaactaaaataaaataaaataggagtgccactgcactccttgtaataaattttttattaaccatcctaccattggcagaactccacaaatatagatgtaattttattatgaacaaaatagattcaataataattcactgttcagccacacgtgctgggctggacattggtaagaaggaaatcactcagatgcacctgcagaaagggttttctacaattggttataattacgttatccggctggatggtacggtagaagttggccgttcgctcactattgacggggcgcactgtaatagcaagggattctcaggtgtgtcgtacaacaaacattcaattggtatctgctatgtgggcggtctggacgcgcacggtaaggcagctgacacccgaacaccggaacagaagaaagcgttagccaaactgattaaggagctttgcggaaagtaccagattgtggaagtgttgggccatcgtgacacatcgcctgacctggacggagatggaatcgttgaacctgaagaatggacaaagatgtgtccttgcttcgatgtgcgtgcggaatatccatttatccaggaaatcattgtaaagccatgaaactattgtattacctaattattgctgcattagccctgttacttatcataagccgtaggaatgatgcaagtagtgtgaataaggatgcggatactattactataacgaacacggtcagaaaaatacaagtagatacaatgtatattctgtctccacagccttatcttgcatggattgataattcagatacgattcatgcaagcgacacctgctatcatctgcgtgaatacaaagaataccgtgatagtagctattatgcaaagattagcggtgtagcaccacgtttggacgaaattcgagtgtatccgcgtaccatctaccagactgaatacatttaccgtgacatcgtacaaaaaaacaaacgctgggggcttggtctatctgctggctatggtatcggtagaaacgggttgtctcctatcttggcggtaacggtaaactacaatttatttcaatggtaattcccatttgctatttaacaaaaaaatattgttagttttgtaacttaaaatcgaattattatttacatttgtctcgttgtaaaaaataataaaactatggctgattttaaggatttagaactgattaaaagctcaaaagaaacagagattgttaattgtaatattttgggtgtaaaagttgcgacaaatggatattgtggtggcgattccgggcatggatcaagaacctattttagattagaggatttagcttcaactgatattaatattcgtttactcaaggataaaagaggagtggaagttatgttaggaggagatgctgaattagaaactttcatacaggctttaagatgggctgctgataatttggaagaaatggcaaaaaaataaagtgtctaatataaatgactatctttgtcgtgtagaagtttgcttttattgcaaacgaaagccccaaccagattaatatccggaaggggcttttattgacttatactttaggctattttacattaaaagatacaagcacttcacgcggtttacccttgtaaaattgatatacatagcactccaccatttcgcctttgtacttttggagtctcttgtataaatactccttcacttcaaccttacgagagaagtaaagattctgttcgctaaagacaggttcatctgccccaacccaagcttctaacgagcatgggcatttgttgataattcttttcatattacaataaatattatgtagtggctccattgcctcatacataacataacagataaagtgtcagacaaattaccctctcatcatcataatatcagacctcagttcgatatattctttgtacttttccgggttgttcacgtaatcaatcacacgagatatggccatatcagcctgtttctgccggactttggtgtagtatcgtataactccttttgatttgtctgagtggcctaagcagtagtctattatcccgtcaggaatacctatttcagaggcgtactgagcgaaagacttgcgggccgaataaaatgtaacacgttcatcaatatttaactcttcagccaaatctccaagagaatacgtaacatactgagaaaagttgtgatatgtgaatttatacccaaaatcaagtttccccgtccttttatccatccacctgcatattatctctcttgcttgagacggtattgtaaatgtgattacactatccgactgcattcgccctttagtctttgagcgtgaatattccaatacatcttttctaaagtctgtttgcataatgtctataagattcatccctcccaggtaaaaggaaaggcaaaaaaggtcacgtgccataatcagctttcttttttctggtgaagattcacgaatcttgttaaaactctgtactgtcaaatcaagcttcctgataggggctgcagatattcttgttgttacaaaaggatgtatatcgtaagatatattccactctcttatcgctctgttgatgacagatttcatctgggcgagcattgtgtttactgtggtttcagtcacttttcgcttccgtatgaatgcagcaaaattctggactagtgatggggttaaatctgagagaagtatgtcacctcttgcaaagtcacgaaaatacctccccaccctttcaatagacaatgcgtatgaatctcttccctcagacttgagatagtctacaaaattgctacatgctgatgaaaaggtttgctcatcggaaagattgtctgtagaaatgatttctttaatttgccggcaggaataaagttcaagatgttttattgagtccagtttctcttgaaggtcatcaaggatgttcctaagtttccggtttatcgcagatgcctctggatgcttcacgacctgaccgttcttaaactggttctctgaaataatgaatcgtgtgacgatatatgttgtttcatgcttgtgacggagtgcaattcttatcttatgtcttccgtcttttaatgcttttgccttgaaaatggtaagtgatagagttgccataatgattaaaaaatttaaggatactccagggatactcacagaattgtaaatttacaattcaaatccttttttttaatcatcgtaataagcagtagaaaatagaaaaaccgcctaattcacaatgtaataagcggttttaagtcggagccgaaagcgggactcgaacccgcgacttactcattacgaatgagttactctaccaactgagttatttcggcaacgtgtttcgttgaaaacggttgcaaaattactcttttcttgaaacctgccaaataaaaaagagatttttttccgaaaaactacatttttccggcccgtacaacccgtttccgttacatcacaagagcatttgacacattattacgtgtaatttgtacaatagtcccttgtctgccttctgccgattttctacttttacccgcaaaatgaaacattacactaccatgaaaaagaaactgataatttcactgctggcactggcttcgctgggagccggagcacaaaacttgcaaaagggagactacggatacttgtactgccacatgagcggacgaggagaatggacggcctacgccctgagccgtgacggcgtacactttcacgacctgattgatggcgaccccgtatacaatgtagaagaaatgtcaaaaatagagggaggagcacgcgatgcctttatctgccgtacgtccgacggaaagggctacctgatggtgactaccgacatgagcaacgccaagagccgctcgtggttcaactacggcatcaacctgctgaaaagtgacgacctgattcactggacttctaccaccttcgacttccgccagggaccggacattttctgtgaccctcagtcgcccgacgtctataaggactacagcaccatcaaacgcgtatgggcaccgcaaattttctgggacccttcgtacgtatgggccgatggcatgaagggcggatacatgatatactattcactgcttaatccggcagaagaccagtacgaccgcgtgttctattcctatgccgacgccacctttacacgtctcactaaaccccgcctgctggtggactggggatatgctaccatcgatgccgacattaactatgtgccggccgacggactctatcacatgctcatcaagaaagaaggaggtacacccggcatctttgccgctacagctacaaaactgaccggtccttataaaataaaagatgaaaacgactatgtgaagtttgaaggcaacaaaaagtgtgagggctgctctgccttccagttggtgggcgactctacctggcgcgtggcctacatcgaatactcctccaagcccaaaagatatcgcatctgccaggccgatgaaaaactcgccaacttccactcccccgtcaccatggagggcgtgaaacatccgcagcacggctcgttcatgcgactcaccgaagaagaatacaagcgcctgcaagagtggtcggacagcatcatgcgcgaaagagccgcccgaaacagcggagaaaagaaataaaaagaggaaaatgaaatatttttgtaaaaacttttggcaaacatcctttcatttgagcagaaaacattatctttgcactccgaattatgacgtgacaaaagagtttgatgtattactgtataacacatagtaaaaagaataagcgcacattcggagttccggcggaatggacaaatgccggaagctatttcttttttcttttatgtcacttatttcctgaatatttaagatttcctattttttcaaacacccggaactgcttttcggcaagtccgggcgttttttcgtatatacgagagtagaatagaaaaaatacaagatataaagattattagtaacaaggtaatgagaaatgtaacattgatcctcgacgacgggagccgctttcatggcaagtcgttcggctatgagaaaccggtagccggtgaagtagttttcaatacggcaatgaccggataccccgaaagcttgaccgacccttcgtatgccggtcagttgatgacactgacttacccgctggtaggtaactatggtgtgcctcccttcacattcgaagcaaacggactacccactttcatggaaagcgagaaaatccatgccgaagcgattatcgtaagcgattacagtgaaaaatactctcactggaatgcagtggaaagtctgggcgactggttgaaacgcgaacagattccgggcatcacgggcatcgacacacgcgaactgacaaaggtattgcgcgagcatggagtgatgatgggaaaaatcgtgttcgacgatgagccggacaacattcccgaagctacctatgcaggtgtgaactacgtagacaaggtttcttgcaaggaagtgattcgctacaacgaaggcgaaggcaagaaaaaagtagtactggtagactgcggcgtgaaatcaaacattatccgttacctgctcaagcgcgacgtggaaatcatccgcgtgccttggaactacgacttcaactctctgcagttcgacggtctgttcatctccaacggtccgggcgaccctgacacctgcgatgcagccgtgcagaacatccgcaaggccatgcagaacgaaaaacttcctatcttcggtatctgtatgggtaaccagttgctttcaaaggcaggaggtgccaaaatctacaaactgaaatacggtcaccgcagccataaccagccggtacgcatggtaggcacggaaaagtgcttcatcacctcacagaaccacggttatgccgtagacaacaacacactgggagccgactgggaaccgctcttcatcaacatgaacgacggttcgaacgaaggtatccgtcacaaaaagaacccctggttctcggctcagttccatccggaagctgccagcggtcctaccgacacggaattcctgttcgatgagtttgtaaagttgctgtaatccactaaaaaacaaagaagacaatgaaagaaaacataaagaaagtattgctgttaggttcaggagccctgaaaatcggtgaagctggtgaattcgactactctggttcgcaggctctgaaagcgctgaaggaagaaggtatcgaaaccatcctgattaacccgaacatcgccaccgtgcagacttcggaaggtgtggcagacaaaatctacttcttgcccgttactccgtatttcgtagaaaaggtcatcgacaaggaacgtcccgacggcgtgctgctgtcattcggtggacagactgccttgaactgcggtgtggctctctacaaagccggtgtgttcgagaaatacaacacccgcgtactgggtactccggtacaggccatcatggatacggaagaccgtgagctcttcgtacagaaactggacgaaatcaacgtgaagaccatcaagagtgaggcggtagaaaacatcgaagatgcccgccgtgcagcgaaggaactgggttatccggtcatcatccgtgcagcttacgcactgggaggtctgggttcaggtttctgcgacaacgaagaagaactgaacgtgctggccgaaaaagcgttctctttctctccgcaggtgctggtagaaaagagtctgaaaggctggaaggaagtggaatacgaagtagtgcgcgaccgtttcgacaactgtatcacggtctgcaacatggaaaacttcgacccgctgggtatccacaccggtgagtctatcgttatcgctccgtcacagacgctgaccaacagcgaataccacaaactgcgcgaactggccatccgtatcatccgtcacatcggtatcgtgggtgaatgtaacgtacagtacgcgttcgaccctgaatcagaagactaccgcgtaatcgaggtaaatgcccgtctgagccgttcttctgcactggcatctaaggctacaggttatcctctggctttcgttgcagctaagttgggattgggttacggactgttcgacctgaagaactcggtaacaaaaacaacttctgccttcttcgagccggcactggactactgcgtatgtaaaattcctcgctgggacttgggtaagttccacggcgtagaccgcgaactgggctccagcatgaagtcggtaggtgaagtcatggccatcggacgtaccttcgaagaagccatccagaaaggtcttcgtatgattggtcagggcatgcacggtttcgtggaaaacaaggagctggttatcgaagacatcgacaaagcactgcgcgaaccgaccgacaagcgtatcttcgtcatctcaaaggctatgcgtgcaggctacacagtagaccaaattcacgacctcaccaagattgacaagtggttcctcgacaagctgatgaacatcatgcagacttctaaggaactccacgagtggggcaacaaccatacacagctttcacagcttccgaacgagctgctctacaaagcaaaacgtcagggattctctgacttccaggtggcacgtgccatcggctacgaaggcgatatggaagacggtatcctggaagttcgtaaccaccgcaagagcgtaggcatcgtgccggtagtaaaacagattgacacgctggcagccgaatatccggcacagaccaactacctgtacctgacttacagcggcgtggccaacgatgtacactacctgggcgaccacaagagtatcgttgtactgggttcaggtgcttaccgtatcggttcatccgtagagttcgactggtgcggcgtgcaggcactgaacaccatccgcaaggaaggctaccgctcagtaatgatcaactacaaccctgaaaccgtatcgaccgactacgatatgtgcgaccgtctgtacttcgacgaactgactttcgaacgtgtgatggatatcctcgacctggaaaacccgcacggagtcatcgtatctaccggcggacagattccgaacaacctggcattgcgcctggatgcacagaaggtaaacatcctaggaacttctgccaagagcatcgacaacgctgaagaccgcgacaagttctcggctatgctcgaccgtatcggcgtagaccagcctgaatggagcgcactgacttcaatggaagacatcaacgcatttatcgaaaaggtaggcttccctgtattggttcgtccgtcatacgtgctttctggtgcagccatgaacgtatgttctaaccaggaagagctggaacgcttcctgcagctggccgctaacgtatcgaagaaacatccggtagtagtaagccagttcatcgaacacgccaaggaagtagaaatggatgccgtggcacagaacggtgaaatcgtagcttacgccatctctgaacacatcgaatttgccggtgtacactcaggtgacgctaccatccagttcccgccgcagaaactgtacgtagaaaccgtacgtcgcatcaagcgtatctctcgtcagattgcgaaagagctgaacatctctggtccgttcaacatccagttcctggctcgtgaaaacgacatcaaggtaatcgaatgtaacctgcgtgccagccgttcgttcccgttcgtcagcaaggtgctgaagattaacttcatcgaactggctaccaaagtcatgttaggcttgccggtagaaaagcctgaaaagaacctcttcgacctcgactacgtaggtatcaaggccagccagttctcgttcaaccgtttgcagaaggccgaccctgtgctgggtgtagacatggcttctacaggtgaagttggctgtatcggcgacgatacttcatgtgccgtactgaaagccatgctgtctgtaggctaccgcattccggaaaagaacgtcctgatgtctaccggtacactgaaacagaaagtagatttgctgcaggcagcgcgcgccctcaaggccaaaggttacaacatcttcgctaccggcggttcttctaagttcctggcagaaaacggagtggaaaacacccgcgtatactggccaagcgaagaaggtcagcctcaggcacttgaaatgctgcacaagaaagaaatcgacatggtggtaaacattccgcgtgacctcactcctaccgagttggaaaacggatacaagatccgccgtgccgcagtcgacctgaacattcctctggtaaccaatgcccgtctggcaagtgcattcatcaatgccttctgctctatgagcattgacgacatcgctatcaagagctgggacgaatacaaataatccgtaccgcttaaaaatatagataaaattaatcccctccggaactatttgtaatgaatgagttctggaggggattttttatttatagaaaaataagacaataaaaaagcccaccgataaaggacgatgggcaagcgcctaaatgttttcacaacggaataatccttattgtgatttgcttcattttagttttacaaaaataaaaagaaacaacacaaaagacaagttttttcataaaaaattagtagttttgagaaaattgaaaatacaactatgaaacatattttaggtttagacttaggcacaaacagtataggatgggcagttatcaattcaaactttgacgaagcaacccaaaaagaacaactaaaaggtatagaggcagcaggaagcagaataattcctatggatgccgcccaattaggagacttcaataaaggaaattcagtttcacaaacagccaaccgtactcaataccgcagtacccggcgattatatgagcgaaaaaaacttcgcagagaaaggctgcaccgcgtattgcaactattgggcttcctcccatcccattacgctggccaattagaccgatatggaaaatttatagctaactcagagccaaagttagcttgggaaaaaggcgcaaataatttatcctactttatctttcaggaatcttttcaggaaatgctgaaagacttttcacaagaagatagatgtactaaaaaagtaccgtatgactggacattattctatctacgcaaaaaagcccttacacaaaaaatagagaaagaagaattagcctggattcttctaaatttcaaccaaaaaagaggatactaccaattacgggaagaagaagctgaaaagtccacttccaaaacacgacaatattttgacagccaaattgtaatagacatcgttgacacagaagaaacttataaaggattaaaaatatttaccctcactctagcaaatggagaaaaaggtaaatggtatgggaaaaacatacccgattggaaaggtcaaaagaaagaaatcattgtaagcatagacctggataaaaatgggaatgacaaatgtgatgagaacggagaacctgtcagacactttaaaattcccacagaaaaggaatgggaagaacaatggggacttgtcaaagctaaaaccgaaaaggacctgaacacttctaaaaagacagtaggcacttatatttacgatacattattacgaacccccgaccaaaaaattcggggtaaactcattcgcaccattgaacgtaagtattacaaagatgaactctatcaaatactaacgacacaagaaaagtttcaccccgaactaagagatggaaacctgttacagtcttgtattgaagagttgtatcacaacaacgaagcacatcgcaatacaatttctaaatatagtatgtccaaattactcgttgaggatgtcatattctaccaacgtccactgaaaagcaagaaatcactcatcagcaactgcccgtatgaagagcatacttatgtagataaggaaacaggggaaatccatacagcttctgtaaaatgtattgctaaatctcatcctctttttcaagaattccgtctttggcagtttctgtccaatttacgaatatatcaaaaagaaggaatcctcaatggtaagttcaccactgacatagatgtaaccaatgaatttctgaaaaatgcagacgattatacgaatcttttcgactggctcaatcaaaagaaagaaatcaaacaagatgcatttctcagatatccgccatttggattaaagaaaaatgtggcaaattatcgctggaattatgtggaggataaaacatatccttgtaatgagacacattctaggatattgctctattgggagaaagcaggtatagatcaatcgattctgaccaccgatatagaagaaaaactctggcatatcttatattctatttcagataaaaatgagctccagaaagcactgaaacattttgctgataaaaacaagttagaagataaatttgcagatattttccaacaaataccaccattcaagaaagactatggttcctactctgccaaagccatcaaaaaactgcttcctcttatgcgaatgggaaaatactggcatctagaatcaatagataatgcaaccctcacccgcatccatcaaattctgaacggagaaatggacgaagcaacggcaagcagaataaaagaaaaatacatccatttagataacttctcttcatttcagggacttcctacatggttggcatgctatatcgtatataatcggcactctgaaataaaagacatcacgaaatggaagcaaccttcagacattgatgcttacatacaatcgttcaagtagcattcactgcacaaccctatcgtggagcagattataatggaaactttacgtactgtacgcgatatatggaaacaaatagggcatatcgatgagattcatgtcgaattaggacgtgagatgaagaatcctgccgacaaacgtaaaaaactcacccggcaaatacaagaaaacgaaaataccaatctgcgcatcaaggcacttctcactgagtttgcaaatccggagtttgaaatcgaaaatgtacgtcctcactctcccagccaacaagatttattacgcatatatgaagaagaggtcttaaacgaatcagctaaaaatatgccagaagatatagtcactatactaaaaaaattcaatgagacagatgcaaaaaaacgtccgtctacttctgatgtattacgctacaaatgctggctggaacagaaatatcgctcaccttatacgggagccatgattccattgggtaaattattcactcctgcctacgaaattgagcatgtcattccaaaatctcgttactttgacgattcattcacaaacaaggttatttgcgagacagcagtaaacaaattaaaagacaacatgttaggttatgagtttataaagaatcattccggacaaataatagaactaggctttggacaaaaaatacaaatacaaaccgtagaagcctatgagcaatttgtaaaagaacactactcatacaatcctgttaaaatgaagaaactattgatggaagatattccagaacaattcatccagcgtcagttaaacgacagtcgttacatcagcaagtttattaaatcactattatctaacattgtccgtgaagaaggagaatctgaggccacttccaagaatattattgtttgtaatggaagtattaccgaccgtctgaaaaaagactggggggttaatgatgtatggaataaaattattctacctcgtttcttgcggttaaatgaaattacgaacagtgaccactttaccacaaccaataccaacaataagataatccccaccatgccattagcattacaaaagggattcaacaaaaagcgtattgaccatcgccatcataccatggatgccattgtcatagcctgtgccaatcgcaatatagtcaattatctgaataacgaatcagccagcaaaaatgcaaaaatctcacgtatggatttacgtcagattttatgtaaaaagacagaacctgacgcattagggaattatcaatggataataaacaaaccgtgggaaacatttacccaagatgtttatgcagttctagcaaatatcattatcagtttcaagcaaaatttacgcatcatcaataaaacaaccaaccattatttccgttatcaaaacgggaagaaagtacaatgtgtacaagaaaaaggagacaattgggctatccgtaaacccatgcacagagaaacattctatggagaaattaacttacgtaaagtaaacactgtgtcactgaaagtagcgctagaaaatccacagagaattgtagaaaaagatttaaagaaaaaaataaaagaattattgcaacaaggactcagcgaaaagcaaatcaaaaaatattttgaagaaaacaatgatatttggcaagatgtaaacctgaagaaaatccaattctattctttcacaaaagaaagaaaagaacgcttttttgcaagccgtgaatctatagatacaagtttcaatcaaaagaaaattgaaaagcaagtttccgatacaggtattcaacaaattctattacgtcacttaaggcaaaataataacgatccaaacctagcattttcccctgagggtattgaatggatgaacaaaaacattatatccttaaacaatggcaaatggcatcaacctatatataaggtaagaatatacaaacaagctacaaagtttgcaataggacaaactggcaataaaaccacacaattcgtagaagcagcacaaaatacaaacttattttttgccatatacgaaacagagcacaaccgcagtttcgcctctgttccattaaatgtggtcattgaacggctgaaaaaaggattgccaccgacacctgaagacagtaaagggaatccgcctaaatatgtattgtctcctaatgatttagtctatgttccaacaaaagaagaaatggaaaatagacatattaatcaacccatacaaaaagatagaatttataagatggtaagttgtactgaaggggaatgtcatttcattccatatttcgttgcaaagcccataattcaaactattgagttgggaagtaataacaaagcacaaaaatcttggcaagatgaaatgataaaagaaacatgcattcctatcaaaacagatagactaggaaatattataacgttaattagcctatgataaagaaaacaatgtattttggcaaccctgcatacttatctttacgtaatgcccaacttgtcataaaacttccggaagtggagaaatgttcttcacttccagaagcgatgaaacgtcaatctgaaataaccaaacctattgaagatataggggttgttattttggataataaacaaatcaccattacttccggagcaattgaagcattgcttgaaaataattgtgcacttattacttgtgacagtaaaagtatgcctgtagggttaatgcttcctctctatggaaacactacccaaaacgagcgttttcggaaacaactagatgcttctttgcctttaaagaaacaattatggcaacaaaccattcaagcaaaaatcaataatcaagcatcttccttagccttatgtacaaacgaagatataaaatgtatgcgtatatgggctaacgatgtacgaagtggagaccccgacaacctggaagcacgtgctgcagctttctactggaaaacacttttccatgatatcgaaaactttacaaggggccgagatggcatacctcctaataatcttttaaattatggttatgctattctccgtgcagttatcgcacgttctcttgtaacaagcggattattacccacattaggcattcaccatcataaccgatacaatgcctattgcttagcagacgatataatggaaccttatcgcccgttcatagaccgactggtctatcaactatactctgaaaacaaaatggaacttacaaaagaagtaaaagccagtttattatccatccccacaatagatgtcagaatcagtgggaaaagaagtcctcttatgatagcagcaagcctaacaacggcatcactatataaatgcttttctggagaatcacgaaaaatcatttatcctgaattttaatggaacgtttcagcgaatatagagttatgtggattttagttctttttgatctaccaacagaaacaaagaaagacaaaaaagcttatactgattttcgcaaaaatctacaaaaagatggattcacaatgtttcaattctctatctatgtacgccattgtgcaagtagtgaaaatgcagctgtgcatataaaaagagtaaaatcctttctacctgaatatggtcaagttggaattatatgtatcacagacaaacaatttggagaaattgaactattttatggcaagaaagcaagtgggataaaaacaccaggacaacaattagaactcttttaaaataataaatcccatggttaatatgggacttattacttcaagaaacaacttttactttttctaaatttacttataaccaactgatagacaacaagaaacaaccaataagttgtttccaatggttcaaagatactaaaatgaaagcaaatcacaactggactgaaaaggatgtatgggactacttggttgtttccaatggttcaaagatactaaaatgaaagcaaatcacaaccgacgagcagaaaaaacgggtggaagtctgttgtttccaatggttcaaagatactaaaatgaaagcaaatcacaaccagtggtataaggttcttccgcagcagattgttgtttccaatggttcaaagatactaaaatgaaagcaaatcacaacaatatttgtcccgcattccttcaaatggagttgtttccaatggttcaaagatactaaaatgaaagcaaatcacaacagaatttacaaatcccataaagtagactcgttgtttccaatggttcaaagatactaaaatgaaagcaaatcacaactttcttcccaattttgcatcaaaacagcaaattgtttccaatggttcgaagatactaaaagtttttctacatttaaatatcatttgtccctaaaataacacataaaaaactgcctccacaccagagtgttggagacagactttcttcattaataaaacctataattaatcaaccaaagggaacataaagccttttccgtcattatcatcaaacttagcttttgaaggaagaggcagatgtttggcattgttgctgaaatcccagagcatggtttcgtcctcggtgatttctcctgtgtcaaggttgcgtttctttccgttcaacggataatacagcaccagattctcgtcacttccgtctaccgttttccacatgaactgcttcaactgctgaggtgtgcgggccgtcttccagaaacggatttcacgaaccagctcgttcgcaccgccaatccagaaacctaccagaccgtaaggccctgtacggatttcacggtcggccaccaattccccattcacatatacgtaatttttcttaccgtcgtacacgaaagctatcatgtaccaggtgtcgggctgcgctgtaaagacatccgccggcacgtcaatctgagaaccaccagtcttaaactgaagttggtcgggacggatagtcacgtcaccgaagcgaggatagatttcatcgagtgcaccggacccagacacgagtttggtaccacagatggaacggttgttgctctggtatgcactacggttcaccataacctccatcgtccactggtccaccttgaaatcgtccgggaacatcttggcatcttcactgccgtatccgtcaatgcgaagacacttcgtcttgatgcgctgctccagtacaatcagtgactcagattcactgtcaatcacgggtaccgtaccgcccctcagttttaccggcaaggcgtagcttccctgcaaggagaatttcacatccttgaactttaccggcagatattgcagtgtctgcttggagttgaacaccacttccttgcccacctcatacatttcgggcggaagcatcaggtaatccgttccgtgcttcttgttgtatgcttccagctgctccttgttgccggcctctaccgtcaccgtcttagtatcattttcctgctgtaccagtgatacggtgatagacttcacgtcgacttcctttccttcttccacgaatacctgagaagattcgccagtcttgatgtaagccccctgtgccgaccggtactcactggttgcatccttgtataattcattctggcaggaacaaatcagcaaggttcctgcgaatatgctgaaatataaattctttttcataattcaaattttaatctaacttacccggataaaccacatttcccaagcgcaaggcttctctgagccatttgtaaggaggtgtatttccatagtcgtattccatgtgatacgtaccgatgccaccgatgcgtctgccgtcgggaaggtccagcgtggcataatcaaaaatctgacgcccttccggataagcattgatttccggacgtacgctggtgtaattatctactccacctgtctgccagccttgctcaaactctacggtgataatggtcttccgctcccagttttcaaggtgaggctgattgattttcctaagaacctgctcggtggaacgttcccagtacgcctgataaatatagtggtcgatgtacttggaagcctcggtagaaagtttctcaggctgaccgtccattaccagcattctgccggccggacgcaaacggtctgaaagggttttgataaatacgaacatgttcgtattgcccgaattttcgctgataatctccccgttagccatcgaacctgaatgaccatagccaggttcgtagtctatgtcgaaaccatccagattatacttttcaatcgtatcgcagatggcatttacataagccttcacaccttccacaaaattaccacctcccttttccacaatccagtaattcttcgggtcttgtcccggaggagtcatctggtcgcccaggtcctgtacaatccaacacagcagcgcttttcctcccttgatttcctggaaaaacttcaagtcttttttctgctcttccgaaaggtttcctcgcgtaccccacaaggatacgaagtctacgctgtcgggtagcatcttcaggtagttctgtgcattgctgcctcgtccggtccagttgccgaaccagccgaaccccttcacatgaggtgtctgacggtattctctcagtttggcaaaataatcgcgcatggagggagtcaggtcggcttcactttccgcctccagcaagggaatgtatttctccaggttctcctggttttcgaacgtttctctttcaggcacgttccattcggaacaggccacgaagcctgccgccagcagcagggctcctgcatatcttatgattcttttcatcacttcatttgtttgacatttccgtaaaactcatttctcatttcggctgtttcggacggttattgcgcacccaccacagcttggttgctccctggtcttcaccacccagcagcgccggcacttccgacatgttggggtttgtaccatattcggccggagcaaagcggaatctttcgggcgtgatggcatcttcttcacctcctatactcacgtaagctttgtcataagccggtttgagcaggtaaggatagccagtccggcgatattcggtccaggcttccacggcattgggatagagtgccaggtatttctgggtaatgattttctgcaacttcacttcgtccgaatccgcatcgttccacttgggagacacatttccggtagaaagcttgcaggaatactgacggttgtaaggcaacatagaccggctgatgtcataaggaaaatctgtaacctccagataggcagccactccacttactccgttttcttcgaacgacttggtaacaccttcttcatacagtgctttcggattacctcctgccagtttgtaaagtgcggcttctgccttcaggaaagacacttccgaagcacgcagccagaacaaaggagaagccgcatcgaccttgggcttggaggctcccgtcttggcagcggagctaagggcattgttgttcgtaggaggaagaggcatgaaatagccgtaagaatcggacgtgaacaaggcactcagacgcggatcgtcatacccctgcatgtaggcccagatggtagctcccaggcgacattctccgtagtcctctacagtcggcagcatggagttcatcagcggtaacttgtccgtactccgtattttggcctcctgtgccacggtttcaatgacacctccgtgagaagggtcaagggcaaacgtgatgtattcctttgccaatgcctcatccttgaaatgcacgcggacggctatgcgcaacatgagcgagttagccagtcgtacccagttggaagcgtttccgttataaatcacatcgtacgacggaagcactttcgatgcggtattgaccagcagcagcgaagcatccttcaaatcggccagcatcgccttgtacacggtctcctgagaatccagtttcggagcaatgtctccgttgccggcattggtatatacaatcggaccgaacacatccgtcgcacggagccaggcagtcaccttgacaatattggctacagcctgcacttccttgtcggcagggtcttccgaattcttcgtatgcttgtagatgtcattccatgcacggaacagtttcgaatagaaattctggtaagcatagctcatacgggcatccgtaaagttccacgtagcctccgtgttgaaattccagttgttgttcatgccccagtaaccgatgtagttaccggccgacatgatgtctgtattggccaggtcgttacccggtcctgtcgattcagtgggcgaaccgatgggaataaccagcttctgcatgtccatgaaaggagccccatacagcagtccgcccgtcttcattccttcttccgtcacaccatagatatttgtattgatctgctcatagttgcaagatgcaagtgccaatacggagaatacaggtatcaaatagtttcttatcttcatattatacgttgtttttcatgatttgttagaatccaaatttaaggctcactccatacgtgcgctggctgggcaacataaagtaatcgtatccctgtccgaaggtaccggtagaagccgtcagttccggatcaaaaggagctttgttgtaaatcatccagaggttggtgccatacacggaaaggttcacgctatggaacggggtacccttgaaccaggaattagggaaggtgtatcccaggctggcctcctgcaggcggacgttggtagcagagtacacattgtacgcatccaggttcaccaccgattcatagtagtcctttggctgaactgccacattgcccaccatgacttttccggcatcacgcgcatcggccgaagcctgcgacacaccgaactggtcgagcacggcctgtgtcttggatatcacgatacctcccagacgggcagtcacaaggaagttcaggttaaagcctttgtaggtaaagccgtttctccagcccaggttccacttggcattgacactgcccagcttgtaaggttccgtagattccgtggtaatggtctgaccttcgttgtacacgatgtaaccgtcctgatcacgtttcaggcgttcttccgcataaatcgtaccaacttcttctccttcgcgcagacggaaacgtcccaccttgatgtcactcaggtcgagtgcctctccggtcacgggattcttcacgttcgaagccagtgcgatgattttattacggttggcagtagccgtcagcgaagtgctgtaagagaacttgccaaaagtctggtcgtatcccagcgtcagttcgataccccggttttctacgttaccggcctgcacgaacatatagtcataacccgacgtttccgacaacttggcttcgagcaactggtcgtaggtattcgatttatacagcgtcacaccgagcgacacggtattgttcagccatttggagtcgatacctacctcataagagcgggttctctccggtttcagttccggaagcggataatacttgaaaggtttgattacacctccttcaatggagtgcgtaatggtgccgggagtcagtccggtgtaaggaataggcgaacccacctccgtataggaagcacgtactttcaggaagcccagcaccggtgaaatggactggcgcatggtttcgggcaacaagtccgtcacaatagccgaaagtccgacagaaggatagaatatccagggcgacttgctgttgaccagctgagaaggcttgtcggcacgaccggtcagtgtgagatacacggccgacttccatgagatttccgcagagccgaacacaccgagattcatcttacggttgtcacctcccgtctgtgaaggtacaccggtagaagggtctatgttatcataagcaaacagattcggcaccttaagcagctgtccgccatatcctcttccttttgtatcgtattcctcgaaagaagcacccacgttgacattggcataaaaatctccggcaaaaggcttcgaaaggttggccataatgtctgcatatttctggcggaaagtctcattcgaataagcataacgtcccagcggcttggcaaacgtaccgtgcgtagaggcataacgcttgtcttccttctccgtgtaggtattatccagacggcctcgtgcactcacgttcaggtaatcggtaatttcatatttcaacgatgcatac

SEQ ID NO: 730 - DNA, 21908 bp, synthetic construct
  misc_feature 1..21908: note = Synthetic
  source 1..21908: mol_type = other DNA
gtctgcacattgtggttcatgttcgtgcggaaactcggacgcgggaaataggcatcgaggtttacatctgcttctccggcctgcaccatgacggagttctcgtcacggaaataatccaggtggggcgtgtagcaggtagaccaccagataccgccgtggcttccccagaaggtcgagctgttctggaagtaatcgcgtttcattacgccctggaagaaggcacggaagtcgaagcccttgtaatcggccgtcaggtcgataccgaaatgataacgcggggtcgagttaccgatgatggagaggtcgccatgatcgcctgccgtgttggctccggcatctactttaccgtcaccgttgaggtcggcatacatgatatcgccggctgcccataaagaacccagggcactttgtccgccgttgggcaggcttgccaggtgcttatccatttcgtcctgggtcttggcgataccgactgtcgtgtatccccatatttcgcccatcttcatgcctttacggtaggtgtcgctggcaatcacccctgttttattgggatagcgggtgatctctgtctgtgagtcggacagcatcagttttactccatagcccagaccgtttctgagtcggtcgttccaaccgaccgacagttcccatccataggtctttaagtcggtattgtttgtgcggggtacgttcgtgccgagcgtgatcgggagttcgggagccgggccgatcatatcgagcgtatttctgacgaagtagtcgaacgatccggtaaggcggttgtctagtgcgccgaagtctgcccctatattccatgtcttaaccctttcccatgtcagggaggatgcgatcagttcgggggtgacggcgatgttgggtttcgtgccgtttataagccatccgccgctggatgcctggaatttcatttgcgcataggtcgggtaccagctttgggtgttctggttaccgagttcgccgtaagagcctctgaacttgaaggttcctacatagtctgcgataggttcccagaagctttcgcgggctatattccagcctacggagaaggaggggaacagattccatcgttccgatgagcgaaaacgggatgtgccgtcgtaacgcaggtttacttccgccaggtatttgccctggtagtcgtagttgatacgtccgaagaaaccggcggttgcccaatggtcggaggaaccgtttatggtcggtgtgatcgggttcccgttgatgtcgactccggaggtgatatctccttcgggaagaccggggacgatgatcccgttacgttgcaggaatgtgtacttctttttcatcagctccgattggaaaccgaacatccccttgaagttatggccggattcaagttgctggttgtattcggtgtagacgttgaagttcagataattctctttcgtcatatcttccgatacgtagctggtggagttgtatatatagggttcgccggccacattatggttgtaagtgagctgacggtctgcatgtacggttgtgttgtagatacggtagttcacatctacgtgcgtcttccagtccttgatcggttccaataccaattgggcttgctgatacagataatcagcctgctttttggttctgccgccttccaccaggtcgagtgccggggtaggggcgctgtacaggtagccattcgggtcgtaggccggcatgaaaggccatgcctgacgggtcagtccttcgtaaacaccatccagtactgtcggtttggagatgtcttcgcggatgaagcggctgctgtaattcagctgcgcccagtctgtcatttttacgttgatcttaccggtagccgtatagcggctgaaactgtcgtcggagatctttagcaagccgctttgatccaggtagttcatggagaggtagtaggttactttctcgtttccaccgttcaggctgaagttatgttcctgcgagaaagcccaatgtccgaacaccgtgttataccagtcctgattggcactgccggaactatacggatccatccagtaagccgggttggacggattcggtatcatcgttacatccgactttccgtcgcgataatccttgatacgctgtaaccaggcattgtcgaaataaggagactggttggcattggcccgtgagtcgttgaagtaaagggcaaaacggtaagagtctacctgatcctgcaacaaaacgggatcgttccaacggaagctgttgttatagttgattacaggtttgccgctgacaccggtcttggtcgtgatcagtatcacaccgaaaggcgcacgtgaaccatagatggaggaggctgcggcatctttcaagacagagatattttctatatcctgcggattcaacgcattgatatccccttccatgccgtcgatcaggataagcgggctaccgctcgagccttgtccgatagtggcgataccacggatgttaatatcggctgtcttgctcaaatcacccgaacgctgtgtgatctgcaagccgggaaccaatccctgtaaagcctgtgttgcggtggttaccggacgagcttccaggtctttggcattcgcaatacctactgagccggtcaggtttatcttcttttgcgtaccgaaaccgactactacgacttcatccagactttgtgtgtcttccataagtgtgattgccagcgctttggtatcatctgctttcacctctctggccagatagccgatataggatataagaaggattgagttgtcgggaacatccaggctgaaatgtccgtctacatcggtgatcgttccgatcgtagtccctttaacggaaacgttggcaccgatgaccggagtgcctgcttcgtctctgaccgttccctgtacccttttgttttgcaggtcgacagagaaaactcctttcctcgataagatgatttgacggtcgacgatcttgtattgtacgtcggtgtttttgaaaagctggttcagaactttatcgatgttctgattctttacttgtatgttcacaggtttgcttacatcaagcgtattgtcggtaaacaggaatgagaactcagtctccttttctatttgttccaatacctgtccgaccgttgcattggagaatgcaagggacagcgacacagactgtgaataggactcttctgctcgtatctggaagatggtgattaacaataaaaatatacctattctcatttttcgacaagttttaaagaaatatagggaacctgtatccccgaataatttctggattttcataactttgttgctaatttagtgattaatgatgtctttgggtcttatgccaaagatgttattttcgcgaacaagagtgagttgcagctcgctcttgtttttaccatatctgtttcttcaatttctttccataggcttattcatttaggtgtaacaatttatcccgctttattttaaccagacgtctatttgctgtttggcaaatgtcgagtcgttattttgcttcattgtatttactttccatctgatcggtgtggcttcttccagataactgaatatctgatagatcgtctcattggtaaatgtggcccagcaattatattcattctctttcttctggttgtggagcacgatctctacattgaagcgatgacctaatatacggaacacttcatcgagggaggtatttctgaatacaagcttaccgtctttccatgccgtgttttcatagaggttgacttgtcggatggtgtactttttcgtttgcttgttgtaagacagtttctctccgggtttcagtccggctatgaatttatcggaggaatgaatatccactttcccttctacaagaatggcctctacttcttcccgttcttcatatgtgtttacattaaactgggttccgtgcgccatcactctaagtcctgactttgttgttacgaaaaagggatgttccttatccgattgtacctcgaaatacccttctccggtcagttcgacttctcgtatgtttccagcgaagagggtcggatagcgtagtgtactgcctgcattcaggcatactttcgagttgtccggcagttccagccgtgtgaccattcccggtgcggatgttacttccataaactttatccggctttcgatatccgtggcatttcgttcgaagaacaaatagccgaaagtcagtgtcgagatcagaagaggaatactaatgatggctgccacgcgtgatagatggcttatccacagtctttttctgcttcttttgtccagtttcctgttcacttcaacgaatgcttccggtaatccgaacgacttgtgttcgtctatccgggattttagtttcagtacctggtggactgcctgtgactcctgccggtattcctctgacccattcaaccaggattccaccagctcggcttcttccggtgtggtttgcttctgtgtatattttaatagtagtgtctctttttcaagattcaaaagttctttattctccatttctgatataatatcttttattgttgaaaatgatgccttttatatataggataatcgtacctgaaaagaccgccagttatttccctgtttttttcagaaaattttcaatacatttgtatctgcatgaaaatgacttctcaaatactgaacccggatgagttgttatggaaaatagccataaacgacgataaagaagcttatcggacattgttcgatcttttttatccggggctgtgtctttatgccaaacggtatgtagatgaacgtatggtagccgaagatctggttcaggatgtattcgtcactttgtgggaaagcaggaaaaagataaagatagaatcgtctgtcaggaattatctggtggtcagtgtaaagaaccagagcctgaattatctgaagcgggaaggatataaacagagttatatagagacctgtttatcaaatagtaccgacccatcggactacaatgaattttatctgctgaccgaacttcagaaactattggatgaagcactggccaaactcccggagacgtatcgtcttatctttgaaatgagtcggttagagaacaaaagtaatgtggaaatagctgaaacgctgaatattcccttacgcacggtagagcgttataaagcgaaagctatcgaaatattgaaaaaggatctaaaggattatctgcccttgctcctttatttccatttattgaattagtatctgagattatattgaaagagagtaacttttcctcataaggagaaaggttactctcttcattaattatattataaccattctttcataaagctgtccatttcttccgcatgttcttcgaggctttgcagcagtttgaactgggcttttgtacggatcaggttatgtttcgggctatggatcttataataggtatcgccgttgatgtagtctgtcaggaaacgtacggtctgcatgtaagtcagcagacggccgccataaggaagcagactgatttcaagcggactgaggaaagcttttgctgtttccatgtaaccacgggtataggctttgaagatatccatgtttacatttacgttgtccaggttttcatcatcttccgcaccggtgtttgctcctgtacggataaaatcgccgatatcagaaagaacgaatcccggcataacggtgtcgaggtcgatcacacaaagcactttatcagtgtcggcatcgaacatcatgttgtttacctttgtgtcacaatggtttgtgcgtttctgaagtttaccttcacggaacagacgttcctggatacacatcgcttccgcacgtttttcaacttcgtcgatcaggtctttcacttcttctaggcgtccggctgcattcgccttgacagcatcatggaattgttgcagacggaattccatattgtggaagttaggaattgtttcgcccaacgatccttccggcaggtctgccagcatggattggaaatcaccgaaagctttaccggcttcgtatgaaagttccggagttacttcttcgtagcttttgctgttcgggatgaacaggcatacacgccaatagctgtcaccgtcgaagtaatatggtttgccgtcttttgtcggaaggaatgtcagcactttacggtcgatatcgctttcacctttggcttccagtttcttacggatatgtgtcgttacagtgttgatgttgttctgtaacatatctacatttgtaaagatcagatggttgatacgttgtaatacatatttgatttcacctttttcgttagttactttcagcgtatcgttaatatgtccgtttccaaatggttcggcggaaactactttttctgccagtgtgaactggtcgagaatgtttaataattcttcttttgtttttgccatggtattttattcggtttaatatagcttttaacaggctacaaatataggaatatttttgattttccctcttccttattcttaaaatgggagagcataaaaaaaggctgcgaaccgaatcgcagccttttttcatatcctttttcgggaaatgattatttcttattacggttaccgtaacggctcatgaacttatcgacacgacctgcagtatccaccagtttagatttaccagtgtagaacgggtgtgaagtgttagagatttcgacctttaccaatggatattcaacaccgtcgatttcgatagtctcttttgcattgatagttgaacgagtgataaatacatcatcgtttgacatgtccttgaatactacaggacgatagttttcaggatgaattccttttttcattgctttattatctatttaatttaaactcttattattatggtaaccggtaaattggcttgcaaaggtatggatttgctgtaaacaaacaaagaaattccgattattttttctgaaaccctgacttttgtgttattttatatgcttaatagcataatatatattggatagttcttatctttgtggaagattttcaatcattaacgtaataatatatactacaatggtaaattacaaagatttaggattggtgaacactaaggaaatgttcgctaaagccatcaaaggcggatatgcaattccggctttcaacttcaataacatggaacagatgcaggctattatcaaagctgctgttgaaacaaaatctccggttatccttcaggtttctaaaggtgctcgtcagtatgctaatgcaacactgttgcgttacatggctcagggtgcagttgaatatgcaaaggaattgggttgtgctaatcctcagattgttcttcacctggatcatggtgatacattcgaaacttgcaagagctgtatcgactcaggtttctcttctgtaatgattgacggttctcaccttccttacgaagaaaacgttgctttgactaagaaagttgttgactatgctcatcagttcgacgtaacagttgaaggtgaacttggtgtattggcaggtgttgaagatgaagtttcttcagatcatcacacatatactgaccctgaagaagttatcgatttcgctactcgcacaggttgcgattctttggctatctcaatcggtacttctcacggtgcttataaatttactccggaacagtgtactatcgatcctcagacaggtaagatggttcctcctccattggcatttgacgtattggacgctgtaatggaaaagctgccgggattccctatcgtacttcacggttcttcttctgttcctcaggaagaagtagaaacgatcaacaagttcggtggtgctttgaaggctgctatcggtattccggaagaatggttgcgtaaagctgctacatcttctgtatgtaagatcaacatcgactctgactctcgtttggctatgactgctgcgatccgtcagacattcgctgaaaaaccagctgaattcgacccacgtaaatatttaggcccggctcgtgataacatggaaaaactgtacaagcacaaaattcttaatgtacttggttcagacaacaaactttaatcagatagttgattagaaaataggaagccacttcgcatttgcggggtggctttttttataataacggtgtgttttctgtgtgtagaaaaagaagatacgtttttagctagtcgtcccttagaaagtatattccagcgaaacattttcatcaaaaagtgtttcgctgatttttttaacaagtaaccaaagaactctcatggctcttttgaagttatatgcagcagccgctaacatgacgttgatagcatcgcctactaatcctttgtaaaagtttcgtcctaaacgataatcacttttcagatgtcctatggtcggttctattcccgcacgcttgcaaaagagtttatgtttcttcttacgttggtagtatgtatctttgggtgtatctggaatcagtatttgtgtcccgtcaatcgctttctttccacgatatcctctatctccggtcaatcgcttgacgctttttccggtcagtcgccgcacctgttccagactcttctgtatggtatgcccatcgtattcgttgcggaaagagccggcaccaagaatgacacctgtagcagaacgtatgatagagactttgtttccgaattcatatttcttgtgctccttacctttgctgatgcactgaacatcaggttcatgaatggaataaatcttatgaacagaattgcgacgttgtaaaagtatctttttaaagatggatagtaatccatcatagtgtcgattcacacctaagttacgttccagttctctgaccagacgaccggcaatcgtgcgtaaacgcttatcggctcttattgatttcttccgatttttaggatggttacgaaagcgttgatcccgataaattcgtttcaaaacaaaggtataggattgacggatgggaagtttctcttcctttactattttaaggattttaccaactatctttttgtgcagttttgcatccgtaggataagttatattcttttcctgtacggtagaatctataaagacagtaccatgatgctcatcattgcttttgtcatcattcacacggatgctctctgcaagaataagttctatccctttttctcctatacgtttacgaaaatgaactagttcggaggcattgcaaggaaaagatggtgtaaattcaagcataccacagaagtattgaaaatacgcattctcagtccattgctctacaacagactcatcagagatgttgcgcaaatgtttgaggataagcaaaccacacatcaggcggataggtttgcccggacgaccattgtctgaacagtaaagtggggtaaatacgtcttcaaatactcgccaattgatcttgtgagagagtgtatacaaaggatgctgctggtttagcaaatcatccagagaggagaacagagagcgggaagttggagttgtatttatcataaaaatctgcaagcttctacgtacaaagatacaaaaatttgcagatttaacaaagaaataatgaagatatgtttctgataatcagaatgtaatatgctttttgatgaacgactagctacaaattatatttcgtttctgttgttttacaataaaattgtctttatctttccgctcagaatgaatgatctgtttttcagtttcttagtcgaatatatcctgttttacatccctgttttttagcggctgataattgtcagccatacggtcgataaccgtcagccgtacggttgataattgtcggccattcggttgatagttgtcaaccactgattacccggcatactaattcaaattagtcggcatactttttccggttatatcggtatgaaattttcttctggtagctgctgatccaatttttttacaacaaaaaagggcgagtttccccgccctgaatgttttcacaacggaataatccttattgtgatttgcttcaaacttatttacaaacgtatatataatagttgaaataaaaaagtataattccgaattaatttataattttggagaaaacataaatatgataccatgaaaaagatattaggattagatttaggaactaacagtatagggtgggctttattaaatgcgcaagaattagaaaatggaaatgggtttgtatttgaccatattgaaagagcaggtagtcgaataataccgatggatgctgctatattaggcgattttgataaaggaaattctaagtcgcaaacatcagagcgaacccgatttcggggagtacggcgtttacgtgaacgtcatttgctacgtcgtgaacgtttacatagagtccttaatctattgggatttcttccggaacattatttacgggaaattgattttgaaaatcatccaggtaagtttattaccagtgtagagcctaaattaccctgggttaaaaatatttcgggacagtttgagtttctttttaattcttcttttgaggaaatgctgaatgatttcaaaaatagtcaacctcaattagtggtagatggccgtaaaattccttatgactggacaatctattatcttcgtaaaaaagcactgcatgagaaaataagtaaagaagaactggtctggctattattaaacttcaatcaaaaaagaggatattatcaattaagaggtgaagatgaagaggaggatcgtagtaaacgagtcgaatttcatgcgcttaaggttttatcggtaaaagctacagatcagaaaaaggggaaagacgtttggtatgaagtaacgttggaaaatggatggatttatcgtcgtgccagcagtttgcctcttgattgggaaggaaaagttaaagaatttattgttacgactgatatagcagaaggcggtactcctaaaatggataaggacggtaatgttaaacgctcattccgtgcaccgaaagaagatgactggactttattgaaaaagaaaacagaggctgatatagagcaaagtaataaaacaatcggagcttatatttatgacactcttctacaggacccgtttcaaaaaatacgcggtaaattgattcgtactattgaacgaaagtactataaagcagagttggaagctattctcagaaaacagaaagaatatcatcaggaattaaatagtccggatgtttataagaaatgtatcgaacatttatatccgaataatgaacctcatcgtgaaaatatagctaataaagattttgtttatttatttttggatgatatcattttctatcaacgtccgttgaaaactaaaaaatcgttgatcagtgactgtccttttgaatatcgaagatataaagacccaaaaaccggtgaagaaaagatatctactattaaatgtattgcaaagtcaaatcccctttatcaggaattccgattgtggcaatttatcagtaatcttcgtatttaccaacgagaaaaggaaataaacggacagttgaaaatcgatgtggatattacaaatgaatggctaaaaagcgaagaggattatgcagctttatttgaatggttgaatgacagaaaggaaataaagcaggatactttgattcagtcttatttcaaacagaaaaaaataaaaggacagaccactttcccttttcgctggaattatgtagaggaaaagatatatccgtgtaatgaaactagagcctctatattgagtcgtttggaaaatgcaaatatatcaagtggctttctgactaaagagagagaggttgccttgtggcacattttatactctgttgaagataaatatgaaattatcaaggctttgaggacttttaaagaaaagaatcaattggatgatacgtttgttgatgctttttgtaagttccctccttttaagaaagaatatggtgcttattcggagaaagcaataaaaaaattaggtaattatatacgactttacaccaacgactcaaaaaaaataaagaggtataatgaataacatcatttatacctctttttcccttttcgcttgaatgtagtcatttttctttttttttagttgactttatacccagtaactttttgaaagcgtcagtcatattaacttgtttatgatctttattttcttcaatgatcatatcatcttcctcaaaaagcataccatctaactttgaatatagtctcctgtcttgtttcttatcttcttttttatttgacttcatattaacttgctattaaatctttgtatgtgaatgtatggtagacattctgcaaaaatacatcgaatctttcataatcagaaagatgtttcgtattatatctgaaagattctgcattgacatacttttgtaagtgctttggagatacccaatgatgagtactttttaatacccttttaaggtgtccccaaaagccctctattgtatttgttgatcttcgtcctattacataagcaccttttttatgataaacaataccgtgattatatcgctgttcatctagctttctgtaagcttgccattcgtcagaatagattgtagagcctggacgaacagtatcgtagattagaggcagcaatgtttttgcagtagtgtcatttacaactatcgcaaaaagaaagcctcctctttgtaccatgccaaagaccggtgttttgccagccgtacttctaccttttgattttttgatcttcttattactgtgtttgaatttttctatacctcctatatatgcttcgtcaacttctacttccccttccaacgactgtgtagtatcaaaatctaaagcttgttgaatcttttgtaccatcttccaagctgttttctgagtaacaccaatatttcgggctagctggcaagaagaaataccctttttgttacctataactacatagatagcatagaaccatttacgtaatgaaagcttagaaccttcaaagatcgtacctgtccttacattaaagtacttaccggtattcttgcatttgtacatgttgttcttacatctatatactttagatgttggatcgtaaggagaaacaaccgcaccttgccatcttacttcctcccagtaatcgatgcaagattgctcgtcacgaaaataatccagaaaatcttgtattgacctaaatgaaaacattatactagtgtttttaacaccataaagataagaaaaacaatcaaaattaacaaactgatttccaggaaagtatctttttatttatattttattagatatttctgcttgttttggttgcttttcatttcttgtaattatatctttaggcgttaaacttaaaaactaatatcatgtataaagaaacatttacagaaaaaggaaaaacttgtatcatatattatggacaacaagccgataaaacggaagaagcatctaaaaacgacattaagtttaaaaagtatgaagataacccctgctattatatatatttggatgaaaaaacagattttgtacaaaaacatgacctttcttatgaaattgcggatataggacaatggttatacatcaagtctatattgtatttaaaagaagaaaataccttttctgaattttcttcttcagtagaaataccattatataatcttccgattgagttgtacaaaattattttttttaagcatttgaaaacacaaattcgaattttgaataaagtatttaatcagcatattaggtttgaagattacattgattcggttaataactttgtggaacattattattatcatgaataattttttttgcgtttttactggatattcttttgccatcattaaaccataaaacataaggagggatatctggtattgcaacataccctaatcctttaccttgttttatttttttgaatctatctatgttttcaaaataataactttctaataaatagatatattctttatttgttaaagaccaaagcttttgataatcttttttcatttttgtaatttttttaaagtgaataaatatagtatataataaaacaggctgtctcataacgtgaaacagcctgtttttttatccatataaaaataactattgcttgaaaagatagaatgtgtctgctaattcgccatgttcatataaatgcataactagcgtattttcagtgacctttattttgtataaacttaatttatcttgaggtttgtcatcaaaatgaatagttaatgtcatagttttagaatcaattttatatgtaaatggataataatgagtatactctggatatttactatttaatgattcatgaatacctgatccatctttgttaaaagtaaaaataaactgttctctacttggtttttcagcccacgaacctataagagaagagcgtaaatcattattttcttcatcatttttactgcaagagcaagtgaagaatattaacagtaatgttattataatgtgtatatttttcatggctctcatttttttcttacgcatctaacaatcctgccatttccagattgactttcatgacttttcacaagtatttcagcatatgttttttctccacaaactggatatgttatagatggagtaccattatcatacgagatagtacattcatagcaaacataaccgtcacctccttccccttcttcatcatctttactacaagacagcgacaccgcgcacacacataaaacaaggaacacctttgtaatctgtttcataatattatccgttttaaaattcatatcctattttcaatgttaatgcattaattttgtatttgaaactaatttttcctccataattgctgttataatcatatttatacttatttgtagaccatccaatagccatattaatagctcttctgctgccagtcataaattttactcctgcaaaaggatggcaataaaaacctccattatattttgactcaactaaaagttcatatcctgttcttaaggcgatgaaaggaactacaggacctgtcataagattgcttctaatatctatatacataggtgccgcaacagtttttaaatcagttgcatattgaacacccacacctgcaccaataaacaagtagttgtttgtttgataaccaagtgtaaaacaaaattcaggccctttaatacctccagcaatatatccgagatccaaaaatcctcgtaccccttttatattatattcattactgttactaagtaggtaaccactaccccacgcgcttttgctattttcttcttttgcgattttttcaatctcagtcatttggaagttgaagatactcccatctgatgttttgactttcattgattggttaggaacttgttcgactataatccctttgatgatactaccatttttaagatagactacatctgtcatttttgtttgggcataacttaagatagagcatcccaaaagaaaggcaagtaatattaatacctttttcattgtgtgttgtatatccctctctgtctcctccgatcggcgttaacaaaaaaagaagcgtggagactattggatactactacattgaggccttggactgcccttcgcacaatagtaaacaatagccccacgccttatgtcagtatactattatccctcttgtataatcagaatgggtatacaacaacattggcgtaggaactgtatgtctattatcttgtgcgaatgaaagtgtccaagtttcaatgcaagataatatcttaacgcttctacgtcttaactctaatacgtgagggcaaaggtagagatatttagaaacgaaaacaaccacataacaaagatttattacaaatttgttatgcggtcgggaggcgcgaaggataatggatgttttgtgatagtggtgtaaagtcgtatataattaccaaaaattattacctctgatgagaagaggcaagttttggagtgaattcagtatagattcttatacacaaacacgtattgaaaaaataataacgggagaggttgatgccactattcttgagcgtgttcgtgataaagcaatccatttgtcgagtgtaactcattttcagggattacctgtttggttggcttcttatgtggtgtataatcgtcatgcagaagcacaggaagtaattaaatggcaaacagcagaagagatggatgcttacataaatgcttttaaacaacactctttgcgtaatcctattgtggaacaggttattatggaaacattaagaactgtacgtgatatttggaaagaagccggacaaatagatgaaatccatgttgagttagggcgtcaaatgaaaaatccgaaggataaaagagcacagatgacggaacaggcattagagaatgaaaacacaaacttaagaattaagcaactgttgacggaatttctcaatcctgaatatgaaatagaaaatgtacgcccttattctccgatgcaacaggagatattcaggatttatgaagactgtgcattgaataatagtatggaggtgccggatgaaatattagatgtcgtcaaaaagtttaaggaggccgatgtgaaaaaacgtccgggtaagtcggaaataatgaaatataagttgtggttggagcaaaagtatcgttctccttatacaggtgaaataatacctttgggaaaattgtttactccggcttatgaaatagagcatgtgatacctcaatctcgttattttgatgattcgtttagcaataaagtgatttgtgaggccgaagttaataagttgaaaagcaatcagctgggttatgagtttataaaaaatcatcatggtgaaaaagtaacacttgggtttggtaaatctgttgaaatattttctgtttcagcttatgaagagttcataaagcaaaattataacggtttgaagaaccggggtaaaatgaaaaaaatgttgatggaagacatcccggaagcatttatagaaaggcaattaaatgatagtcgttatatcagtaaagtaataaaaggtttactttcaaatgtggtacgtgaaaaagacgagcaggatgctatttctaaaaatgtaataacttgtacaggtggagtaacggatcggcttaaaaaagattggggaataaatgatgtgtggaatgatattgttttgcctcgtttcgaacgtttgaatcgactgacagattcgaagcaatttacaagatataatgaaaggatacaaaaatatattccggatatgcctcttgatttacaaaaaggatttaataagaaacgtatcgatcatcggcatcatgtaatggatgctatcgtcatagcttgtgcaacacgtaatatcgtgaattatttgaataatgaatcagccagtaagcaatctaaattttcacgatatgatttgcagcatttattatgtgaaaaacgccatacagatgataaaggaaattatacctggcttgtaaagaaaccctgggagtcatttacacaagatacccggttggcgttggaaaatattgttgtcagtttcaaacagaatttgcgtgtaatcaataaagcgactaattcttatcagcattatgatgaatcagggaagaagatctttaaaaaacaaataaaaggtaataattgggcaatacgaaaaccgatgcataaagaaacggttttcgggaatgtaaatcttcggaaggtaaaatatgttcgcttgtccgttgcattagatacgccggctatgattgttgataaattactgaagagtaaagtaaaggaacttttatctctgaaatatgaaaagaaaaagattgagaaatactttaaagagaacgtagatgactggaaggaatatgattttacgaaagttgctttttactattatactaatgatacgaaagatcggcttgttgctgtgagaaaacctttagatgcttcttttaatataaagaaaatagaggagtcggttacagatactggcattcgaaagattttattgaaacatcttgcgaacaatgaagagaaagcagatttggctttttctccggacggaatagatgatttgaatcggaatataaggatgctgaatgatggaaaggaacatcaacctatttataaagtacgtgtttatgaattacaaggaaacaaatttaatgttggggtgacaggtaataagtcttcgaaatatgtagaagcagccaaaggaacaaatctcttttttgtaatttatgaaacagaggaggggaaacgttcttatgaatcgatacctctaaatatagtcatagaacgccagaagcaaggtctgctttcagttccggagattgatgagaatggtaataaactgttgttttggttatctccgaatgatttggtttatgtaccgagtgaagatgaggttgtgaatgggagaattgctgattgtttggataaaaatagaatatataaaattgtaagttttacaggtaaacgtttatatggtattccttattcagtagcaaacgtcattgttgataagtttgaattctcattgttgaataaaattgaatttattggagaaaaggaaatctgtattcctgttaaaattagtcgattaggtcgtgttttatctgttggcaaaagactttagtctgaatattggagagtattattgtagtctttgatttaataaatagagtgtattatgataaagagcacattatattttggtagtccggcatatttatctattcgtaatgatcagcttataattaaattaccggaggtagaaaagaatgatactataccggatagttttaaaaagaaggccgtcgtcagtaggcctatcgaagatattggcgtagttgttttagataataagcaaataacgatcacgacaggaaccatagaagctcttctggataataattgtgccgttatttcttgtgatagcaaagggatgcctgtaggactgatgttgcctttatatgggaatacaactcagaatgagcgttttcgagatcaactggatgtgtctgttcctctgaaaaaacagttatggcaacaaacaataaaaatgaaaatagagaatcaggcttctgtattgtttgattgtactggagcggaagtccggaatatgcgtgtatgggctaatgatgttaaaagtggtgatccggataatttggaagctcgtgcagcggcatattattggaagtccttatttcctgaaataaaagattttacgagggaaagagaaggaatcccgcctaataatttattgaattatggatatgccgtattacgtgctgtggttgcccgaggtttggtttccagtggaatgttaccaactttgggtattcatcatcataatcgttataatgcttattgtctggcggatgatattatggagccttatcggccttatgtggatgaattggtagtagacataataaagagcggagtgggtattaccgaattgacgaaggatttgaaagctagattacttagtattccaacgttggaagttaagatcaatggaagacgtagtccgttaatgattgctgtaggacagacaacggcttctttatataaatgttttagtggtgagttacgccgcattgcatatccggaaagataatatggaccgatttagtgaatatcgtattatgtggatacttgtatttttcgatctaccaactgatacaaagaaaaataagaaagcctatacagattttagaaaaaatttgcagaaggatggttttacgatgtttcagttttctatttatgtgcgtcattgtgcgagtagtgaaaatgcggaggttcatataaaacgggtgaagtcttttttgcctgaatatggtcaggtaggaatactttgtataacggataaacaatttgctaatatagaactgttttatgggaagaaaattcaaggtgtaagtgctcctggtcaacaattggagcttttctaaaataaaaaatctcgtctatatggcgagattttttatttgaatacagtattttttatattctaaatttgtttgtattttattgaattatagcttaatactggtattgtgctgtattcaatatgacaaagatataagtttgaaagcaaatcacaacaatcttgcaaggcgattctgatatttggtgctgtattcaatatgacaaagatataagtttgaaagcaaatcacaactactggcttcttcttttgaccggtttccgtgctgtattcaatatgacaaagatataagtttgaaagcaaatcacaacaaggtgagtacttcttatactgtatcctgagctgtattcaatatgacaaagatataagtttgaaagcaaatcacaacagtttcagcatatctgtgttcaaagtgaatgctgtattcaatatgacaaagatataaatttaaaactacacaatgtcacagcttatttaaaccctttcagcggcctcggctgtgaaatcctcaaacaactaacaattgcagcaactacggcgaaaccggttgccagatagaggcaagcctgtgtgctgttattcggaaccagattgaatatcatcgcaaccaatgtagcccctaatgtctgtcctaataaacgggctgttcccaacataccgcttgcgcctccgcttcggttggaaggggcagaggagatgatcgtgctgttattgggtgtctggaataaaccgaatccggctccgcagataaacaggcgccatataatatccgtatttgtcgggttgtcgggtaaaatggccagaaggaaaagaccggcagcaaatgtcgtcataccgatacctcccagtataccggcatgaatccgttcgactaatcgtccggcaagcggggccatgatcatcgtagccaacggccagggagtaagaagcaggccggtcgttacgtcgcttcgtcccaatgctccctgaaggaaaaaggggagggagatcattgccagcatttgtccggtgaaagaacatatcgacgtgccgatcgacatagagaagatcgggatgcgcatcaagtcgaccggaagtaacgggaactgttggcgtagttgacggcgtacaaagaaataaccgatcataaacaatacggctatacctgctatgatcaaagttgtattctccttatgggcaataccctccagcgagaaaatcagtaatccgaatgtaagagcgttcatcaggcaactgagcttgtcgaaacggcggccggtgactttaaccggattggctggcaaatgcatcaagccgatcaccaaggctgccatgccgatcgggatattgatggcaaagagccagtgccaggaacctaaagacagaatgatggaagcaatggtaggcccggcagctatcgacaccgcgacgaccagggcattgattcccataccgcgcccgaggaaacgtttgggataaatgatccggagcaacgccgtgtttacacttgttatggcagcagctccgaacccttgtaggatacgggcggctgtcagcatccagaacgagtcggcaagagcacagatcgctgaagtgatgctgaacagcaagatccctgataagtaaatccttcggtaaccgtaaatgtcccccaacgaagagaaggagaggagcgaaatggtgatagccaactggtaagcgttgactacccagatcgtgacagacggtgatgtccccaggtcgcgggcgatggtcggcagggctacattggcgatggttccgtcgatgacggacatcccgacacctaatgcggtggctaatatggcccagtaacgcttgggtaacggtagtccgtcgttctcatttacagttatggcgcgattctgcaatatcattttatatcatttacttaataacctctctgactgcttccagcatcggttctacggtaagagggctgcctgtagccagtatcatccattggttaggggttaaacgtccctggcggaaaatccgttctacttcgtttgcgaagttcttgccttccagatactggtcaagttggaattctatgatctgtccgaatgcgtaggccgacaaatacaacggataactgatcatgtgcgaataaacagccagcaccgtctcgtccttcacaccgaaaac

SEQ ID NO: 731 - DNA, 21878 bp, synthetic construct
  misc_feature 1..21878: note = Synthetic
  variation 11308..11808: note = n is a, c, g, or t
  source 1..21878: mol_type = other DNA
aatcgccaataattggttggtcgttcttgatttttttagatagtccttttatatattcttctcctgccttttgtccataatgatattcaacatacagggcttcagaataggttgtaaatccttcatgtacccacatatctgccatgtctttgtaggtaatattatttgcaaaccattcgtgcccagattcgtggatgattagataatcgaattttaaaccccaaccagaacctgaagaatcttgaccatctcttggcattccattttggtatccccaatagcctatagcactttgatgctccataccaactccttctaccagtttataaccatcttcataaaatggataaggtccaaaccaatgctcaaaagcttctagcattaaatgcacctgtttaaattgtgctttggctttttctaaattttcttgatacacatagaaatcacattcaagtgttccgtttaatcctttgtaaggatcagaaaaatgagcataatctgccacattaagactaactccgtagttattaataggatttagaaccgtccattcgtaggtggtttttccgtttttatttttttctgtagcggttagttttccatttgcaaccgccattaagtcactagaaaccgttgcacgaatcgtcattccgttatctggttcatcatacatatgatctttattaggccaccacaaactagcgccttcaccttgacaagatgtaaaaactacaggtttgccgcttgcatcttttctccaggtaaaacctccatcccaaggcggtcttggtgcttccttaggatttccttcataaaaaacttcaatttcttttgaggatcctactacttgattttcgtttaattggataaaataagcattcccattttgtgtaaaatttaaagaagtgccagattgcagcactttcgtaatttttaaaggaggttgcaaatcaatttgcatgcttttatttgctactaatactgtatacgttattgtattagatcctgtaagaaatttattttcgatgtctaattcaaaatctagtttgtagtgcgttaaattccaccaagctctttctggagttatttttcctcttaaagtatcttgcgctgtatatgctttttcagctacagcttttatcttcatatcccttttaataggatttcgactcaaggttacaggacctaaattgcgagatttgacaaaagcaaaacctttgtaggtatttgtttcagcatccctttttaatttaaaattaaacgtggttttaggctgctctatattaaataatagtgaatcgttcttaaaaagcaaataatctaaaggtgcatttactttgttaatccaattttgccattcccaattgaaggtaccagcatagttattgttattttcttcaatgataacctctaaatttcccttcggattattaatttcataccatttacctgttttgttttgactgtatattgtgcaaatggagacttggaaaatcaatataaatagtatttttcttttcatcttgtatttttactgtttggttagagtgatgccgtattagtttttatttttttgattactatcaacatttatttatccatattttttaaactcaaaacataaaaattaggatcgatacttaactcctttttagtattagtatctgtatcgtttagatgataaaaagtccatactgtttttggtttaatccaatattctctattattgatgtctacttttaaaggcatttcaaatcctacaatcgtatttatccatttgtaaacaaattgattatccttaaaataatattctaagattggtcttgttgtagttcttaaatattgatcaaaaaatggtttcagatttaagcctgaatgttttatgatataattctcaacatccgcagaagtaacggttttatgataaaacgctgtatttaaacctgtaagaatagcgcgccactttgtatcatcattaagtgcgtttcttaaagtatgcaggattactgcactttttatgtacacatctctagaccaattaaaatcatttacatcgtaatttcctataataggttcttcgtttttaataagtttagacaacccttttatatattcttctcctgctttttttccaaaatgatattctaaatataaggcttcagcataatttgtaaatccttcttgaatccaaacatcagctacatctttaaacgtaatgctatttgcaaaccattcatgaccagattcgtggataattaaataatcgaattttaagccccaacctgaatccgaggggtcttgaacagttcctaaccttccgttttgatagcctgaatacccaacagaactttgatgttccataccttgcccttctactaatttataaccatcttcataaaatggatacggtccaaaccaatgctcaaaagcttctaacattaaatgcacttgtttaaactgctcttttgctttttctaaattttctggtaacacataataattacattcaagtgttccttttaaacctttataaggatctgaataatgaacataatctgctacattaagactaactccgtaattgttgatgggatttacaacggtccattcatattttgttgttccgtttttctttttttctgtagctgtcaatttcccattggcaaccgccattaaatcattgggtacagtgatacttatgaccattccgttatctggctcatcatacatgtggtctttgtttggccaccacaaactagcaccaccacccatacaagcagtataaataaatggtttgccattggcatctttattataggtaaatccatctccccaaggtggatttggatctattctaggactcccttcataaaaaacctcaatttcttttgatgtccctattgcctgattttcatctaattgaatgaaatatgcgttaccatcttgtttaaaagtcaacgatttaccagattgcttcactttggtaattttcattggaggttgcagatctatttgcatcacattttttgattctaatactgtatatgtgatcgtattagaaccttttataaatctattttctacgtctaattcaaaatctaaattatagtgggttaaattccaccaaattctttctggcgttattgtacctcttaaagtgtcttgtcttgtatacttttttttagcaggtttggtattggttaaatctcgttttattggagttctactgaattttactgaatctaatttttcaaatttctgataataaaaaccattataggtatttgttttaggatcccattttaatttgtagttctcaatatcatttccacttcttaactcaaataaaagagaatcttttttaacaaatagctcataaagtggtgcattagctgtattcctccagtttttccattcccaattaaaagtaccagaatatgcatcattattcttttctatgattacttctaaactaggtgtgtctttaatttcataccatttgcctgttataatttggctatgtaacgtgcaaatggttaattgaaaaattattaaaaacaatatttttcttttcatagtgtatttgttttatagtctaaactttgtttgattgcatcaattttcaagttcattttatctatcataaataagactaaccagcatattcattaagggtttgttgagcagaaacaaatggtaaatctaattctctttcagccaaaccattttgataaattactttagcagcatgttgtggttcttttttattcagcatcaaagaaatatctgatattggataggattcactactcaataaatagtttttaccatgtaaccctttttttgttgcagcgttgtaaataccttttgcaacatcttttacatttaccattgccatttctgcatccgtatcaaataacatttgtacaaaaggattcggcgcaatattattcttaattaaatactgtaaaccagtagaggtagagtcttgtctttgcgacattgattttccaaaaacaccaacgggtgatactgttgttatttctacatctaaattaggatgattttttataaagtcattcacggttgtattcgcaataaattttgcttgtgcatacggatgactttcttcactcataaaaggagtatctttttcactgaatatatcacttgatgatttattaccagcgggtaaaggaaagttggtattgtaagcagcaaccgaagcaattaagaccgctttttttacacttggagtgctgttaattactgctaaaaaattttctgtaccttttatcgttggatcaaataattcggtttttgcatccacaaaatctaactgaaaaggagtgccgccatgcactacaatatcgcaatctgatacaaagttctctaactgttttttattttctacattcaacggaatgatgctcaagttttgagcattagttagttcttttaaatgtgcgtatttttctccttttgtaatgtctgtcgaagaaactttaactttaaaaccttgctctagaaagtttttggtaacataacttcctataaagccagaacctccaataatacctactgttttcataataaattgatttttaatggttactatatttattttagttgttgtctgataaaagacataagttcgctttgtttttagaatcaagacttgattttaaaaagggtttatcaagctaaatacatttttaatcggacactattgatttattttataaagttaaatttaaaagacaccaccaagaatcattaagcgattttagcaatgcctttcaagtttggttagttgtttataattacttcttctttttctttctctaattctttgttaatttataacccatagcctgatacaaagctaacacgtcataatagattgtaaggctagcaattttaccgtctgttatcattgccgttgattggtaaggcatattcacttcaatactatcttgtgtaaaaatgtagtttccccaaacagaaacccaatcacctttatagtcgccatcaataactctaaatgtctgactaataaagttgtttttctgttctgttcttactttattccattctttccaattggcaattaattcagcttttgtttctgttttaccgaagcttggccccttttgcacaaagttttcagcgagtaagctagctactttgtctattttattatttaaaagtgcatcataataatctgcaactacttttaaatcttcttcggcagtaggattttctattactgtttctttgtaacttttgttttgcgcaaaactaatttgcccaattagcagaaataatacaattgcacttgtttttaatgttttcataagtttggttttaataaatagtttttatgttggtaattataaaagctaaattaaaagatgtttagtgtaatgtcaatcacatcttaatgtgatatttagcttctttatttttgtatatttgaaaccaactaactacctaataatgctttttgaaaatctttaaaaaaatcgctctaagaattacctgttttatattggcacacgtttgtaattctgtgtatgcacaaaatccatctcaaatagatgtacttactacagaacaagggttgccttttagagacattacatctataactcaagatgctacaggtgctatgtggtttggcacagacattggtttggttcgctacaatggttataattttaaggtttataattctgataaaaagaaccctttttatattgaagaggaattaattacaggagaattagtctatgataagactactaatgaactttggtatttagcaaatgaaaggctctttaaactacaattatctacagataaagttattgcctataacagcacacacaacatcaaaggcagcgttttacgaatattaaaagcgacagatggtagtatttggattatgtctgacgattttttatccgtagaaaacggaaaagcaaaacaatatttacaaaaattaacaaatgaaaaatttgaagttagagcttctataaaaagacctaaatatgcgtatagtagattagtagaggataaaaaaggtaatattttatggtctgcacctaacggaagtttaaaatttgattgcgaaggaaatttattaaatacgtttcaattatcaaattatacgtggcattttgccgatttaaattttacggtatctttttttaatagtaataatattcattacttttttccaagaaaagaacttggtatttttacttttgatgaaaaaaaattaaccaaaaaacgaatttttaaaggcgatgaccaattttactatgccatagaagatcaccaaaaacaactatggtttgctagtagtaaaaagttatatcgcatgaattttaaaggagaatttgttgattataccaaacaattaatctctagatttgagtactctaaaattaattatctttttatagatgctaataaattactttgggttgcaaccgataatggtttgtttaaaattcaaataattgaagaactttttaaaactctttttacatctaaaaacaaaggttggggcaacacaatgcgtggtatttttgaagataaatatggaactgtttttgcaaaatgtgaaagtgaaaacaagcttatctacaaaacaaaaaatggcattattgatactttacaaattaaactagatagtgtctcaagagatgcatcaaaatacaaaagcaatttttatgttttagatgataaaaagcgcaatgtgtttacaataggagataatttgctgaaaataaatttgaaggatggaactactaaaagttaccctcaatttaattataatatttcacttaaaggagaaaacacattaattaagcttaagaatggtaaaatccttttaggacaaagtctaaacagattactactttttaatcctgaaacagaaactagtaaacttatttttaaaaacccaaaagctgaatataatattgccgattttagatattttaaagaaagtaaaacagatagtgttttatggataggaacacaaaatgatggtgtactaaaaatacatcttagcggacgattaataaaacaatacaaaacggattctaaaccaagtgtttcaagaaatttaattcttgttatggaagaggatatagatggcagtctttgggttggtacttatgccggtggacttaaccatatttctgcagatggaaacaccgtaaaaaaatataccaaaacagaaggcttaccagataacaatattgtagggatcttaacagataaagaacaaaacctttggattagtacttataacggaatttctaaattcaataaaaagactaaaacttttcaaaatttttatgatgaagatggtttgtcaaataacgaatttaactattcatcattttataaatcgaacgctggcgatttttattttggaggcatgaatggtttaaacacctttagacctaaagatattttaaaaaaatcgaatcctccaaggttacatctttcaagtattaaccgatataacagtaaagataaaaagaactttaatacagattatagtcaaacaaaacttacaactttaaaaatttcaccatatgatcaatactttgaagttcgttggatgatgcccagctattttcagaacaacaagaatacttatagtactaaattagagggttttgaagaccgttggtttcatcaaggcaatgcttcatttattcgctacaatcaattgccagctggtaattatgttttaaaagtaaaaggtaaagattctcgaggagttgagagcgctactattttatcaattcctattactgtgcaacaagtattttataaaaaatggtggtttataagtatcatcatttttttaataatagtgttgttttacgctatttttatatatcgattagagcaagtttttgccatggaaaaattgcgaaccaaaattgcaagtgatttacatgatgatgttggctctatgctttctggcttggcaatgcaaaccgaacttttagagaccaatgcaaatgatgcagataaatttaagttacaaaaaattgcaacgattagtagaaacgcaatttcgcaaatgagagatttggtttggagtattgatagtagaaggcaaagcacaaatgatttagtagagcgaatgcgagagctttcggaagatttattgctatcaaaagaaattacatttcaattagaaacggacactataaaatacccgaatcgagagttatcgccacaaataaaacaaaatttatttttaatatttaaagaagcgatcacaaatataattcgtcattcaaatgcaaatcatgtaattattagtattgtaaattgcaaaaaaggaagtcattttaacataaaagataatggtaagaatataggagactgtaattctacaggattaggattgtcaaatatgaaaatgcgaacaaagcaaataaaaggcaaacttaaaattaccaaagatgctggcttttatattcaaatatatcttccatttaatttataatatcacattaatatgtgattttttttaaatagttatttttataactttactagctaaatatatgtgttacaaattataaaaaatgaatgatttaagacttgcaattatagaagatgatgttttagtgcaagaaagcttaaaggcattttttaacatacagtcacatatagattgtgtacttattacctcttcggttgaagattttcttaaaaatgtagatttacatatacttcagccatcaattttgatattagatattaatttattaggaatgtctggtattaaaggaattcctttaattacaaaaaagttacctgatattgatattataatgctcacaacttttgaagatagtgatagcatttttaaggctttatgtgcaggagcttgttcttatttatctaaaagaacacctttaaaaaaaatacttgaagcggtagaagttgttcataaaggcggctcttatatgtcaccttcaatagctagaaaaatcgcaaatcattttgcaccaaatacctcaaaaaaaggattacttactgcaaggcaaaaagaaatagtaacggaacttgttgacgggaaaagctataaaatgattgctgacaatttatttatatcattagatactgttcgcagtcatataaaaaatatttacaaagttttagagattaatagtaaagcagaattaattaaaaagtcttacgataatgagatttgaatcttttagcaaaaaattagtcagttttgttattcgtttaagtttagttcgttttgtggctaaaacgagattttaaacaatattctaagggttacaaactttaaataatagtctttttatagttttgaaatttagtaagttaaacttaaattgcttgaaattgtatttcaaaataggttcattttttactccacaattatcaacatacttactagttttttataaagttctttatttcccgtgttccaaatcgtgttcaattttggagttaaaggtaatgatttcttgaatattaagcataaaaaaacagtttagagtgaactaaactgttgttttgtaaacgattgaagtttgtagcgagaacgggatttgaacccgtgacctcagggttatgaattttacaaaaactccctaatttttcgcttttatgctatattttaactaaatcgtgtaccgaaacgtgtactctgatttataaaaaaattctactcaaatgtactgatttttgtgatacaaaatcaatcatctttagaaattcaataacttaattatttttataaaagaaagcgacatcataattaaatatgatgccgctttaaatgttttcacaacggaataatccttattgtgaattgatttcaaaattgttatacaaatataaaataaaaaaatgatactattttacgggtttcagtaaatctaatttatttttttattctaaatttagaaaaaaatagattatgaaaaaaatattaggtttagaccttggtacaaactctattggttgggcattaacaacacaagactttaataataagaaaggagaaataaatggcctaggtagtagaattattcctatgtctcaggacattttaggtaaatttgattctggacaatcttattctcaaactgcagaaaggactaaatatagaggtgttaggagactttatcaaagaaatttattaagaagagaaagacttcacagagttttaaatgttttaaactttttaccgcaacattataaagagtccattgattttgaaaaacatttcggacaatttaaaaatggcacagaagaaaaacttaactatcgtaaaaatgaagttggaaaacatgaatttatatttatggattcttttaatgaaatggttactgaatttaaacaagcgggtaaagaaactactatacctttagattggactatatattacctccgtaaaaaggcattaactaaaaaaattagccaagaggaattagcttggatattattaaactttaatcagaaaagaggttattatcagttaagaggagaggatgaagaaggaggtaaggagaataataaaagttttgagacgctttttgttgcagaagttaaagtgtctggagacgttataaaaaaaacaggggaattgctttatgatatttattttaataatggatggaagtatgataaacaaacaacaaaacctgaaagttggttaaataaactaaaagaatttatagtcactacaacagaacttaagaatggagagattaaaagaagttttaagatcgtagattcggaaacagattggattgctataaaagaaagtacacagaaaaaaattaagtcttttaatagtgagaaaagtcttgttggagtaggacaatttatatacgaaacactattacaaaatccaacacaaaaaataagaggaaaactagttaaaactattgaaagaaagttttataaggaagaactgcaagaaatattaaaaacacaaataaaatttcattctgaattacaagatagagaattgtatgatgcctgtataaatgaattatatccaagaaatgaagcgcatcaaaataatataaaggataatggttttgattatctatttattgatgatataattttttatcaacgaccattaaaaagtaaaaagtctacaatttcggattgtccttatgaagaaagattttttataaaagagggtataaaaaatacgcaaaagataaaatgtattgctaagtctaaccctttatttcaggaatttagattgtgnnnnnnnnnnnnnnnnnnnnnnnnnnnnnnnnnnnnnnnnnnnnnnnnnnnnnnnnnnnnnnnnnnnnnnnnnnnnnnnnnnnnnnnnnnnnnnnnnnnnnnnnnnnnnnnnnnnnnnnnnnnnnnnnnnnnnnnnnnnnnnnnnnnnnnnnnnnnnnnnnnnnnnnnnnnnnnnnnnnnnnnnnnnnnnnnnnnnnnnnnnnnnnnnnnnnnnnnnnnnnnnnnnnnnnnnnnnnnnnnnnnnnnnnnnnnnnnnnnnnnnnnnnnnnnnnnnnnnnnnnnnnnnnnnnnnnnnnnnnnnnnnnnnnnnnnnnnnnnnnnnnnnnnnnnnnnnnnnnnnnnnnnnnnnnnnnnnnnnnnnnnnnnnnnnnnnnnnnnnnnnnnnnnnnnnnnnnnnnnnnnnnnnnnnnnnnnnnnnnnnnnnnnnnnnnnnnnnnnnnnnnnnnnnnnnnnnnnnnnnnnnnnnnnnnnnnnnnnnnnnnnnnnnnnnnnnnnnnnnnnttcacaactattacctacaacgtatttgtatatgaaaatttgtgattcatcacgaaaaatacaattttgaaatcaattcacaacactttgatgcagagccagacgaatgggaagtttgtgattcatcacgaaaaatacaattttgaaatcaattcacaactggtaacttgaatagtggttatcaataatatttgtgattcatcacgaaaaatacaattttgaaatcaattcacaacaggctttaaattgtttaaaaatattcctagtttgtgattcatcacgaaaaatacaattttgaaatcaattcacaaccaattgtagctttactcgtagattgatctgtttgtgattcatcacgaaaaatacaattttgaaatcaattcacaacggggttattggtttaatctaagtacaggtatttgtgattcatcacgaaaaatacaattttgaaatcaattcacaacggattctttgggggtacaggagccactacttttgtgattcatcacgaaaaatacaattttgaaatcaattcacaacaaaaagtaatcgttttaccttgctcgtaactttgtgattcatcacgaaaaatacaattttgaaatcaattcacaacttacagacttaccagggatcgcttcatgaatttgtgattcatcacgaaaaatacaattttgaaatcaattcacaacggtatatgcacaacgctagaattaattacatttgtgattcatcacgaaaaatacaattttgaaatcaattcacaactgattaaatcaaaaaatcaaccaaatcaccaccatcttcaatatctaaattctctaataatgaactacattgaatgtgaaaaccttgtttatttaaaagtattgcggttttgttccatgattcccaaacggttttatcaggataaacaatcacgttgtattcttttaaaggttgtaacatttcttgtttaaacctcgttttactacctgttgccaaccacaaataattaggaaatagaatactcataataatagcagtcttttcagattctataatacaaacgatatcatctttagaaatgttggtcaaattatgtaaaccgaataaacattgttgcaatacaaagttatttagttttaattgtttgtgaacccaactcacatgattgaaaggttgttttactcttttacctgtattacaattgtactgcattattttaccacctctaattcggtttttagtatctatttgccagaatatagttgcttcatgccaataatttgtgataccaatattgtaagtttttatagcttgtaacacactttttacatcaaaaacactcaataaataaacaataaagttgcttttttgcaatgtatcacgatattgcaacacaagatctttattgtgatacgttggttgtattacttctgtgatacaatttgtaatactttttgtaatacatttattatcgggttttttgaagtaaccacacttactttctctatcacatctaccatcaatatcatttaaatactgattagtttcattgtcaataaattttacaaatgtttttttattgcaattaggacaaacaaattttttactggttgtatctaaactatatttataaatggtattcataacgttcatataattcgtaccattcgtacctcttttttgggtacgaatggtacgattatgttttaattgtttttttaatgtaatgttttagtagaaaacgtaatccatcttccatggtaaagtcgggaagtttagttgttgaaggtgctttaattttagtttgattcacttcttttctgagcatatcagacagcctaataaactcttcttttgaaagagctttcgctatcgtatatacatcagttgccaccattttatagacctaatttttttattctttttctaattgctccttctgatagtcctagtctatcagctatttttgtattagataatccttcagaaatcaataattccatttgaacatctctttcttctaaatctgaagaaccataggttttaagatggtttttttctgaatcaaaacctacaaactgaaactctaaaaaattagtttccttatcaacactgcaaaccaccacattttctgagtgatacaaatgctctgtgttacgttgtttaatttgtttgatgaaacggaaagatggttcctgagaactagaccctattgcaaaagaactatcacaaaaattcatgagcattttactacccgctaaatcatttttactaattggtttagattcatcccttttaggagaatgtgacaatacaagaatggaaatgtttttctcttttgatagtttttttagtgctttcattaaagacaaagcatctttagctttctcgttttcgtgacttaaataggttagattatcaacaattaaaactgttgcttccgttttttgaattgtatttgtaagtgtgctacataaatactcttctaaagtattaaatcctttaggaatttctaagtctgaatctaattctgctcttaaaaaatttggactaaaataatagtgattttgataattttctgaacatcgattttcaaactgtttgtcggataattcaaaatctaaatacaaaaccttctgtactttgcaaactagtttaaatccttcaattgcaattcctttactaatactatcagcaatttgaactgctagtatcgatttacccagattggtgtctgaaaacaaaatacatacttcattctcgtaccaaaattcactaaaaagcatattaggtataggtctgttcttggcttcctcgatccaagtgttcgcttctttgataatcaaacaaccactctccgaacttttatcttcgagtagtttttgattaattgcgatatctttcgatataatatcaattttatcttgtaacatattaaaattgatttaatgaaaatggttataatttggtgggataggtaaaataacctcatgaaccttttgaacctctttagttggataatgatgattctctaagtactcagttatgatatctcgtactaaatttgaaactttaatacctttttgatctgcaatttcttgaagttcgtcttttgacagttcgtcaattctaaaattaatggttgttgtattcattgtttacttttttatatttaacatttttgtttttgataaatacttattaaaaaagttgaatgcaattccttataaatgcaaaaaacccagctaataatatttaactgagtgcaagtaactaatatatagatgtttaaaaaagtgagttgtttagtgaagttttatgaaaatctagtgaattgtagtgaattaatgaagtttttagtgaaacagaaaaaagctagctcttagaaatgaatatttggtacttcgatataaacatttcgactttttcaacatgacttttagcacttgaattaccaagtgataagtttttaaaattacagttaaaacattctgttagcaattgattaaacccctcggcagaaattgttgttaagtttaactccatttttaaggcgtagaataatcctaacgcaaattttctaaattgatatttactatcattcattattagttcaataaattctaatacttcgatggaatcaaattcatccggaaatttctcgtaagtaacttgagctatactttttgaaatgaaaatatcatccttttcaaactgaaattttttattaagttcaataataatgtttagcttattttcaaactcgtaaatttctagtaaaatagggtctttgtctaaaaattctttatcaaaatgatcgatatatccaaataaataacaagttataattgtttcttcttctttcaacttttcaaataaactattttgaaccttctttagtgcaggaatcattttttgattatccagctctttaccagtatttttatctgatataatttgctgtttattaactaagtcaaaaaaataatttttaaatatttttaaggcagattttttcattttcttatctgaaaagccaaaattattaatttcaaaatcactattaaaaatcaataagttagtattgatagacccaataattaaaagttttataaatgcataaacctcatgaaccaacttgtctgaaaaagaatatgcagtctcattctgattaggttttgcaaaaatttcaaagccatttttttgatttgtattccttttatgattaactgttagatttgtatataattctattaagttgttatcatttagaaaattaaacatttctttatcactaaaggaattatacatttcttcggttaaaattccaaaatatttatgttccattattttaatagttttgaataatcctcaggcaaaacagcatcaatatcacgtagatataattctaatgcttgcatggttgaatgacctgttattaattgtaatttactttttacttctaatggagtagcggttttagccatttctttgtataacttggttataaaagtatgtctaaaactgtacaatccataatcttttcctaatccaaaatgatcttttattttcttgaattgttttgtgaaataatttcttttattattttctatggtatcccataaaccaccaatagtgtcgggtgtaaaaagaatgaaatctttatctatttctgataaatcaggaatttctttaagaagaatatcaggaataattttaattttaacagcttggtttttagctcttacatacagctttttatcaatgatgtcaatatctccaacttttaatctacaaacttcaacaggtcttaaataattgtaggatacaaaaagaacaaataaatacaataccttatcatgttctttaaggtattcaaatattttttcttgttcagtagttgtgtaagttttatttctttctggagttgattttaatatattaatcttcttaacgaaattatcttgtattatttcattatcttctaatgtttggaataacgaacttatatccgttctcgtgttatttctatttcgagaactagaagatgctagcactgtgtttaagtattcaattacaagctttttattgatgatagaaatatctttttttaaatcaatattttcttttttcatccattcgagaaacctatttatcctacttttaaaatttccatgagagtttacactttgtgttttagattttatttgatacaccaaattaaaagcttttcttattggatatacagttaaaataggctcaacttttactattggtatggttttttcaataggtgtaattacttttttagtttctgtttcatccattagaagtttttgctcaataaattctgctaaagaactattatcttcataaggattgaagccttgtgttaaaacatattctaaactttccctaagctttgataatatatgataacggctttttttgtccttgtaaaaattagcacctccttttatgttaatttgcctttttaatctgcctgtttttgggtttcggtaagaataataaacataccaatgtttcgacatagcttcttttttctcctttgtagagagcttagtccaagtatttatatctactccgccagtgaagattttgggttccgaataattcaattccatagctgaatcgtgtactcttttgtgtactcgttgcaaaagtaagaaaatagaaggcataaaaaaacgaattgtgagacacaattcgttgatttaattaggcttagccttgtagcgagaacgagatttgaactcgtgacctcagggttatgaattcgaaaaagttcgatttatatacctgaaaatgtgttttttatgctaaaaatgttccaaatcgtgttccaaaacgtgtgcagtttttgttcacttggttatataatgtatagtggtaaaattatgattttatttttgaattcaaacttttattttaataaaatctttagacagataaaaggtaatttatattaaaaaaaactttttcatttccctaaaatcagttcattttatctcttttatttgttaatttattttataatacagtatcaaaaaagatgtaatagatttttgattattaacttttcatgaagtacttctcttttttattaataattatgggtttcagtaattctatttcaactcattttagtacttttattttcctgaaaaagaaatgaaatatccagataaatacgacgcattatgtcgcacttatatattaaattgcaacaaaaagaaaaatgaattacttctaaaaatatcaaaaagcttttaataaactaaaggaaatagaatcggactttgaagaacgtgaattttatgatttaattgatgaaataaagttagacacgcaatatttatttgagcaagcagagaagcatcctaaatatagatttgttccaacgaaagaagtaccagcttctattgaattagacaaactagaaaaactgataaaaaaaatagaacaatttataaaagattcacgagaattcgatcctgaagaagaattagatatgatgtttccagatcgtcacgatgaagattttgatgaagattctatgaattttgatagcatttttggtaaagattaatcattttataaataaaacaactaaagaaaagttaaaaaccacaaagcataaaatagtaaatgaatcaatctaccattaaacaattagaaaccgaactttgggatgctgcagacgatttaagagcaaactctaaactgacagctgccgaatataaagacccattattaggtttagtattattacgttttgcgcaaaatcgatacgaagatgccaagatagaagtacatactaatttaccaataaacccacgaactaaagaaaaacgtgaagtcagaaaagaagattacacagcggcaggagccattatgcttcctgaaaaagccaagtacgattatttagcagcattacccgaagtagaaaatatagcggaagctattaataatgccatgaagcttattgaagcggaatatccagatttagaagggattctgccaaaaagctaccaagagtttgatgataaacttttgcgagctttggtacgtgtttttaataaagatgcagtaaaacatgctaaaggcgatgtcttcggacgtatttacgagtttttcttaatgaaattctctatgcaaggcgcaggagcgcaagaaggtggtgagttttttacaccaccttctttagtaaatttgattgtaaactttatagaacccaatcatggtattattcatgatcctgcttgtggttctggcggtatgtttgtacaaaccgcacattttataaaagaccatgaaaacaaaagtgttaatgaggcgattacggtatatggtacagagctaaaaagcaacaacacccgtttggcaaaaatgaaccttgctatacacggtatagaaggcaaaattatagaagccaatagtttttacaccaatccacatacaccaaatttaacaggaaggtgtgattttgtcatggcaaatccaccatttaatgtcgataaaatagattcaaataataagtttttagcagaggatgaacgtttgccttttggcgcaccattaacaggaaaaggcactattggtaacgggaattatttatggatgcaatattttcatgcttatttaaatgaaacaggcagagcaggttttgttatggcaagttcagcaacagatgcaggaaatgcagagaagctaattcgccaaaaattaattgaaacaggagatgtagattgtgtggtttctataggtaataattttttctacacacgttctttaccttgccacgtttggttttttgacaaagggaaaaaagaaataaataaggataaagtattaatgatcgatgccagaaacacctttagggtagttacaagtaccattaatgatttttctatcgggcaacaaaataacattacgactattaaagaactctacagaaaaaacgaaaatgctttttctagtagtattcgatttcacaaagataactgcactgcagagttctctgctatttacagtgtttatgagcaaacatataaagagtttagtgtaatttttgaatctgaaaaatttggcaaacaaggtttagacagcaagcttacatacccaacaatcgctttagaaaccataaacgatttttataaagaactaaaagcaccttttaaagaaatagagcaattaataggaagcttaaaaagtagcttattattaattgaagaaaaaggaaaaaaggcaaagcttaaaaagcaagagatcacaaaacaattagcacctgttaaaaataaaattacagttttaagcaagcctttaagtgtctatgcttctggagttttggaaagcttaaaagaggggaaacaggctattatagattgggaagcattggttgcttatttcccaaaaggaatttaccaagatgtagaaggtttatgtaaaatagcgtctttagaagaaattgcagcacaagactacagcttaacaccagggcgctacgttggtgttaaaattgatattaatatggattttgactacaaatggagaatgaaagaaattcataccgaattagcacaactcaataccgaagccaatagtttaatgcaacaaattcaatctgtgaagttatgatggaaggttggatagaagtaagatttggtgatgtagttcaatttccaccaaagattaaaatgaagaaagatgaaagttatccatttataccaatggaaaacttagatagtggaattaagtatgtaaaacctataatagaaaaaggcttaaaaggtagcggttctaaatttgaagaaggagatactctttttgctcgaattacaccttgtttacaaaacggaaagattgctcaagcaaaagagttaaatggaaagtctggttttggatctactgaatattttgtttttagaggaaagaaggatattacagatacggatttcgtttattatttatctaaaacacattggtttcagcagaatgctataaacagtatggttggttcttcaggaagacaaagagctgatgctggttttgtaaaaagcattaaaatcaatcttccaccactaaaaacccaacgcaaaatagcctccattttatcggggtatgatgatttaatagaaaacaacctaaaacgcataaaattattagaagaacaagcacaacaaacctatgaagagtggtttgtacgttttaaatttcatggttatgagaatgtggagattgatgcggttagtgggttgcctgttgggtgggagaaagtgaaacttgttgaatgtgctaatctagtaatgggacaaagtcctaaatcggaattttataataatgaagaaaaaggattaccatttcatcaaggagtaaaagattacggattaagatttccaactaattcatcttggtcaacacaaggaaatagaatagcagaagaagattctattttgtttagcgttcgcgcacctgttggtagattaaatgttgcaatagagaaattaataattggtcgtggtttagcctcaattaatcataaaaaacattggaatagttttctattatatcaacttcaaaatatcttttatgaagataatttaatgggtggaggagcaatttataattcagttactaaaaaagatgttgaaagaattgaaatattacatgctactgaagaaataaatattcaattcaaccatttgacttcaaatattgataaacaaattaaaaacttaaccaagcaaaaccaacacttaaaagaagcgcgagatattttgttaccacgtttaatgagtggtttggtagatgtggagagtttgtaggttggtgaagttttggggatggttgcagaggagtctgaaaaatataattaaaaaaataaatggctgaattactatatagtttacaaaaggtttttaccacatatccaaaaggaaaaatttataacataccagaataccagagaggttataaatggagcgaacagcaagttaaccagttactagatgatatttataaattttctttaacaagagataatgatcatttttactgtttac

SEQ ID NO: 732 - DNA, 21650 bp, synthetic construct
  misc_feature 1..21650: note = Synthetic
  source 1..21650: mol_type = other DNA
gctacagatttgcaatgaatataataataaaaaggattattaactagtatttccgcttatcattcctttcggatatttcgtagtttagtgggaatagtgtacatttgcgggagtaaaaagtgaatggaatgatgagacgatatatcaccactttgatgttggcttgctgcatcggaggatatgggcaagaaaagaagcaagccacctttgtaccaccttttgactttcctcttacattgagcggaaacttcggagaaatccgttctaatcactttcacggtggattggattttaaaacgggaggagtaatcggtaaacctgttcgtgcattggcagaaggttatatttcacgtatccgtgtgacgaatggttcgggctatgtacttgatgtctgctatcataacggttattctactatcaatcgtcatttgagcggttttatttcccctattgccgaaagggtggaaaaactgcaatatgaaaatgaaaactgggaagtagagattatccccgaaccggatgagtatccagtaaaagcgggacaacaaatagcatggagtgggaataccggctattcattcggaccgcatcttcatttggatgtttttgaaacggagacgggagattatgtagatcccatgccttttttcaaaacgaaaataaaagatacgcgtgctccgaaagcggacggcataatgttttttcctcaacttggtaaaggagtagtggatggtaagcaagaaaataaaatgattcttccgaacaccggacgtccggtggaagcatggggtgtgataggtacaggcatcaaggcgtatgactatatggatggagtgagcaatcattacggagtgtattctgtagtgcttacagtagatgagaaagaagtattccgcagtactgtcgatcgtttctcacaagaagaaaaccggatgattaactcttggacttgcgggcaatatctgaaatccttcatcgagccgggaaatacattacgtttattaaaggcatcgaacactaatcgtggtttggtgactattgatgaagaacgcgattatcgcttcttgtatactctgaaggacgtttttggcaatacttctaaatatagtttcacggttagggggcgaaaacaaccgcttgagccattgcaacatcgcgaaaagtatttttttgcgtgggataaggtaaactatctgcaagagccgggtttgaatctggttgttcccaaaggaatgttatatgacgatgccccccttaattatcaagtaaaagctgatagcggtgctgttgcgtttacatatcagttaaatgacaaaccgattccgcttcatgcaagctgtgaattgcgtattggcttacgtagaaagccaataactgatactacaaaatattatgtagtctgtgtcaccccgagaggaggaaaatatagtgtcggtggaaagtatgaagacggatacatgaaggcatttattcgtgaattgggaacttatacggttgccattgacacaattccgcctgaaattattcctgttaataagaagcaatggggaagaaccggaaagattatctatcgtttgaaggacaaaggaacaggtattgcatcctaccgtggaacgattgacggcgaatatgcacttttcggacgaccgaatattgtgaaatcgtattgggaatgtgtacttgatccgaagcgtgtgaagaaaggtggaaaacatatcgttgaatttacggtaactgattattgcggaaatgaaaccgtatcccgtgaaagttttatctggtaaattattaaaagaaaatcatatatgaagaaaagacttattttttgtgctgctctattcctggcggcagtggcggatactttcgcctgtactaatttaattgtcggcaagaatgcatcgactgatggttcgactatcgtttcctattctgccgactcgtatggcctgtttggagaactttatcactatcctgctgctacatatcctaaaggaaccatgttgaaagtgtacgaatgggataccggtaaatatttgggagaaatcgaacaggcacgccagacttacaatgtagtgggtaatatgaatgaatatcaagttactattggtgagacaacttttggcggacgccctgaattggctgattctacaggaattatcgactatggaagtctgatttatattggtctgcaacgttcgcgtacagctcgcgaagcgattaaggtgatgactgatttggtacagcaatacggttattacagtgaaggggaatcttttaccattgccgacccgaatgaaatttggattatggaaatgattggtaaaggtcccggtatccgtggagcagtatgggtagctgtacgtgtgccggatgactgtatctcggctcacgccaaccaatcacgcattcatcagttcgatatgaacgacaaggagaattgtatatactcgccggatgtcgtatcttttgcccgtgagaaaggctatttcagtggtgtgaataaggatttcagctttgccaatgcgtatgcaccgttggatttcggagcccgtcgtttctgtgaagctcgtgtgtggagctatttcaataaatttacagataacggtaaagattatcttccttatatagaaggaaagactaataccccaatgcctctttttgtgaagccgaagcataagctttccgtgcaggatgtaaaagacatgatgcgtgaccattatgaaggtacgcctctcgatatttccaatgatttcggggcaggtctttacaagactccctatcgtctttctcctctgaatttcaaagtaggcgaccgggaatatttcaacgaacgtccgatttccactcaacaaagcggctttgtatttgtggcgcagatgcgtgccaataaacccgatccgataggtggtgtgctttggtttggagtagatgatgcgaatatggcggtgttcacacctgtttattgctgtgcaactaaagctccggtatgttacacacgtgtggacggagctgattatatcactttctcatggaattcggctttctggattttcaattgggtgtctaatatggtttatccccgttacagtttgatgattgatgatgtacgtgcaactcaaaaagaactggaaacgactttcaataatgctcaggggggcatagaagaaatggctgccagacttttggctaaagataagtctgctgcagttgaatttttgacgaattataccaatatgacggctcagagtactttcgatacttggaaacaattaggcacattcctgattgtgaagtataacgacggagtagtgaaacgagtaaaggacggtaagtttgaacgtaattctatcggacagcctgccggtgttattcgtccggggtatccgaaagaatttctggaagaatatgtgaagcagacaggaaaaagatatgaagtgccggaataatagttgttttagttgttattaaatcatatataatgtccacatcatttctgctttgcgggtgatgtggatttttattatgttgataatcaataatgtatttgccatgtatttgtccattccaaatatttggattcttttctgctgctgcctatctttgccttattctatttcaaacaccaactactatgcgaatcatctttattatatattacttgcttatcacattactctttgtttcttgccaagagtcatcatctgttgaagtagagagggaaaagatagcctctctgttacagaagggtgacagttgccgtcaggttggtaatgaggaaaattcaatagccttctattatcgttcgttggaattagctaagcaaacgggagaacaatcgttggaagcggctgctagtgatcgtctcggaattgtttatttatatcgtgaactttattatgatgcactcgatttatttcggcaaagtgcgtcgatttatgcattgacgggagaaaatatccggttggcattggcattgcgtaatatagggcgtacgaacttggtgttgcatcattccgatagcatagcctgttattatgagcaggctattgaggtggctttccgcttggaagataagaagttactgcatactatatccaaagaactggaagctatctattcaaaggcgggattttacgattattcacctcgtctgatgttgaagtgtttggatagcgtatctgatgacgatttttccaatttgcttgcaggggagtactatatcggtatgaataatgccgaagaagcgagaatttggttgaagaaagctgttcagacgagcgatatgtatatatgttcgagtgcatatcagcttttatatgaaattgagaagagaaccaatcatccggacactgccgttaagtatgccgaatattatatccagtgtaaagattcgcttgataaacagatttcggtttcttcgacgattcgtgctttaggacagaattatgaaaaagaacgtcttaaatgggagaatcagcaattgcagaatgagcaacttcgaaagcgtatgtattatttgatcattctgtcaatttcatgttgcttgctggtagtagggttggttttgtattatcgggagaagtggaagaaagagaaggtattggctggtgttatgaaacgtttacgtgacaatgagcgtcaaatagagaattacacagctgtaatagaaaagaataggcgtattatcagtgatttgaaaggaactcagcagaagaatgcgttactgttacgtgaagaaaagaacaaatctataaattatgagaatctgcaacatgagaatttgttgttgatgaaacaactgcatatattgcattccgatagggaaggattgttacagcaacttcaaatgggaaccaactcatctatttcttcacaacggattaccgctttcacacaactttggctattgaaaagtgaaccttattatggaatcatagagacacaagaagaatggaaccgattgtttgaactcattgacctgttttatgggaatatttccgccagactgaatggttgtgagttattgagagagcatgacagaagaatctgttatttgcttcatgccgggcttgacaattcagctttagggatattattcaatatagataatacttctgtgactaaatccaagcaacgtataaagaaaaaactgggactgggccctaacgatgtgctggaaacatttcttaatgagaataaaaaatagtatatagattgtttcactttaaatataaaacagccatgaaaagactattatttacctttttagctttatgccttgccgttgccggttcggctcagtcggggcagatgacttccaaactgccgactattgatatcactaaggaatatccgaaaaagaaattagtattgcaagatattgcaactgctgaatacattccgctggaaacatcggataaagtattgctggacggagtggctactctgcattgttcatttaccgaacactatataacaacgtataatgccaatgaagggcaaatcttcgtattcgacagaaaagggaaaatatgccatacatttaatcataaaggagggagtggggaagaatacaactatcctttgcagttacgcttggacgaaaaggctaaagagttgtttctgcttgacatatctaataaaatacaggtctattcgatagagggaaaatacaagcgttctttgtctatccccaaagatgtacggattgaaattatgtacaattgtgatgagcaacatctgttgggttacgatagttatatgttggatagaaaagataaacagcccaatagtcgtccctatttactgatttcgaaaaagaacggagctgtttcccgccttccggtaactatccacaaacgtgtgggaaaacgcatttatattactcaagggggacagacggctaccgtttcaatgtctctctatccgttagcaaatagcggttcggagtttatctttgcagatttggcaggtgatactgtttattcttattgtaatcataagttgaccccgttgtttgtacgtactccgaaagcagatgcttccgagccaagactcgttatgcaatgttatgccaagattgggaactatctgttaatgtcgactgcattgaaaaagtatgaaccggggaaaacttcgtttgataccaaagaatttgtttatgatacggttgagaagaaagtatatgatttggaatttgagaatcaagactattcgcccgcccgttcaatgcgaatgggaggcgtattatcggcattacctgaaaaatgtgttttcgattcgtgggatactgaccgtttattggatatgttggagaaaggaaagttgacgggaaacttgaagaaggtggcggagaagatgacagtagatgataatcctttactcatattgtacaaattcaaatgaaacgtagatgaagattatatggttctttttctccttgtgtctgctggtaggatgtaaacgttcggatgtggcggtatcggtggaacaaacgttgccggtgatagatttgaatgctgcttatcctgaaaagaaactggatttggcagaggtggcgagtcctgaatatattcctttgtatacagtcggggcggattcattagatagatatagtctgacttcagcgagtgtttcgccccattgggtagtagcttataattggcagcagacaattatggtttttgaacgggcaaccggaaaacttcgttatcgttttaatcatcagggacagcaaaaagaacaatattattatatattctcggtgtttgtagatgaagaacgtgaagaaatatatgtagtcggttcagttttcaaaatccaggtttatagcctgtccggcaactataagcgtacgttgaatcttccctatgatatgtctttcgaacaggtgtttgattatgataaagattcattgatatttaacgacggaagggaagatgtagataatcctgtccaaaaaggaacttattattatttaatgtcgaaaactgacggaggaatgcgtcctttgccttttcatgtaaagtatcgtattacgaaccgctttcgcatccgactaaggaatggagacaggcaaggggtaatttcctgtatgttttccgtaaagccattgttgaagaatggtgatgaagtgatattatccgaattttccaatgacaccgttttctcttatgggaaagaaggagcgaaacctttgttggtacgtactccggctccccgttctacttttcctttgaagttaatgtcagtttcagcttgtagcaggcgttttctgtttttggatgtgatagagaaagtgtatagacggaatatcaagaagttggacggagactcgtttgtctacgattaccgcgaaaaggagatctttactccggtattggtcaatagtgattttatccctgaactgccggttgagatagataatatgaacggaagttttccgaaatatgccggtgcgtcttctattcattcccgggagtttatgcagtactatcggaaaggaaatttacaggggcgggcatgtgaagcggcctcttgcttgacaagagatgatatttatgttttagtgctgtatcattttaactgaatagagccggtaaatgtattcttacggttattattttgaggaaaaatgtaggatttataaacttattattttacatttgtgtgctcaagaaatagatagtaataattcattaaccaataaacaataatcgagatggaaaatcaggaacttattaaacaggtcactgaaaaagccgaaaaatggttgaccccggcatacgatgctgaaactcaggctgaagtgaagcgaatgttggaaaacgatgataaaaccgaattaatagaagcattctacaaagacctcgaatttggtaccggtggtttacgcggtatcatgggcgtaggtagcaaccgtatgaacatctatacggtaggtgccgctacacaaggtctttctaattatttgaagaagaactttaaagatctgccgcagatttctgttgtggttggtcacgactgccgtaacaacagccgtttgtttgcggagacctctgccaatattttctctgccaacggtatcaaagtatatctgttcgacgatatgcgtcctactcccgaaatgtcttttgctatccgtcacctcggttgccagagcggtatcatcctgactgcttctcacaacccgaaggaatataatggttacaaagcatactgggatgacggtgcgcaagtactggctccgcacgataaaggtatcatcgacgaagtaaacgctattgcctctgctgctgatatcaaattccaaggcaatccggatttgattcagattatcggtgaagatatagacaaagtttatctggacatggtgaagacagtttctattgatccggaagcaatcgctcgccacaaagacatgaagattgtttatactccgattcacggtacaggtatgatgttgattccgcgtgctttgaagatgtggggatttgaaaatgtgtttactgttcccgaacagatgattaaggacggtaacttcccgactgtcatctctccgaacccggaaaatgccgaagctctttctatggctgtgaatctggctaaagaaattgatgcagacctcgttatggcttccgacccggatgcagaccgtgtaggtatcgcttgtaaggatgataaaggtgaatgggtgctgattaacggtaatcagacttgtatgatgtatctttactatattctcactcaatacaaacaactgggtaagattaaaggtaatgagttctgtgtgaagacaatcgtaactacggaacttatcaagaagattgctgataagaataacattgaaatgctcgactgctacaccggattcaaatggattgcacgtgaaatccgtctgcgtgaaggtaagaagaaatacattggaggcggtgaagagagctatggtttccttgccgaagacttcgttcgtgataaagacgcggtatcagcctgctgcttgattgcagaagttgctgcatgggcaaaagataacggtaagtcattgtatcaattgttgctggatatctatgtagaatacggattctctaaagaatttactgtgaacgtagtgaaaccgggcaagagtggtgctgaagaaatcaaagctatgatggaaaacttccgtgctaatcctccgaaagaattgggtggttcgaaagtgattctgagtaaagactataagactttgaaacaaacagacgataaaggtaatgtaactgctattgatatgccggaaccgtctaatgtcctgcaatatttcacagaagacggcagcaaagtttctgttcgtccttcaggtacagaaccgaagatcaaattctatatggaagtacaaggtgaaatgggttgccgtaactgttatgcttctgccgagtctgctgcaatggaaaagattgaagcagtgaagaagtcattgggtatctgatcctatttcttctgatagttcagaataaataataaatagcgcctccatagtcttttcgaagattgtggaggcgcttctttatattgtcctgcatctgtttcccactattcaagccggtttagtacagttctttcatttcctttgcattctttaagtcccctttctaatcattcttccgggaatcttgttgtattggcatcatctcaatttaagcacgcaggctacggatatacacacttttgttgatgctttagagtgatacgctaagtttcattttcgtaagttgttcgtttgtagtttgtgtgtatttcgtggcctgctttttggtatccctatagtacaacttttgggtcataaagatataaaaaagcccccgtaaaaggacgagggcaacctaatgttttcacaacggaataatccttattgtgatttgcttcaaattagtttagcaaagataatgaaataatttggtatatcactttttttgtaggaaaaaagtgatatatttgatggaaattgtaaaaacacacaaatatgaaaaaaatattaggattggatttgggaaccaatagtatcggatgggctgtcgtctgtcatagcgatacggacggacaaactgaacgtaaatggattgaaatggctggtagtagaataattccgatggatgctgctattctcggtgattttgacaaagggaattccaaatctcaaacttcagagagaacaggctttcgtggaatacgtcgattgcgagaacgtgttctgttgcgtagggaaagattgcataaggtattaaaacttataggatttttgccacaacattatatcgatagtcttgattttagtaatcattcgggcaagtttcaattaggtactgaggttaaacttccttggaggaaaaatgaaataggaaaatatgaatttctttttcagaattcttttaatgaaatgctggcagattttgctaaaaaacaacctgagttagttgcaatggggcgaaaggttccttatgattggacaatttattatttgcgaaaaaaggctttgagtgagaaaattactaaagaagaactggcatggattcttttaaactttaaccaaaagcgaggatattatcaattgcgtggtgaagaggaagaagaaaaaaagaatagattggaggatttttatgcgttgaaagttgtagaagtagaacaaacagacgataagaaagggaaggatatttggtataatgttcatttagagaatgggtggatatatcgtcgaagtagtaacgttccattggattggaaagataaaattaaagaatttatcgtaacgacggaactaaatgaagatggtaccccaaaagtggacaaagatggttgtgtgaaacgttcttttcggatgcctaaagaagatgactggaagttgcttaaaaagaaaaccgaagcagatattgaaagaagccataagacaataggatgttatatttacgatactttgcttcaaagcccccagcaaaaaataaaaggaaaattagtccgaacaattgaacgtaagttttataaagacgagttgaagctaattttggataaacagcaagcttttcacccggagttgcaagatagagaattatataaagcctgtcttgatgtactttacccaatgaatgtggctcacaaaaacaatgtggctaatcggggatttgtttatttgttcatggaagatatccttttttaccagcgaccgctgaaaagtaaaaagtcactgattgataactgcccttatgaagaaaatcaatatatagatgtgactacaggtgagattaagaaggcgccaattaagtgcattgcaaaatcgcatcctctctatcaggaatttcggttgtggcaatttattgctaatatccgtatttatcaaaaagagaaaaaggtggatggcaaattattgacggatattgatgtcactacagaatatttaagttcgaaagatgattatgtagcgttgtatgaatggctttgcgttcgaaaggaaatagagcaaaagacttttcttaagtatcccgcatttggcttgaaaaaggagattgaaaattataggtggaattatgtagaagggaaatcatacccttgtaatgaaacccggagtttgattttacattatttggaaatattcttaaccatcttaaaaatatacacttaaatattttataatcaatatattataagaaaggtaattttaatggagaaacaaataaggaacaaaaataggaattaaagtgatttctcatttttctatttgcactctgtttctttcttttcgtttgtttgctttcagagtgcattccgagcaattttatctgctctcatcattcgaagaatttgctcctaactttaactaacaaattatttgcagctcataaagagaatacaaattattatctcttgaagttgtattgcttgtagcaaagataatcttttttgtacaggcagccaaaaatgcctgcctatatttagtttaatttagtttagcatatataaggctaacaaactaaaccaaactggattttcatgttactttttgtgattttcccattctacccatacagccaaaagagaagataagctcttgcctcttttctcttttcgctgcgatactcttttacttcatagccaccttttacacacatccgtaccgagcaaactcccacatgctcgcatatcaactttcggtctgcccgatgggaattgtgtcgcaaaggtatttgccatgtctttattgtatgcaaggttgtaacctgaaggttcactacaaaatctccacgctccgcttcgcagaggtagtattttgtagtgaaaccctgcatacatagccatgccacctgttgaagcgacataatttcaatcaagcccgaaagtaagtgaaatgctacaggagggaaagtaacaaacttaaaacttggtatttatggcaaattatgcaaccaacattttccacgcaagaacggaaaataaaacagacctcgacaaaatagaggctttcttggatgacactttcagcgaatttaccaatcgatatggtgatagtgtagatgcagaattttcctctcgttgggtgtatccagaagaagaaatcaaaaaattggtagaatcgttggaggacaaagataaagtctatatcaagattctaacctatgaatttgaagacgagtacgtgagctttagaatattctctcagggagaatggaaggtcaaattaataactgaatgagtagaagaagataaagtaaaattatggtctatcctacactttgcttattctataagagacacacggatggaacgattgtcggtgatttcgacaacaaaatcactgttcgtttcatctgtggcaaagagagagtattaaatactgtgatgaagtaatttttacaattttacaacatagaaaccatgacacagatagcaatgaaattcgtccaatgggatgtgcccgaattggaaaaactgaaagatagcaaggtttacaaattacgggaacgtcttgataatggcgacaagttgagtcgggaagaaaagaactggctcacccgcaatgtgaaagagtgctgccatttcaaaagaggtatcgctttaatgggctaccgttttgacttctccgatgttctcaaacggtatttcgtgaaacaacacggacatattgccgaatattataccattgacaaaaccgcactacgttctgtcctatatggtcgaattgaagatataatcgaagtacaataaaaatcaaaagaagcatgaaagtaacaattgaacacagcttttgcccctattgtgacgaggtaactgaactttatttccgaatcattaacacgattcttttttctggcaatgaggcggaattgcgtgaaagcatgagacagttggagaaaaaaactccacttgatgaatatttcacatacggttacggtgcacgacacctttgggtttgccagcgacgtcccagcgacaaaaccaaaatattcgagcatcgtattatgatggttgaatttcaatgacaccttggacaaatatcatcgactggctggaatggaatcacccatttcagccttacttccattttccttttataactttttcttttggctgcgccactcccttttgtagaaaccagccattcgcacaaagcgaattggaaaccactttgtgaaaagtctggttcttcctgccgtttttccttccagttccattttttttcgatgcggatatcactatcctccaaggatgggctacctacgcttctgtccactcttggctgacacattccttatgcagtggccttttttctgattggatggtattctgtttgttacagtctcaattcaagccaggcatgtctcgctttggctttgctattcttcactgactttcggacggatgtctcgcctttgtgccgacatttggatttgctctttttccttatcattaccggtttacttgtttcccattttccataatcgctttttatcgaagcaatcatcatttttcctctgcaaagatagtatgccgacgggaacgacatggttgtcttgaccaatggcgtagccgcttcaatcttcctttatcgagccttcgattttacctgtggctaaaaataaagcgtattgacgcgctatccttggtgcatcccttaaacgacatctactttttaggcagtgtaaaaattgatttaataacttctaaaagcaattcaacatgaaaaagattgaaaacaatttcacagtaaccggattcttaggtaaagacgctgaaatccgagagttcaccaacagcagtgtcgcacgtttcccattggccgtaagccgtcaggaaaggaatgccgaggaaaccaaccgcatttcagcctttatgaatattgaggcttggcgtaaaaacgagaatactgggtcattcgaccaactgaccaaaggtacgatgctcaccattgaaggctactttaagcctgaagagtggaccgacaaggtcggtgtgaagcacaatcgtgttgttatggtggctgtcaagttttatcctcctatcgaaaaggaggatgttcctgaaaagccggtaaagcccgtgaaaaaaggcaaaaaataattcttgccttatcatgaacaaagcgatcttttggtcgcttttgttttgctcatgaccggattaatacgcatcatacttttataagtgactgttgcgatgccaagctccaaatgaaatcttcacccggtaatactgttatacttagctccacttgatgaacaggcagattacgattttcaatagaaaaaagaagactctctcaattccatacctctgagcagctttccagtccctcttataaccatatttcttcccaaaagtgaggttacgtccgccgtccattaattttacagtgcgaagttaagtcggacgtgaacctgcaaggcgcgtttcatttgcagtcaatgccgttcaaatgaaatccttcggattccgcttcctccttgcattgttcccttcttccgccttgtggtttgcacgtaaaatcaaatcccaccggacgaggtaaaagcctctgaagggaagggaaaataaaaaattagaatgtatgaaacaaataatttggtcaagtgatgctctattggatgaaacagcaagagagtattatcaaaatttcaagcgagaagaactggacgatgatgcctacaaggtcagcgatgaagagtggtcggacgaagtgtataatgaattgggggatgagcggcagaacctaaacaaggatgtcaatggagtcattattgcatttggagatttaggattgtggaacggacgcaaacaaggctatcaaattttgggtgacaacattgccgggatattacaatctacacagtatgatgcagagtggtacggtgacggctacgatatacgaggccgtatgtcgcaccatgatggcacgaattatgttttgtaccgtgtcgctgaaaatcgtgacgacgcagaacggattgccgcaaaaatctacaactatgaaattgacgagaatggttttcgccaagttacacgttccctccacccctatgtggccgcagtgtatggctggaaaactctacaggacaacctcgttcaggtaaaatagcctgtaacctgtacttaaacaaatgccgtaacgctttctcaagaggctgttacggcacttgtgttttatgccgtatatattctgcataaaatgtggtgggaaactattcctttttacacatttatgaatgttcccgcccaactgttgtaggtggccgcttgtgccagtttccttttttagactccggccctcctttatagccccatccagctacccccctatatttctatcccgcaagcctggttatttccctgcaaaattcgattgccggctgtccgtcctgtcaaggaccgctgacacttgctgctgtaaaatcttcctctccgaaatatcgaagagtgtattttccgcatcctccttgcccgttctggccgccaatcccgtgggcagaaaaataatcaacctttcggtacaggaagtatcgaagggaaataaataaaatattaatcttaaaatttgaggcattatgacattcagagaatttatgttagagaacggttatgaattgcaaacaaccttttggaatgatttttccattgctgaccgatttggtctttcggcgatacaggacactttcaaccgtgcttttgaggagtggaaagagaactacaagtatctcacggaactggttttagtgcttaaccataagatatggcagtattatgaaacaaggccggaaattgcgacattgtataataccctttgggcacaagccagtcaatatgcaatggagtatctgaaagatgacgagctaagctattattatgatgtaacggattaaatgtcccagctcctcccacaggaacaaaagaaagccggcttttgtcggctgctctttgtggtcattcccttttttatcactccgttttacccttgtataaaacgaaattatttcgtttcaggctgctaccagtcaggacttgttttttcctgtgcaaaggtattgccacggaaaaacattcaagtaccgctacgctatttgaacacaatttttcagtagctttcccgattttcaatcgctcaaatgtcgtatacgctccataccgcaactgtaaaaattctgtccaaattccttgcctgcttttccttaaaggcaatcttgaatgcacgtaaaaatcaaatcccgactggagaagcctaaaggcttccgaaaaaagggaaaaaaagaacatgatgtttaatagctaaattttaaaagtatggaaattcaatttgtgattgttcgttcagaaaatgcagagtatttgtgtcacaatgtaaatggaacgtatgtggatgtcagcgacccatcaacagaatttgtttctggagaggatgattttcgcttggtagagccggacagctccctaacgcggaaagaatacgagtttcgtggagaacgcttttatctcatgcctcaattttatggcaatggctggttagcacttactttgcaaagtgtggaagatgaaacagagtatatcgtgctatccgtcaatttggagagcatggatgcactcgatttgccagaccgtacatttattgatgtgaatcattatccggatgcaatggagtttctggagacaaataatttagcgacctattcaggttacaagcgtagaagcggatttgtggaatatccaatggcggtattgaatcttcctttgctttatcagcacgccccgcagattttccaagaggcgaatatcgaatgtttttaaatggttttctgaaagtatggtactgatgactaccaaagagataccgtatcggttaaatcctatcggtatggtatcttcttttgcccgaagacaggtggcatcccccttttttacagattgctccgtgcccacttttttaatttccttgtttcccttttatagcagcgtaactgcctgcttctcttttacagcccttatgtaatgaatgttgatgtttcctgtcgttatccagactttcgcccggtcttgttttcgtgtgcaaaattacggcgaacgaacgctatccaagtatcgctacgctatccgaaatgaaatttgacgtaatcttcctaaatcatagatttcggtattcataaaatttcatttccgattccttgcactgcgttcctgcttcgtcgtttgggacgcacatgaaaaacaacccttccggcaaagtcgaaagacttgaaaaaagggaaaataaaaaacttaattaaaaacgaaaacgagtatgacaatagaagaagtattacagcacgatttaaaattcaggtatatgttattggggcgtttgcaagccgactgtgaatattatcttggctttggaaacaaaagttctcgtcgtttgtgggctggttctgaaaaggcacaaattgaatacatgacgaaaattcacgacagcttccgagaaaacgaaaaacccgaatggctgacaatggagcaaatcaaagaatacagcaatgctatggaagtaacacaagaataattcaaaaaaaataccgtaataacctttaacggaggtgttgcggtattacagtattacaaataagggtcggagtttgagaacataccctcttataattgagagggtaataatagtccctcttttataattatatcattctattccttttttatatttctgcaaaaggaatagcattcttcttttatattaattatttttcattttatctcccatctattcttcatcctatcaccggtttggttttatcaaatgcaaaggtcggctatcgcgcttgatcctgctacttgaagtgtatttcttacaaaattcttccttcctgcgcaagagtaatttggcaagaaaagttgccgtatgaagctgtatcgacatccgtttaccgcatccataaatcccaaaacggttcaatcagtaaagaaccgacaatatgggaaataaaagttaatactaaccaattctttaaacattaaaatcatgcctaattatgtaacaaaccgtttagaaataaacgcagacagagaaacagtacaaaatgtgatggatttcttaaaaggaaaaactgatgaagacagtacgccttgctatattgacttcaacaacattatccctatgccaaaggacttactgatagaagcgtccacttctggggaatttggtatgcagtatatcatagcacagcaacgtaaaccgttcaattcacaggacgacctgaaagtcattcaatggatggaaattcaggaggaaaaagtcagggaagaagcattacaacttggaatgacatatctgagaaactggggaaaatacggttatcctacttggtatgaatggtctattgccaactggggtacaaaatggaatgcctttaatcagaattttgaagaaccgaacgtgctttggtttgatacggcttgggaaggtgtgcctctgcttatccaaacactctccgagatatttccggacgtcgagtttcaatatgcctatgcggatgaagaccttggttccaacgtgggcaaagggactatccgaaatggagaaaccgacatgacattccccgataacggaagtaacgaagcctttgaaattgtctttttcgtaaaaccgggattagaggaatacttggaactgacagacgaggggtataggtggaaagcctaaacatctccggacagacaatatctgacatgtattcagggtatatctcaaccgatatatcctggattcctgttgccggaagctccgtttatatttattccattccacttcctttttacaatttcacgcctcttgaaccagtcttttttgaccgtatttacccatcccttggctggcctacttatcatctttgaagctgcttttactgaaaccgccaaacacgcccttcaagagcttgccgacaacccagaataccagcaatacaattataatatctcccataagtcttacttttatagttttaacaataataaaaatacaaaataataaccgaaaaacaaatatacgatcctgattatctgaaaattctatcaggagttaccttcatttgttccgtcctctttcgggttctgtttgacacgcggaccgctggtttggccacgatcaagttttacgccatatttattgagtatgcgccaaatagaacttttgctgctaaaaccgcttgcagcccaaatgtcatcgaaagaatgcccgttgatatacatatccacgattgtcttatctcgttcagctttaggtaataccttcggcacagccggggctttgatattctggcgtaacttctcgacatgagcggaatattttcgtagtgcggcaatttcttccggaaatgcccctattatccacaacacatcggctgctgtcgtaccggggaataattcaccgcgagtatcaactctgtcatgaatggatatgacacgtacaattttgatacggcatagttcgatgaacgcggccagttctcttaaaccgcgtgcagcattgctgaatttggatatgactatttcatcgcccctttgaagattcgccataagctgtttccacataggtctcaatgtttcatgttcaactgtttcctctacgatttgtacacaaccatatcgctgcatccattctctctcagcatcaaaactgtcattattttccttgaatatatagccaacttttgccattttaatatacactgttttgataacaagtgcaaatatagcactttcattttaatctaaaatcatatcgtggcaaaaatctcgctaaatcctttttttagctttttttcttgcacttgttttcattgataatcatattattaatatgataccaaaaattatactaaatgcgatataaaagggcttttacaataaaaataatatatagatttgcatcgttaaatatgaattgttaaatatgaaaattttaaaatcatactacaagactccatcatttttgactggaagatgtatcgtttcattggccatattgggcctgatatcatgcagcgatagaaatggcaaatcattgtctgaagctacgaacgatcctgccggaatatacagggagtacttgtacaatatacgacgtcagaaagattcctcatttcaagtattgaccaagcatatcctacaatggcaaacagtaaaagactctgtttttaggtatctccggaatgatacgctcagccacccccattccaatcagcgtgaagagtgtatcagactgcatgattctatccgcactgagttctcacgcttagccctctcaaagacgcgtacttatcaggaacttttggctctcaaaggagagttctcaccttataacaatgatgaggaactgcatcatgccgctggagaaatccgcccgtttttcaactcactggataatcttccgcttcataagggtaacaaagaggaaatccttgcggcttaccgtatgttactgacccgaactatccgtaacggcatacatagccgcaatgaactgattacttatatcactaaagaagatgctatattccgtgcgttcctctctcacttgcacgatttcgaaggtgagagtatggctgacatcacacgtggtactgaacagtgttgttcgcagatattctttgccgctgagagaaaggagattacctatcgggaggctatgctttatttgacaatgcgcaccaatcgtcgccaaatacaaaatatgcagatttgtatagaagatgttcggaacaaaaaaatcaagacttcttcgcaagcacatgcttatatatggatgcttatccacccttatacttcattggacggattctctatgacattgctttccgataaagaacggaaacaacttgacaggatggcggcacagacacctgtggcgttcaaaaccttgagccgaatcctgcaatcggaaagtggtcaactgactgaactgccaggaatgcttatggatattttcatacagacgctctaacaatataaaaaatgaatatgttacgacattttttcaatgactttatgacatttgtccctctgcaactaccgcaactactcgatgtgacgacaatggaggaagcacaattctacggtgactacgccctactgaccttcccgctacgcgccccttacga

SEQ ID NO: 733 - DNA, 21524 bp, synthetic construct
  misc_feature 1..21524: note = Synthetic
  source 1..21524: mol_type = other DNA
tgcccgccgccagatagaagaaatcatggagcgttcggcccgcaaggaggagtggaagaacaagcagcagggattgcaggaagagcagcgcatccttacctcgcactacacagaaatctctaccaagtacaagtcgctcatccagagcctcgacgagcagtggaaccgcatccacgaggccaaaatcaagcagcttgagggactgaacaacacgttcaatgcccgcatcgaagaagcccgccgtcagcacgaagcggctaccgaagcgctttaccaggaatacgaacaactctcccagcaactgcatccggagcgtagcagcaagcagaacgaactgaccgccctcgactaccagatgcagctgtgccgcaaggagactttcttcgaagccgagcaggaggagctgaaacaccgcatccagtcgtacacgggtctgcacatgagcaagaagaaccgcatcaacaacgcccagctcatcatcaaggaactcacgctgaagtgggaagaagagttgcagaagggactgaaggagaaagacgaggcactgatgcagttgcaagccgagcacttgcaactccgcccgcgtatggacgaactggagaccttcctgaaaaacagcaagagcaccctgcaaggctggctcaaagagcacaagaaaggatgggaagaaaacatcggtaagctgtgcgacgagtccatcctctggcagaccaacctctcgccgaagattgtagacgagggtacgtcgttctacggcatctccatctccctgcaagacatcgagcgccacatccgctccatcgacgactatcaggcggaacatgacaagggcatcaagcgactggcggaaattcaggctgaaaccctccgtctgcaacaggagaaagaggtcctggaagagcagttgaaagccaaataccagccgcgcatcaaggaacagaaagacgtgatagccgtgcaggaatacgagctggagaaactggaacagcagtaccagaaggatatgctcgacctggacgactggaagaagaaggcggaagccgaacgtactgccaaactccggaaactggaagaggaaaagcaacgcatcgccgcagaactgaaggaaattgacggcaaactgaacaacctgaaccgcgaaaagagcgagaagctgaaccagctgaagcaggaatggaaccgagtgcagcaggacatcgcgcacgagaaggatacacaggccggcagcatccgcctggaggataaggaagaacagcagcgcatcgccacggagaaagccgaatacgagcgccagatgaagcaggaactgcactcgcagggggccgacaccgaacgtctgcaacagattagcagtcagttgcgcgatatcgaccgggaactgcagttcatcaaggagcacgccaccctgctcatcgagtaccagaaggacaagcgcgacctcatcgaccacattccggaatggaagcgtgaacaggaggaacagaaacgccagctcagccaggaaaaggacaacctgcgacgggaaacctcgggtttgcaggagcagattgatgccctgaacaaggaactgcagcaggcagagaaggaagtgacacagcttcaggccaacctggaggcgtacagcaagatttcggcctacgactggtacaagccgcatcaggatattttcaatcccgagaaccccgtcacgctggaaatccacacgccgcgcacctgtctggaactgattgacgaactgggccgcacggacagccagtacatgacgctgcaaaaccgtctgcgcaaggaggtgaatctctttaccggccacttcgacgaggagaataccttcaagttcaagaccaagtttaccgaggactgggagtatatccgctttgccgaggaactgcacgacttcgtggaagagaacaaaatcagcgaattcgtccgccgcatcaacaacgagcactccgacatcttcaagcgcatcagcatggatacctcaatgctcacggcttcggaagacgatattcaggacctcatcggtcaggtgaacaagggattccagacgtgcaacttcgtgggcgttatccagtgcatcgaaatgaaggtggaagaaagcagcaaccgtgtggtaaactgtctgcgtgccatccagaagtactataacgagcatgcctatgacctcacgccgggcaccaacctcttctcgtcggaaaacgagcagctggtgaagcaggaggccatcgccctgctccgcgacttcatcaaggagattcacgcctaccgctacgacagcatccgcctgtacgactcgttcgagctgcgtttccgcatcatcgagaacaacaacgacacgggcttcgtggagaaactgtcgaacgtgggttcggaaggtaccgacattctggtgaaggccatgatcaacatcatgttgctgaacgtgttcaaggaaggggcttcgcgcaagttcaaggacttcaaactgcactgtatgatggacgaaatcggtaagctccatccgaacaacgtgaacggtatcctgaagtttgccaacgaccggaacatcatcctcatcaacggatcgcctaccgaactgaaccgcgatgcctacaagcatgtgtacctgcttaccaaaggagcgcagagcaagacacgcatcgcccgacttatttcggaccagaaattataggcttttcaacctttaaaacagggttgaaaaaacgcctttgtgttttaacttaaacgcctttacgttttaggtaaaacgcaagggcgttttactttaaatgcacttgcgtttgaaagcaaacgcttaggcgttttagaagtgcttaccatgattccaaataatagaattttattttacaaatcagaattttattcttatctttgccacatgacaatcgagtgaatctaatgagaatatttacagaacaagctataaaagaatatgcagaagcgcatcctgatgcaaaagtagctttgcaagaatggactaccatagttaaaagaagcgaatggacttgctttgcagacgtaaaaaagacctttaatagcgtagataatgtgggtaaccaacattatgtattcaatatcaaaggcaatagctacagactgattgtagtgataaaattcactataaagttcgtttatattcgttttataggcactcatgccgagtatgataagatagctgattgttcagttttataattaaacagaatcggcaattaccgatcaaccaagagccatgacaaagatagaaacaaaagctcaatacgattgggcagtaaaaagagttgaggaattacttccactggttacagatgaaacccctctggataatcctcacagtatagagttggaattactttctaatctcgttgcagattattctgaagaacatttcgcactgggagaaccaacgctggttgatgtcctcaaacttcgtatgtatgagatgggacttaatcagaaatctttagcaaaattaatcggagtcagtccttcacgcttgagtgattatatttccggtaaatgtgaaccgaccttgaaagtagcccgcgaaatcagccagaaattgaatattgacgccaatatagtactgggtgtttaatatgagtatagaaaacagaaaaaccgcctaattcacaatgtaataagcggttttaagtcggagccgaaagcgggactcgaacccgcgacttactcattacgaatgagttactctaccaactgagttatttcggcaacgtgtttcgttgaaaacggttgcaaaattactgttttcttgaaaacagccaaataaaaaagagatttttttccgagaaactacatttttccagcccgtacaacccgtttccgttacatcgcaggagcatttgacacattattacgtgtaatttgtacaatagtcccttgtctgccttctgccgattttctacttttacccgcaaaatgaaacattacactaccatgaaaaagaaactgataatttcactgctggcactggcttcgctgggagccggagcacaaaacttgcaaaagggagactacggatacttgtactgccacatgagcggacgaggagaatggacggcctacgccctgagccgtgatggcgtacactttcacgacctgattgatggcgaccccgtatacaatgtagaagaaatgtcaaaaatagagggaggagcacgcgatgcctttatctgccgcacgtccgacggaaaaggctatctgatggtgactaccgacatgagcaacgccaagagccgctcgtggttcaactacggcatcaacctgctgaaaagtgacgacctgattcactggacttctaccaccttcgacttccgccggggaccggacattttctgtgaccctcagtcgcccgacgtctataaggactacagcaccatcaaacgcgtatgggcaccgcaaattttctgggacccttcgtacgtatggactgatggcacgaagggcggatacatgatatactattcactgcttaatccggcagaagaccagtacgaccgcgtgttctattcctatgccgacgccacctttacacgtctcactaaaccccgcctgctggtggactggggatatgctaccatcgatgccgacattaactatgtgccggccgacggactctatcacatgctcatcaagaaagaaggaggtacacccggcatctttgccgctacagctacaaaactgaccggtctttataaaataaaagatgaaaacgattatgtgaagtttgaaggcaacaaaaagtgtgagggctgctctgccttccagttgatgggcgactctacctggcgcgtggcctacatcgaatactcctccaaacccaaaagataccgcatctgtcaggccgacgagaaactctccaacttccactcccccgtcaccatggagggcgtgaaacatccgcagcacggctcgttcatgcggctcaccgaagaagaatacaagcgcctgcaggagtggtcggacagcatcatgcgcgaaagagccgcccgccacagcggagaaaagaagtaaaaagaggaaaatgaaatatttttgtaaaaacttttggcaaacatcctttcatttgagcagaaaacattatctttgcactccgaattatgacgtgacaaaagagtttgatgtattactgttcaacacatagtaaaaagaataagcgcacattcggagttccggcgaaatggacaaatgccggaagctatttcttttttcttttatgtcacttatttcctgaatatttaagatttcctattttttcaaacacccggaactgcttttcggcaagtccgggcgttttttcgtatatacgagagtagaatagaaaaaaaatacaagatataaagattattagtaacaaggtaatgagaaatgtaacattgatcctcgacgacgggagccgctttcatggcaagtcgttcggctatgagaaaccggtagccggtgaagtagttttcaatacggcaatgaccggataccccgaaagcttgaccgacccttcgtatgccggtcagttgatgacactgacttacccgctggtaggtaactatggtgtgcctcccttcacattcgaagcaaacggactgcccactttcatggaaagcgagaaaatccatgccgaagcgattatcgtaagcgattacagtgaaaaatactctcactggaatgcagtggaaagtctgggcgactggttgaaacgcgaacagattccgggcatcacgggcatcgacacacgcgaactgacaaaggtattgcgcgaacatggagtgatgatgggaaaaatcgtgttcgacgatgaaccaaataacattcccgaagctacctatgcaggtgtgaactacgtagacaaggtttcttgcaaggaagtgattcgctacaacgaaggcgaaggcaagaaaaaagttgtgctggtagactgtggcgtgaaatcaaacattatccgttgcctgctcaagcgcgacgtggaaatcatccgcgtgccctggaactacgacttcaactctctgcagttcgacggtctgttcatctccaacggtccgggcgaccccgacacttgtgatgcagccgtacagaacatccgcaaggccatgcagaacgaaaaacttcctatcttcggtatctgtatgggtaaccagctgctttcaaaggcaggaggtgccaaaatctacaaactgaaatacggtcaccgcagccataaccagccggtacgcatggtaggcacggaaaagtgttttatcacctcacagaaccacggttatgccgtagacaacaatacactgggagccgactgggaaccgctcttcatcaacatgaacgacggttcgaacgaaggtatccgtcacaaaaagaacccctggttctcggctcagttccatccggaagctgccagcggccctaccgacacggaattcctgttcgatgagtttgtaaagttgctgtaatccactaaaaaacaaagaagacaatgaaagaaaacataaagaaagaaaacataaagaaagtattgctgttaggttcaggagccctgaaaatcggtgaagctggtgaattcgactactctggttcgcaggctctgaaagcgctgaaggaagaaggtatcgaaaccatcctgattaacccgaacatcgccaccgtgcagacttcggaaggtgtggcagacaaaatctacttcttgcccgttactccgtatttcgtagaaaaggtcatcgacaaggaacgtcccgacggcgtgctgctgtcattcggtggacagactgccttgaactgcggtgtggctctctacaaagccggtgtgttcgagaaatacaacacccgcgtactgggtactccggtacaggccatcatggatacggaagaccgtgagctcttcgtacagaaactggacgaaatcaacgtgaagaccatcaagagtgaggcggtagaaaacatcgaagatgcccgccgtgcagcgaaggaactgggttatccggtcatcatccgtgcagcttacgcactgggaggtctgggttcaggtttctgcgacaacgaagaagaactgaacgtgctggccgaaaaagcgttctctttctctccgcaggtgctggtagaaaagagtctgaaaggctggaaggaagtggaatacgaagtagtgcgcgaccgtttcgacaactgtatcacggtctgcaacatggaaaacttcgacccgctgggtatccacaccggtgagtctatcgttatcgctccgtcacagacgctgaccaacagcgaataccacaaactgcgcgaactggccatccgtatcatccgtcacatcggtatcgtgggtgaatgtaacgtacagtacgcgttcgaccctgaatcagaagactaccgcgtaatcgaggtaaatgcccgtctgagccgttcttctgcactggcatctaaggctacaggttatcctctggctttcgttgcagctaagttgggattgggttacggactgttcgacctgaagaactcggtaacaaaaacaacttctgccttcttcgagccggcactggactactgcgtatgtaaaattcctcgctgggacttgggtaagttccacggcgtagaccgcgaactgggctccagcatgaagtcggtaggtgaagtcatggccatcggacgtaccttcgaagaagccatccagaaaggtcttcgtatgattggtcagggcatgcacggtttcgtggaaaacaaggagctggttatcgaagacatcgacaaagcactgcgcgaaccgaccgacaagcgtatcttcgtcatctcaaaggctatgcgtgcaggctacacagtagaccaaattcacgacctcaccaagattgacaagtggttcctcgacaagctgatgaacatcatgcagacttctaaggaactccacgagtggggcaacaaccatacacagctttcacagcttccgaacgagctgctctacaaggcaaaacgtcagggattctccgacttccaggtggcacgtgccatcggctacgaaggcgatatggaagacggtatcctggaaatccgtaaccaccgtaagagtgtaggcatcgtgccggtagtaaaacagattgacacgctggcagccgaatatccggcacagaccaactacctatacctgacttacagcggcgtggccaacgatgtacactacctgggcgaccacaagagtatcgttgtactgggttcaggtgcttaccgtatcggttcatccgtagagttcgactggtgcggcgtacaggcactgaacaccatccgtaaggaaggctaccgctcagtaatgatcaactacaaccctgaaaccgtatcgaccgactacgatatgtgcgaccgtctgtacttcgacgaactgactttcgaacgtgtgatggatatcctcgacctggaaaacccgcacggagtcatcgtatctactggcggacagattccgaacaacctggcattgcgcctggacgcacagaaggtaaacatcctgggaacttctgccaagagcatcgacaacgctgaagaccgcgacaagttctcggctatgctcgaccgtatcggcgtagaccagcctgaatggagcgcactgacttctatggaagatatcaacgcatttatcgaaaaagtaggctttcctgtattggttcgcccgtcatacgtgctttctggtgcagccatgaacgtatgttctaatcaggaagagctggaacgcttcctgcagctggccgctaacgtgtcgaagaagcatccggtagtagtaagccagttcatcgaacacgctaaggaagtagaaatggatgccgtggcacagaacggtgaaatcgtagcttacgccatctctgagcacatcgagtttgccggtgtacactcaggcgacgctaccatccagttcccgccgcagaaactgtacgtagaaaccgtacgccgcatcaagcgtatctctcgtcagattgcgaaagagttgaacatctctggtccgttcaacatccagttcctggctcgtgaaaacgacatcaaggtaattgaatgtaacctgcgtgccagccgttcattcccgttcgtcagcaaggtgctgaagattaacttcatcgagctggcaaccaaagtcatgttaggcttgccggtagaaaagcctgaaaagaacctcttcgacctcgactacgtaggtatcaaggccagccagttctcgttcaaccgtttgcagaaggccgaccctgtactgggtgtagacatggcttctacaggtgaagttggctgtatcggcgacgacacttcatgtgccgtactgaaagccatgctgtctgtaggctaccgcattccggaaaagaacgtcctgatgtctaccggtacactgaaacagaaagtagatttgcttcaggcagcgcgcgccctcaaggccaaaggttacaacatcttcgctaccggcggttcttctaagttcctagcagaaaacggagtggaaaacacccgcgtatactggccaagcgaagaaggtcagcctcaggcactggaaatgctgcacaagaaagaaatcgacatggtggtaaacattccgcgtgacctcactcctaccgagttggaaaacggatacaagattcgccgtgccgcagtcgacctgaacattcctctggtaaccaatgcccgtctggcaagcgcattcatcaatgccttctgctctatgagcattgacgacatcgctatcaagagctgggacgaatacaaataatccgtaccacttaaagatatagataaaattaatcccctccggaactatttgtaatgaatgagttctggaggggatcttttatttatagaaaacataaaacaataaaaaagcccaccgataaaggacgatgggcaagcgcctaaatgttttcacaacggaataatccttattgtgatttgcttcattttagttttacaaaaataaaaagaaacaacacaaaagacaagtttttttcataaaaaattagtagttttgagaaaattgaaaaatacaactatgaaacatattttaggtttagacttaggtaccaatagtataggatgggcagttatcaatgccataaaagaagaaaacactcaaaaagaacaactcataggaatcaatactgcaggaagtagaataattccaatggatgccgcccaattaggagatttcaataaaggaaacactgtttcacaaaccgccaaccgtacacaatttcgtggggtacgccgattatatgagcgcaagaagctcagaagagaaagattgcatcgcatcctacaattattaggatttcttccaaagcattatgccagccaattagacaggtatggaaagtttatagccaattccgagcccaagctcgcttggacaacaaatacgcatgaaccttcttactttatctttcaaagctcgttccaagagatgctcaatgactttttacaaaacaacaaccaagtaaaaaaggttccatacgactggactttgttttatttgcgcaaaaaagctttgacacaaaaaattgaaaaagaagaattagcctggattttattaaatttcaaccagaaaagaggatactaccagctacgcgaagaggaaacagaaaaagcgtcttctaaaacacggcaatattttgacagccagattgtaacagatattactgacactgggcaaatttataaaggattaaaaatattcacaataacacttgaaaacggagagaaaggaaaatttttcagtaaaaacatgcctgactggaaaggtcagaaaaaagatattattgcaatcatagaccttgataaaaacgggaatgacaaatatgatgaaaatggagagttaagccgtcgtttcaaaattcctaccgaacaagaatgggaagaacagtgggagcttattaaaacaaaaactcaaaaagatcttgacacatctcataaaacagtaggcgcatacatctatgatacactattacaaactcctagccaaaagattcggggaaaattgattcgcaccattgaacgcaagtattataaagacgaattaaatcagatattaaagaaacaagaagaatttcacccagaattgcgagactccaatttattagaagcctgcatcgaagaactgtatcctaataacgaagcccatcgtaatgctattgcaaaatatagcatttcccaattgcttattgaagatattttgttctatcaacgtccacttaaaagcaaaaaatcgctcattagtaattgcccttacgaagaatacacatacaccaataaagaaacaggagaaatatgcacttcttcattaaagtgcatagctaaatcacatcctctttttcaagagttccgtctatggcaatttatatcaaacctgcgaatttatcaaaaggaaggaaccataaacgggaaatttactactgatatagatgtaacaaatcaatttctgaaaaccgaagatgactacgccaatttgttcgactggcttaatcagaaaaaagaaatcagacaagacacatttcttaaaaaccagcatttggattaaaaaagaatatagcaaattatcgctggaattatgtagaggacaagacatatccttgtaatgagactcactacaagatactgtcatattgggaaaaagcaggaatagagcaatcagccttaacatcagaaatagaagagaaactatggcatattctatactctatttctgacaagaatgaactcagaaaagctttacagcatttcgctgataaaaactatttaagcgataaatttgcagatacttttcagcaaattcctcctttcgagaaagattacggttcctattctgccaaagctatcaaaaaactattgccacttatgcgtataggaagatattggaaagcagaaaatttcgacagtacaactcttgaccgtatagaaaaaatattaactggagagtttgaagaaaacataaagaaccgaaccagagaaaaaacaatccatttggacaatttatactcatttcagggacttccaacctggctggcatgctatatcgtatataaccgccattcagagataaaggacgttactaaatggcaacaaccttcagacattgatgcttttctaaacgcattcaagcaacattctttacacaatcctattgtggaacaaatcatcatggaaaccttacgcactgtacgagatatttggaaacagacagggcatattgatgaaattcatgtcgaattaggacgtgaaatgaagaatcctgccgagaaacgcagaaaactcacccaacaaatacaagaaaacgaaaacaccaatctgcgtatcaaggcacttcttactgaatttgccaatccagaatttggaattgagaacgtacgcccgcactctccaagtcagcaagatttattgcgtatatatgaagaagaagttctaaacgaaactaaagatataccagaagatattgctgttattttaaagaaattcaatgaaattgataccaaaaaacgcccgtctacatccgatgtcttacgttataaatgctggctggaacaaaaatatcgttctccttatactggagctatgattcctttgggaaaacttttcacccctgcatacgaaattgaacatgtaattcctcaatctcgttattttgatgattcattcacaaataaagttatttgtgaagcagaagttaataaactaaaaggcaatatgttaggctatgaattcatcaaaaacaatcaagaaagaatagtagaactaggattcggacaaaacgttaaaatacaaacggttgaagcttatgagctatttgtgaaagaacattattcttacaaccgcactaaaatgcaaaagttgttgatggaggacattccaaaccagtttattgaacgtcaattaaacgacagccgttacattagcaagtttataaaatcattattatctaatatagtacgtgaagaaggagaagaagaagctacgtccaaaaatgttattgtttgcactggaagtattacataccggctaaaaaaagactggggactcaacgatgtatggaataaaatcattttacctcgtttcatgcgcttgaacgaaattacggaaagcaatcgctttacgacaaccaatgcctgcaataaaacaattcctgctatgccgttagatttacaaaagggattcaacaaaaagcgtattgaccaccgccatcatgccatggacgctattgtcatagcctgtgccaaccggaatatagtcaattatttaaataatgaatcggccagcaagaatgcaaagatttcacgtcaggacctgcgacaaatattatgcaagaaaacaaaaaccgacaatttgggaaactatcaatggctcattgacaaaccttgggatacatttacccaagatgtgtattccattttaggcaacatcattgtaagcttcaaacaaaatctgcgtattatcaataaaacaactaaccattatatccactatgaaaacggaaagaaagtaagttgctcacaaaaacaaggtgatagctgggctatccgtaagcccatgcataaagaaaccgtatatggagaaatcaacctgcgcagaacaaccactgctacattgaaagccgttcttgagaatccccaaagaattattgaaaaagacttaaagaaaaaaataaaagagcttttaacgcagggactcaatgaaaaacaaatcaaaaaatactttgaagacaataaagatatttggcaagaaataaatctaaagaagataccagtatactatttcaccaaagaaactgccaacagattctttgcttgccgtgaatcaataaatacaactttcaataaaaagaagatagaagaaaaagttgcagatacaggaatccaacaaattttactgcgccatttggagcagaatggcaataatccggaacaagccttctcacctgaaggtattgaacaaatgaataaaaatattacatccctaaataatggaaaatttcatcagccaatttataaagtcagaacatacgaacaagccgataaattcgctgttggacaaacaggaaataaatccactaagtttgtagaggcagcaaaaggtactaacttgttctttgcaatatatgaaactgctcataaacgcaactttgcgtctattccattaaatgtagttattgaaagattgaagaaaggattaccccctgcacccgaaaacgaaaaaggaaatctgcctaaatttatattatcacccaatgatttagtatatgtaccaataaaagaagaaatagaaaatggacatattaatcaaccaatacaaaaagatagaatttataaaatggtaagttgtacaggaaatcaatgtttctttatcaaatccaatgtagccaatacaattattgataaatatgaattttctccactgaataaaatggaaagagctatcacaggagaaatgataaaagaaacatgcatccctatcaaaacagatagattaggaaacattataacgtcaatcagcctatgataaagaaaacattatattttagtaacccagcatacctatcattacgtaatgcccaacttgtcataaaacttccggaagtagagaaatgttcttcacttccggaagcgatgaaacgtcaatctgaaataaccaaacctattgaagatataggtgttgttattttggataataaacaaatcaccattacgtccggagctattgaagcattgcttgaaaataattgtgcacttattacttgtgacagtaaaagtatgcctgtaggattaatgctccctctctatggaaacactacccaaaatgagcgttttcggaaacaactggatgcttctttgcctttaaagaaacaactatggcaacaaaccattcaagcaaaaatcaacaatcaagcatcttccttatccatatgtataaacgaagatataaaatgcatgcgtatatgggctaacgatgtacgaagtggagaccccgacaatctggaagcacgtgctgcagctttctactggaaaacactttttcatgacattgaaaattttacaagggaccgagatggcataccccctaataatcttttaaattatggttatgccattctccgtgcagttatcgcacgttctcttgtaacaagcggattattacccacattaggcattcaccatcataaccgatacaatgcctattgcttagcagacgatattatggaaccatatcgccccttcatagaccagctagtctatcaactatactctgaaaacaaaatggaacttacaaaagaagtaaaagccagtttattatccatccccacaatagatgtcagaatcagtgggaaaagaagtcctcttatgatagcagcaagccaaacaacggcatcactatataaatgcttttctggagaatcacgaaaaatcatttatcctgaattttaatggaacgtttcagcgaatatagagttatgtggattttagttctttttgacttaccaacagaaacaaagaaagacaaaaaagcttatactgactttcgcaaaaatctacaaaaagatggattcacaatgtttcaattctccatctatgtacgccattgtgcaagcagtgaaaatgcagctgtgcatataaaaagagtaaaatcctttctacctgaatatggtcaagttggaattatatgtatcacagacaaacagtttggagaaattgagctattttatggcaagaaagcaagtggggtaaaaacaccaggacaacaattagaactcttttaaaataataaatcccatggttaatatgggatttattatttcaagaaacaactttttctttttctaaattttcttataacctactgataaacaatataaaacaatcaacgagttgtttccagtggttcaaagatactaaaatgaaagcaaatcacaactactcttacttatgataatgaacataaaccgttgtttccagtggttcaaagatactaaaatgaaagcaaatcacaacaatcatatcaatgctacgatacggccaaatgttgtttccagtggttcaaagatactaaaatgaaagcaaatcacaactgctgcttatcgttatgcatctcgtatgggtttttccagtggttcaaagatactaaaatgaaagcaaatcacaacgatgtagttcggattgttgcggatgcaattgttgtttccagtggttcaaagatactaaaatgaaagcaaatcacaacttggtgcgttatcttatccgcgttatgaagttgtttccagtggttcaaagatactaaaatgaaagcaaatcacaacaaaagaacggttattctcctttccaaagggttgtttccagtggttcaaagatactaaaatgaaagcaaatcacaacacaagaagacgggagctcttggagtgatagttgtttcccgttgtttaaagatactaaaagtttttctatatttaaatatcatttgtccctataataacacataaaaagctgcctccacaccagagtgtttgagacagcctttcttcattaataaaacctataattaatcaaccaaagggaacataaagccttttccgtcattatcagcaaacttagcccctgaaggaagaggcagatgtttggcattgttactgaaatcccaaagcatggtttcatcctcggtgatttctcccgtgtcaaggttgcgcttctttccgtttagtggataatacagcaccagattctcatcacttccgtctacagttttccacatgaactgcttcaactgctgaggtgtgcgggccgtcttccagaaacggatttcacgaaccagctcgttcgcaccgccaatccaaaaacctaccagaccgtaaggccctgtacggatttcacggtcggccaccaattccccattcacatatacatagtttttcttaccgtcgtacacgaaagctagcatgtaccaggtgtcggcctgtgccgcaaagacatccgccggtacgtcaatctgagaacctccagtcttaaactgaagctggtcgggacgaatagtcacgtcaccgaagcgaggatagatttcatcgagtgcaccggacccagacacgagtttggtaccacagatggaacggttgttgctctggtatgcactacggttcaccataacctccatcgtccactggtccaccttgaaatcgtccgggaacatcttggcatcttcactgccgtatccgtcaatgcgaagacacttcgtattgatgcgctgctccagtacaatcagtgattcagattcactgtcaatcacgggtaccgtaccgcccctcagttttaccggcaaggcgtagcttccctgcaaggagaatttcacatccttaaactttaccggcaaatattgcaatgtctgcttggagttgaacaccacttccttgcccacctcatacatttcgggcggaagcatcaggtaatccgttccatgcttcttgttgtatgcttccagctgctccttgttgccggcctctaccgtcaccgtcttagtatcattttcctgccgtaccagtgatacggtaatagactttacgtcgacttcctttccttcttccacgaatacctgagaagattcgccagtcttgatgtaagccccctgtgccgaccggtattcactggttgcatccttgtataattcattctggcaggaacaaatcagcaaggctcctgcgaatatgctgaaatataaattctttttcataattcaaattttaatctaacttacccggataaactacatttcccaagcgcaaggcttctctgagccatttgtaaggaggtgtatttccatagtcgtattccatgtgatacgtaccgatgccaccgatgcgtctgccgtcgggaaggtccagcgtggcataatcaaaaatctgacgcccttccggataagcattgatttccggacgcacgctggtgtaattatctactccacctgtctgccagccttgctcaaactctacggtgataatggtcttccgctcccagttttcaaggtgaggctgattgattttcctaaggacctgctcggtggaacgttcccaatacgcctgataaatatagtggtcgatgtacttggaagcctcggtagaaagtttctcaggctgaccgtccattaccagcattctgccggccggacgcaaacggtctgaaagggttttgataaatacgaacatgttcgtattgcccgaattttcgctgataatctccccgttagccatcgaacctgaatgaccatagccgggttcgtagtctatgtcgaaaccatccaaattatacttttcaatcgtatcacagatggcatttgcataagccttcacaccttccacaaaattaccacctcccttttccacaatccagtaattcttcgggtcttgtccaggaggagtcatctggtcgcccaagtcttgtacaatccaacacagcagcgcttttcctcccttgatttcctggaaaaacttcaagtcttttttctgctcttccgaaaggtttcctcgcgtaccccacaaggatacgaaatctacgctgtcgggcagcatcttcaggtagttctgtgcattgctgcctcgtccggtccagttgccgaaccagccgaaccccttcacatgaggtgtctgacggtattctctcagtttggcaaaataatcgcgcatggagggagtcaggtcggcttcactttccgcctccagcaagggaatgtatttctccaggttctcctggttttcgaacgtttctctttcaggcacgttccattcggaacaggccacgaagcctgccgccagcagcagggctcctgcatatcttatgattcttttcatcacttcatttgtttgacatttccgtaaaactcatttctcatttcggctgtttcggacggttattgcgcacccaccacagcttggttgctccctggtcttcaccacccagcagcgccggcacttccgacatgttggggtttgtaccatattcggccggagcaaagcggaatctttcgggcgtgatggcatcttcttcacctcctatgctcacgtaagctttgtcataagctggtttgagcaggtaaggatagcccgtccggcgatattcggtccaggcttccacggcattgggatagagtgccaggtatttctgggtaatgattttctgcaacttcacttcgtccgaatccgcatcgttccacttgggagacacatttccggtagaaagcttgcaggaatactgacggttgtaaggcaacatagaccggctgatgtcataaggaaaatctgtaacctccagataggcagccactccgtttactccgttttcttcgaacgacttggtaacaccttcttcatacaatgctttcggattacctcctgccagtttgtaaagtgcggcttccgctttcaggaaagacacttccgaagcacgcagccagaacaaaggagaagccgcatcgaccttgggcttggaggctcccgtcttggcagcggagctaagggcattgttgttcgtaggaggaagaggcatgaaatagccgtaagaatcggacgtgaacaaggcacccagacgcggatcgtcatacccctgcatgtaggcccagatggtagctcccaggcgacattctccgtagtcctctacagtcggcagcatggagttcatcagcggcaacttgtccgtactccgtattttggcctcctgtgccacggtttcaatgacacctccgtgagaaggatcaagggcaaacgtgatgtattcctttgccagcgcttcatccttgaaatgcacgcggacggctatgcgcaacatgagcgagttagccagtcgtacccagttggaagcgtttccgttataaatcacatcgtacgacggaagcacttttgatgcggtattgaccagcagctgcgaagcatccttcaaatcggccagcatcgccttgtacacggtctcctgagaatccagtttcggagcaatgtctccgttgccggcattggtatatacaatcggaccgaacacatccgtcgcacggagccaggcagtcaccttgacaatattggctacagcctgcacttccttgtcggcagggtcttccaaattcttcgtatgcttgtagatatcattccatgcacggaacagtttcgaatagaaattctggtaggcatagctcatacgggcatccgtaaaattccacgtggcctccgtgttgaaattccagttgttgttcatgccccagtagccgatgtagttgccggccgacatgatgtctgtattggccaggtcattacccggtcctgtcgattctgtgggcgaaccgatgggaataaccagcttctgcatgtccataaaaggagccccatacagcagtccgcccgtcttcattccttcttccgtcacaccatagatatttgtattgatctgctcatagttgcaagatgcaagtaccaatacggaaaatacaggtatcaaatagtttcttatcttcatattatacgttgtttttcatgatttgttagaatccaaatttaaggctcactccatacgtgcgctggctgggcaacataaagtaatcgtatccttgtccgaaggtgccggtagaagccgtcagttccggatcaaaaggagctttgttgtaaatcatccagaggttggtgccatacacggacaggttcacactatggaacggagtacccttgaaccaggaattggggaaggtgtatcccagactggcttcctgcaggcggacgttggtagcagagtacacattatacgcatccaggttcaccaccgattcataatagtcttttggctgaactgccacattgcccaccatgacttttccggcatcgcgtgcatcggccgaggcctgcgacacaccgaactggtcgagcacggcctgtgtcttggatatcacgatacctcccagacgggcagtcacaaggaagttcaggttaaagcctttgtaggtaaagccgtttttccagcccaggttccacttggcattgacactacccagcttgtagggttccgtagattccgtggttatggtctggccttcattgtacacgatgtagccatcctgatcacgtttcaggcgttcttccgcatatatcgtacccacttcttctccttcgcgcaggcggaaacgtcccaccttgatgtcgctcaggtcgagtgcctctccggtcacggggttcttcacgttcgaagccagttcgatgattttattgcggttggcagtagctgtcagcgaggtactgtatgagaaattgccaaaggtctggtcgtatcccagcgtcagttcgataccccggttttccacgttaccagcctgcacgaacatatagtcataacccgacgtttccgacagcttggcttcgagcaactggtcgtaggtattcgatttatacagcgtcacacccaacgacacggtattgttcagccacttggagtcgatacctacttcataagagcgggttctttccggcttcagttccggaagcggataatacttgaaaggtttgattacacctccttcaatgg

SEQ ID NO: 734 - DNA, 18567 bp, synthetic construct
  source 1..18567: mol_type = other DNA
  misc_feature 1..18567: note = Synthetic
aacgaatgatcatgcaaaccattgtgaaagatggagataagatcattttgcgtgacatcaaagatgagtctacggggcaattactcaatattacagtggctcaatatatagcttatacattgatggagaacggtctttcgcttaccaatccactgtatgttaagatgctgcaagaggctgttgaacattgtgccgacccacagttcaaagccgaagaatacttcactcaacatgtggacatcgatattgccaatgaagcggtacgcctaagtgttgaccgattccagctctctgagagtctacaagttaaggaaacggagcacagtctgcgtgagcgtgtgttgcacattatgaccgattacctgttagactactatgactcgcatctcaaagaacttgttgcaaggatgaagcaaaccaaagatacggacgagatgatgggtatgttgaaggaaattaacgctatgcaaaacaagaggaatatcctcgctaaacgcttaggaagcgatattttgatatgattgagaagataaaacgactctttacacagcccctctcactgggcgatattacctccgatactaacaaacagatggtgactaaggcgctcaaggagcttaattgtgaggtggaatggactcaagaaaagtctggagtgcggttcgttcagtacgacttccagcgtgggcacttcggaatccacctctttccgggtacgaagatgatagagttaacctatctctatatcgctgatacagatttagctaacgtgcatcttgttcgccaactgtgtaatgagatgaacataaactctgatggtccgcgcttctgttacacgctgaatgaagcgaagaacaacgttgatattcacctattctttgaccttctcttagacagcgatcgtgcgaaagatattctgtcgacggctatgtcgaatctatttgggagtcagaacgctttctgccaacgctttaatacggtggaaaaggaggctaaagagaacgaaacagacgacttggaagctgcaaaaagcgatgtggagagaagctgttacatgattcgtgaacaagagctaacgcatcagaagattgcaccgggatggcgacagaatgataataaacctgcttctctaatacagtggatggatgtcgcctttggcatggcaaactttgttccgtctgaattaaccattgtcacgaatgaaattcatcacttggctgataggcaggcgatcgaagtgttcgacctctccacaccactgattgaaggtggaaagttcgtgcgacaacatgcgatgttagacctgattttcttccttccatcggctcctgacacccgacaacgcatgactatcagcttgcaacaagtagggaaagcgaaggacatattatattacaggattacaggaacgctgctcccattgcctgcaacgccctctcgttcattgtcatctgtcgaaaccaacgttcgcatggagagtgctcttgtagcttacgacttgcgtacagacaagcaactcaacgatgagttcatctacacatggaaagaggctcaaagcaaactcgccaatagtcaggagggagaacttactgatgaagaacgcttactggctactgttctgttgcaaccagtggcttcttatctctatcgagggcgtcggctctatcttcaaaagcgttacgtggaggcgataccacacttgtttaatgcgttctatcggctcttttacgactttacaacgctgaataacagtgccaaagagacgttccttgaaatctgttttatgctcggttcctgtcacatggagatgctgcaatatgacagggcattcttctttctatcgttcacagtgggtcggaatagcataagatacgccgaaacgtatatcaactgcttagtgaatatgaatgattttcgtgctcttgtgactattgaggatatgctgaatgacgtgtataacagcctccgtgatatcgaagatgaccaagtggaagagcccttgcagggctttcgtcgcttcttattacgccgtaagtcgtatgttctcattggtctgcaacgactcaatgaggctgaaaaactactgcgagagatgctgaagaatcaagaagatatggaatacgcgaaacaggaactggcatatattcaatacttgcgaactgctaaccagaatgaaaaaaaggcatctgacacatcgcaggaggcacctatataataaggtgaaaaataacgttaagaggcgaaacgatgctgaatacaaaaagataatacaacgatgatatacgtacactggctcttcctcgtagcttactccatcattgttatcatggcaatggttcgagttctaatggacaaccggcagctgccaagaccatggcatggatgttggtgctgatgttcgtaccccttttaggaatcgttctgtatatcttcttcggtcagaatacacgcaaggaacgcaagatatggcagcagagtctcgaccagttaacgaagcgttctatgctggagttcgtcgaacagaaggacttcaatatacctgaagaataccgcaacatcagtaacctctttatgaatcaaagcctcgccttgcccttcaagaacaatgaggttgagatctacacaagcggttatgacttctttccctcactactgatggagattggaaaagccgaacatcacatccatctcgatacgtttattatctctgacgacccactcggtcgaatcgttgccgatgctcttatcgacaaagcaagacaaggagttgaggtgcgactcatctatgatgacgtaggttcatggcgtacccctaacagcttcttcacacgtatgcgcaacgaaggagtggaggtttatgcctttatgccagtgcgttttcctgccttcacaagtagagtgaattatcgaaaccatcgtaagatttgtgtcattgatggagaggttggcttcatcggaggtatgaacatcgcccgacgatacgtccaagggactgtgcgacagccgtggcgtgatacgcatgtgaagatcacgggttccgcagtctacggtctgcaacgtgccttcttggtagactggtacttcgtatcgaagattcttatcaccgaacggagctattatccggagatcatcatagggcagaatgacaacttggtgcaggtggttacgagtagtccaacaagtctttggccagagatcgaacaagggtatgtgcgcatactaaccaatgcgaagcattatgtctacatgcaaacgccttacttcctaccaacaaatcccatcctctttgccatgcgtgtggcagcgttgtcgggtgttgatgtgcgcctgatgataccttatgagaccgatacaaaggttgttgagtgggcatcgaggtcgtatgttatggaggcagcaaaggctggtgtgaaaatacttctgtatcgcgagggctttaatcattcgaaacttctggtctcagatgacgccatggcgaccataggatctaccaacgtcgacttcaggagctttgagaatgactttgaggcaaacgctttcttctatgataaagagatcgctctgcgtgtgaaagaagtatttttaaaggatcaatccggcagccttgacttagaagatgtgcgccgtttgatcaagagacctttcttgcaacgattgtgggagtcggttgttcgcctgcttagtccgctgttgtaaaacccctcccagcctcccccaagggggggagtgcctaacggaagcaagttaggggaggcttttctttaattcaaaattcaaagttcacaattcaaaattatgattaggtagagtggataagtagactggttaacaagttgacgagttgcttgttctgtggaaaacaatactatttactcccctctccattcggagagggggcgggggagaggctttccttaacacggaatacatggatgacacgaagccgcaaggcgacacagagttcctaaaggaacattggaatccacagaagctgacgcccaagtgtaattcaaaattatgattagttcgagttgacgagttgatagttgacaagtaaacgagttgtttgttctgtgctatagatcaccacaaagtagggacagacgccctcgtctgtccgctccaacattccaccttacataacaagcagcttcccctatgcggacagacgaggcgtctgttcctacagtgtggcattatctttaattaaaggaacgcccctttcaaaacaaagaaacgccttcttcgctttgaagagggcgtttccttgcaatgaaaagggcgtctcttcacatcgaagaaacgccctctttgaattaaagagacttttccctaactaactcccgctaggcactcccctccttgggaggggtggggggaggttttaacattcggagaggggctgggggtgaggctggttgtggttaggggtgaggctccttttctccccttgggggaggctaggtagagtctaaaaattacttacgatcgcctaacttgctatcgatgtgtgcaatagcatggcttgacaagtgagagaaggaatcgagtatgtcttgtacattacgctcctcttcaacctgctcatcgatgtattttgcgatgaagttctgcgatgcgcgatccttttcctcatctgctacatcagccaagcgattgatagattcagttactttctgctcatgtgccaatgtgtcaacgaatacttctttaggatcagaccagcttgtcttgactgcatctatcgctgtcaacacaacctcaccaccacgatgtagaacgaactgagccatgtccatggcatgtgaacgctcctcttctgcctgcttgtacatccaactggagaagcccttccagccctctttacggaaccagcaagccatctggagataaagattagatgaatagagttctgctatgatctgcgtgttgaacgcatcttgcatcttacttgtaatactcattgtaatgcctttctttattataaataaactttgtttgtgtcagtctttacaataattccatctgcaaaagtaccactttatcaccacaacaccaaatattttatatactaaatgttgcttacgatggatcctatcaatagactgattatattctaaaaacgccctcttgcttactcaataacgacggttgtccatccatgtttgtcttcgatcgtaccatattgtatgccacgaagggtctcatagagcttctttgaccatggtcccggttgatctccaaagttgtaaaccttacctgtctccaagtcatcaaggtgtgaaataggtgagataacagctgcagtaccacacgcgccagcctcttcgaagctgtctaactcatcctccgcaacaggtcggcgttcgactttcatgcccaagtcttcggctatctgcatgagactcttattagtgattgaaggcaagatagacgttgacttcggcgtaacataggtgttattcttgattccgaagaagttagctgcaccgcactcatcaacatatttcttctctttagcatccagatagaactccgaagcataccctttttcatgcgccatcttattggctctcaatgaagcggcatagtttcctcccaccttaaacatgcctgttcccagtggagcagcacgatccacgtcacgcacaatgacgtatggattggaagagaaaccacctttgaagtaaggacctactggtgtggcaaagatcaagaaacaatattctgttgccggacgaacgcccacgcctgctgtaataccaaatagtaacgggcgcagatagagcgttgctccactctcataaggtgggatgtactcttgattgaggcgtaccaccttcttcaccatatcaacgaatagctcggtcggaacctctggcatgacaataccacgggctgtgctctgtaatcgggcagcgttttcttctgctcggaagacgcgtaccttgccatcaggacagcggtaagcctttagtccctcgaatgcttcttgaccatagtggaggcacgttgcagccatgtgtaacttcaagtactcatccgaacagacctctacttcgccccacttaccgtctcggtaataacaacgaacattgtagtcggtgcgtagataaccgaatgtcaaactcttccaatctatatctttcatatcatataagtatttaattgcatcctgccatagcctaatgcaaaagtaaacaaatttatctttccctgcaacccatcgttcgctttattgctactgattggctaacagcttctgaatctcatcgtcggtgtgcttgagcttctgcttacacagcttcacaagagcctgtgcttgcttcagttgagcagccattgaatcaacatcgagttcgcctcgttccatcttgtcaactatgctctcgagttgctgaacggcgtcttcatatttcatttctttcatcttcttgattgtattaaagggtttaaagggttccttcgagctatttccttaccacactctccacctctccttgctcaaagcgagtggtgataacgtctccagccttcagttgtgaggcattgcgaacagccttcccattgtgtaaggtaatgctatatcctcgacttaaaagcagcttcggatccatcagttgggcacgttgagcgagcatatctatgcgacgttgctcgttagaaaggcatcctacaagggtaggaatagcatatcgcatcatcgaatcaaggtcgtaacgggctttagaaagcctttccttcatcctattcaccaacctttgtgcaagactatcgagccgtgcttcctgttgagtacgcaccacagaaaagagcataggaatgtgagttgcaatgtgttgtatgtgcatcttctcccgttctaacctacgttgaacagcctcaacaatgcttgcttgtgcgttctcaacccttgccagcgttgcagccaactgattgatgaggtaagcggcagctgctgttggggttttcacacgcatgaatgaaaccatatccagcacactctcgtcacgttcgtgaccaattcctgtgattatcgggagtgggaagttagccacattctccgccagattcaaggtgtcaaaaccacttaaatcggctgtcgcaccgcctcctcggatgataacaacgcaatcgaaatcctcttcccgttcgttaattagattcaaagcattgataatgctctgttcaacccggtctccttgcatcactgcggggaacagctctacatgaaaggcaagcccaaactcgttatgaagtaactgattgcaaaagtcgccataacctgctgctgtctcggaggagatgacggctatgcgttgagcaaacatcgacaagcacaattcgcgttgcaagtcatagacgccttctgcctttagctgtcggataatctcctgtcgtttgcgcatcatgtcgcccatggtaaactcgggattgatgtcatctacaatccaagaaaacccatattgaggatggaactgagcgtgcacaagcaacataactttcatacctgcatggatcgtctgacccgttatcttgatgaaagaaggctgtatctccgcccacacgttatgccaacacttggcttgagcacgtgcaatgggaacattgccacgagcgtccttctcgatcagttccatataacagtgtccacggctctcacgtgcttcggacaattcagcctcaacccagtaagaacgcgataaggtgctactgataacatccgataccaatgcgttcagttcatagagggtgagtgcttttgtcgtcatgtgtgcttctatatatataaaaggtgtaaattacattacttatccttaggcaataccacttggcgatacgcctccatgaaatcgggaacaccataacccatgatgttattaggcttcagatgattatcagatgtctgccgaatcacctttatcaagtcctttgcacacgtgttaggagcggcttgccacaagcaagcaaccatccctgccaccaacggacaggcaaaggatgtacccgtatcgggcgttatatatcccctacccgataccacatttgttggacaaccatacgccattacgtctggtttcactcgattatctgccgttggaccaatcgatgagaaagcagcattaatgccgtctggtgcaatcgcacctaccgtgagtatgtcatgcgcatcggctggtacattgatcttcttccacggtcccatgccatcattccccgcactgttgacaaggataatgcctttggatgcaagcagggaagccgcctttgagatgggtgccgtcagtccattgaggtcggaataatgatagtttagactcttatcatcgaagccgtgatagcctaaagacgaactaatgacatcgacaccgacggagtcagcaaactcagcagcggctatccagtagtcttcctccgccgaactctctgtaagataatcctccgaacgcaacaaccaaaagctcgctttcggtgcagaacctacgaaggtagagggctgattgactgctataacggataaagtcttcgttccgtgatccatttccttgtacacatcggcatcataaccagcaacgaaattatgcgttccaacgatgttgacattcttaaaagcaggcattttatccacgttcatgaagcctgcatcaagcacagcgatggtcattccctgtccttggaagcccatgttgtgcaacttccgaccattgagattctccaactgtgcctttcccataccataataatcatgtatggtggagtcgagtacttgcaagtctggacgatagcgaacgcgctgtgacaacggacggatcgagtcgggagaggtgaaaacgagcttgctgtctctcacaaaaggcaacaccttgagatcttctaacgtctgtctgttattgccacgcactaagacagagttgttccacttgcttattgcgaccacattcccaccttctttgcgtatcttctgaatgtatgttggcgacacagggaggtcagttgagtcaagttgaaggtgctgcctctcacgccgtttcagtgcagcttcggataagaaaagcctcggtttatccaaagaataaggcgattcagccttgtcgcgaagcgttactcgaaacatataacacttcccgccaggataactaatgaagcttttcccatcattactggctcctactactgccgtaataagggtgaataagcatataagatatatctttctgaggttctgtttcataatatgcaaacttacacaaaataattgaattatagattgcatgatgccctttttctataaattaatctctttctacattgtaggatggtattccccttgataccaaggaacgccctctttgacaccaagagatgccctctttctatcaaggaaacgccttctttgacaccaagaaacgccttctttctatcaaggaaacgccctctcaaatttaaaaggttttccctaacgatcttccgttagactttcccatagtctgtcagactatgtttgaggaagcattcaaattatttttgctgtcattactgtcacaaattaactgagattaaacttctgataataaacgagttatggtaattgttaaaagtgacagcaagttgaattaaaaataaattaggtttttaaggggataaacggagacgattatgttgtaaaatcatacgacaaaacagatggaatcaaagtggatgtatatcaaaagagtatatggatataggaaataaaatatcctaaaactctgtgataatatgaatagttaaaggtaaattacatataaatactggacgtaataattcttaaaaaagagcggggaaatagttgtaggtttatgaaacaagtattacctttgtctctataaaacgaaagaaggtgagttgccccaccttgtttgttttcacaacggaataatccttattgtgacttgcttgaaaatatctgagtgcaaatataggaattaaataactaaaaaccaaacaaaacaagaagaaaatgacaacaattcttggtttagacttgggaaccaatagtattggttgggctaaagtctgcgttgatgacaacggtaattacttgagagacattaaacttggtagtcgtattatccctatgagccaagatgttcttggtaattttgataagggtgtgacggagtctcagacctcggtgcgtactgggtttcgtggagtacgaaggataagagaacgctctttgctacgccgtgagcgtttacatagggtcttgcatgtccttggatatctacctcctcactatgatagtgccataggttggaataagaatgagccttcgacttatggtaagtttttgaatcatggtgaaccaaagttggcttgggagcgcaaagaggatgggtctatgcgtttcctttttatggaatctttccatgagatgatggcagactttgctaaaagtcaaccatcattggtttctgatgggaagaagattccactcgactggactatttattatcttcgtaagaaagcccttagccagcctattcggaaagaagaacttgcatggatactactaaatttcaatcagaaacgtggttattatcaattgcgtggagaggaagatgatgataaccctacgaagtgtgaggagtattatgagttaaaagtcgtaggtgtagaggctgatgaagagggtaagaatgggaatacttggtacaatgttaagttagagaatggttggatctatcgtcgtcagagtaagattccgttggatgattgggttggtaagatcagagagtttattgtcacgactgaatatgaaaaagatggaataactctcaaaaaggataagaatggagatgtcaaacgatctttccgctctccaagtgaggatgattggggacttcgaaaaaaacgaacggaaaagctgttggattcttctaaaatgacagtgggggcttttgtatatgatcatctcttggcagaaccatctgataagattcgtggaaagtttattcgtacgatagaacgtaaatattataagaaagaactatatgcgattctttgtgagcaaagtaaatatcatgaagaattacgtagcggagattatttgaataaatgtgctcaagaattatataagaataatcaacctcatcgcaatagtctgttgacaaaggatcttgcctatctacttttggaagacctcatcttctatcagagaccattaaagacaaagaaatcattgatagcagaatgtccatacgaagcctataaatatgtagataaagagacaggggagataaaacgacagggaattaagtgtattgcgaagtcgaatccttattatcaagaattccgtttgtggcagtttatatccaatctccgtctctttaacaaagctgatgacaaggaagtcacagctgattatcttcctactcaggatcattatgtgagtttgtttgcctatcttaatgaccgaaaggaaataaatcaagaaacattactgaaagagttcttcaagttgaagaagataacagttaattcggagaaagttttccctattcgctggaactatatagaagacaaagagaagaaatatccttgtaatgaaacacggcatgaattactgcttgctcttgatagagcaagaatcgatcattcttggttagagaagcctggacaagaatatcggttatggcatttactttattcagttgagtcgaaagaggagacaaaggaggcattgcgcaagctaaaagatgatgatgcgtttgttgaatccttcttgaaagttaagcctttcaagagagagtatggtgcttactcagaaaaggcaataaagaaactcttagctgttatgcgaatgggaacctttggcgagaaacagatatttgtgatacaacaaaggggaatatcactaagatactgcaaggagatatagatgagaaacttaaagagaagataagtgcttctgtttcttcatataatcaattgtcagatttccaagggttaccagtatggttggcttgttatgttgtatatggacgtcattcagaggctgcagaaatacaacattgggaaactcctgaaagtcttttggcatatatcaatggctttaaacagcattctcttcgtaatccgatagttgaacagtgtattttagagacgcttcgaacagtacacgatatttggaaagaagcaggacatatagatgagattcatgtggaattaggtcgaaatatgaagagcactgccgaccaacgtgcccgtatctctgagaatgttctgcgtaatgagaatacgaatctccgaattaaaagtctactattggagttgaaaaatgatcctaatattaaagatgtgcgcccttattccccaatgcaacaggagaagttgcgtatctatgaagagggagttttacaggaattgaccaaggatgataaggactttacagagataacaaagatatcaaccatggctcaaccttctgcgaaggaactccaacgatataagttatggcttgaacagaagtatcgttcgccttatacaggtaagtcgatttctcttacaaagctttttacttcagcatatcaaatagaacatgttattccacaaagtcgttattttgatgactcctttagtaataaagttatttgtgaatcagaggtaaatagtctgaaagataacatgttaggatatgaattcataaagaatcatggtggagagatcattcattgcacaatgttgggtgatgtaaaggttctcagtgaaagtgaatataaggcttttgtaaacgaccattatgcgcacaataaacgtaaaagagagaatcttctactggaggatataccacaagaattccttaatcgtcagatgaatgacagtagatatataagtaaggtggtaaaggctttgctctctaatattgttcgtgcagaaggagaagaagaagctacatcaaagtttgtcgtgtcttgttcgggaggtattacagatagattgaagaaagactggggattaaatgatgtttggaacaaaatagtatatcctcgttttgagcgtttaaatagacttacgggtacggaggcttttggacaatgggagaataaggatggtaaaagagtcttccaaacagccgttccattagagctacaacgtgggtttaataagaaacgtatcgatcaccgtcatcatgcaatggatgcgcttgtaattgcgtgtacctctcgcaacataataaactatctaaataatgagtctgcaaacaatcctaagaagcgtgaggacttgcggcaaaaactttgtgataagaacagaactattcgtaaaccgtggaaaacattcacacaagatgctactgctgcattagaagatgtgatagttagtttcaagaattatgttcgtattattaataaagcaacgaattattatgagcgatatgatgtagaaggaaagaaggttatagcagagcagagaggcgatgatatgtgggcaataaggaagcctatgcataaagagacagtctttggacatgtcaatcttcgtcgtaaagttactgtgaagttgaaagatgctttagagaatattcctgctatttgtgataaggatctgcgtgactatattaataaattggtaaagaaaaattttaatactcggcaattgcttgctcactttaagagtatcaattaccgattgaatatgcagaagatagaaaaagttgaagtatggcagtttagtgatgaaaaagaacaattagttgcgacaaggaaatctttagatacgtcatttgatagcaaacatattgatagtattaccgatacaggcattcaaaagatattgaaaaactatcttcaggcaaaaggtggagatcctaacgttgcttttacaccagaaggtataatggagatgaatcagaacatttctctttataatgatgggaagcagcatcagccaattcttaaagtacgattgtttgagccgatgggtgcgaagtatcctgtcggacaaagtggcaataagtctgctaaatatgttgaggctcaaaagggaacaaatctttattttgcaatctatgaagatgaagaaggaaaacgtagttataaaacgatccctctaaatgaagtcgttgaacgcttgaagcaaggacttagtcctgttccagagaagaatgataaaggaatacttttgaagttctacctgtcaccaaatgatttggtatatgtaccgatggaagaagaaatacattctgatatatgttctttagataaagaaagaatttataaaatggttagttctactgggattcaatgtatgtttattccttctcgggtcgcaattagtattgtgaataaaatggaatattcctctcttaataagatggagaaagcaataacaggtgagatgatcaaggctgtctgcttgaaacttgaggtagatcgcttagggaacgtcatcaaagttatttagtaacaatcttatttgcttatgataaagaaaacgctttgtttcagtaaccctatctatctgagtctccgtaatgagcagttagtattgcatctaccagaagtagaagttaacggaaatttgcccgaagttatgaagaaggaagctgagcgcaccatcccgatagaagatatcggggtggtgatacttgataatcgtcgtataacagttacttctggtgtacttgatgcgcttttagaaaataattgtgccgtcataacatgcgatcccaaaagtatgcctgttggattactacttcctttatgtggtcataaaactcaaaatgaacgattccgttcccaacttgactcttcacttccattgcgtaaacagttatggcaacagactgtgaagcagaagatccttaatcaagaatgtgtcttaaggtctaataccgataaagagacacgttgcatgtgtgtatggtcaaatgatgtacgtagtggtgatcccgacaatcttgaagcaagagcagccgcttattactggcgtaatcttttccttgactttcctgattttgtacgtgatagagaggggactccacccaataacctcttgaattacgggtatgccattctacgggctgttattgcaaggtctttagttgggagtggattattaccgactctgggtatacaccatcataatcgttacaatgcttattgtcttgctgatgatattatggagccctaccgtccttatgttgatcaactggttattgatattcttcatcgatttgacaatgtctcttctctttcaaaagagttaaagatggagttattgagtatcccaatgatagatgttgtcgtgaatggtaaacgtagcccattgatgatagcagctcagcaaactacagcttcgcttgctaaatgcttttctggggagactcgtcgtattagttatccagagatgtaacatttatttattatggtcagcttttaccgctttagtgaatatcgaattatgtggattctcgtattcttcgatttaccaacagaaacaaagaaagaaaagaaagcatatattgacttccgtaaatcattgatgaaagatggttttacaatgtttcagttctccatttatgtccgtcattgtgcaagtgtggagaatgcagaggtgcatataaagcgtgtgaaagcttgcctccctaaacacggaaaagtcggaatattgtgtattactgataagcaatttgctaatatccaacttttctatggtgagaagcctaaaccacccaatgctccaggacaacagctagaactattctaatacagaatttatagaaaacgaaaatcccactctacacgagtgggattttgtttagtggtattacttttattttcttctaacaactaacgatcttattgatattcagaaacttatgaatagtctgttgttgttgctaccacaaaggtacatattttcaagcaaatcacaacgcattctataaggcatggtacgacaaatatgttgttgttgctaccacaaaggtacatattttcaagcaaatcacaacagggtgagaaattaaaattccactccgaacgttgttgttgctaccacaaaggtacatattttcaagcaaatcacaactcgtgttaagcagtataggatgcaattagagttgttgttgctaccacaaaggtacatattttcaagcaaatcacaacacttggagtatgtcggcacgtagccgaatgggttgttgttgctaccacaaaggtacatattttcaagcaaatcacaactgccgaaaacataggtagaaaagttaagccgttgttgttgctaccacaaaggtacatattttcaagcaaatcacaactattagatagagcactatcagaattgtctggttgttgttgctaccacaaaggtacatattttcaagcaaatcacaacatattatatataaataggtacgcgtacattgttgttgttgctaccacaaaggtacatattttcaagcaaatcacaactccctatcgcatccaaataatatttataatgttgttgttgctaccacaaaggtacatattttcaagcaaatcacaacatcttttccataattttgtttttaatttgttgttgttgctaccacaaaggtacatattttcaagcaaatcacaacaataatatcattatatttataatttagacggttgttgttgctaccacaaaggtacatattttcaagcaaatcacaacgaccagagtaacgaggcacgtaaccgaatggttgttgttgctaccacaaaggtacatattttcaagcaaatcacaactgctaaataatatattaggcggtcatgcatgttgttgttgctaccacaaaggtacatattttcaagcaaatcacaaccgtagagtgtcgaccatcagcaccagtaggttgttgttgctaccacaaaggtacatattttcaagcaaatcacaactacccccttaatcggggtataattaattgttgttgttgctaccacaaaggtacatattttcaagcaaatcacaacttcaatagtccttgaagatttgaagcaatagttgttgttgctaccacaaaggtacatattttcaagcaaatcacaacggggtcgctcgcaggcttcgctattccgccgttgttgttgctaccacaaaggtacatattttcaagcaaatcacaaccgaagcgttgtgtatctgtatcgtatcatcgttgttgttgctaccacaaaggtacatattttcaagcaaatcacaactagattttggcaacgcaatcgattttaatagttgttgttgctaccacaaaggtacatattttcaagcaaatcacaaccgtgttcaatgtgtagttttttgttctcgtgttgttgttgctaccacaaaggtacatattttcaagcaaatcacaactactatgcagatagatgatatgctagctgcgttgttgttgctaccacaaaggtacatattttcaagcaaatcacaacagaggcaaacttatccgtccttgattaagcgttgttgttgctaccacaaaggtacatattttcaagcaaatcacaacgggatataatctatcaaactcatccctattgttgttgttgctaccacaaaggtacatattttcaagcaaatcacaacgcgctgctgcatctactatcattaacaaaggttgttgttgctaccacaaaggtacatattttcaagcaaatcacaacagctgattagccaaggctttaccttgggtagttgttgttgctaccacaaaggtacatattttcaagcaaatcacaacttcttttgttgattctcttgctgactgctggttgttgttgctaccacaaaggtacatattttcaagcaaatcacaacatatttgcagcgtaattaaacgttaaacaagttgttgttgctaccacaaaggtacatattttcaagcaaatcacaacgagatattaagtgtataaatgactttacttgttgttgttgctaccacaaaggtacatattttcaagcaaatcacaacgatggatgtttcccagtccattcggtaacggttgttgttgctaccacaaaggtacatattttcaagcaaatcacaacggtctacgtcctcgagtacatcaagtacttgttgttgttgctaccacaaaggtacatattttcaagcaaatcacaactacagacggcgacagattaagtatatacttgttgttgttgctaccacaaaggtacatattttcaagcaaatcacaaccagtctaatggtattggcgcatcactcgttgttgttgttgctaccacaaaggtacatattttcaagcaaatcacaacctacgccaaattcaaatgttggtgttgattgttgttgttgctaccacaaaggtacatattttcaagcaaatcacaacgtcaactcgtgcgaaacgctgtcatgccctgttgttgttgctaccacaaaggtacatattttcaagcaaatcacaacctgttcaatgtatgtgcaatctgaaagtttgttgttgttgctaccacaaaggtacatattttcaagcaaatcacaactgtatgcaattattcaagtacaatcaacaa

SEQ ID NO: 735 - DNA, 17238 bp, synthetic construct
  misc_feature 1..17238: note = Synthetic
  source 1..17238: mol_type = other DNA
taacctgcttcgcctgctgaagttcggcgataatcttcagccggccggacagtatgcctaccgcatggaccgcggccgtaccgaggactttggccgcatttacgcgcacggcgtttcggacgttaccatgctgcccagcggaaaactgctggtgttggagcgtgaggccaacatcacttcgggatacatggggtcggaggtaaattgcaaggtgttcatggtcaatccgcagcaaagctggcccattgacggtacgaccaacctggcccgattggataacaacaagtttatggtcaagcacctgctggccaatttttcaaccaccctctcgccgttcaacaagagcctggccaattatgaaggcatgtgtctgggagccaagctcaacgacggccggcaaacggtgctgctcatcagcgattcgcagaacggggcgggcaaccgcatctatcatttgtacgactacatcaaggtgctggtgcttccgtccgatttctgatcgtaaaaatatgctttctggccaatgttccgccgcatgtcgggcggacgttggccaacattgttttttgtaggtgccggcagtttttccggccccctctttattcattcagaacgtaaaatgtatgaaaagaatcttactggtttttaccctgtttttaggtatttttttcgccgcgcaggccgcagtgcccgacagtatcgtacgaaaaatgacattgttggccgcccgtgacgataccgaggcgcttcgtccgctctaccgccagtatggcgctcagttggtgccttcggcccgtttgttctgcaatctggcatttgcccgcgagcggcatgacgaccgccgcctgctggagtgtgttgacagtctgctcgaggagtatccgcgtacccttcccgtcaatacccgttacacgctctcggtggtcaaggctggggccttggtccatttgcaggagtttgccgagctgcagtcgttctgcacgcgtgagatgaagcgctaccgcaaccgtcgcaaataccgcacgcaatatcagacgctcgactatttccgcacaaaggcccgccgtctgctcgattccgtcagtgtgcgtggacgcgtaatgcgtctggttgaggccgacgatgcgttgggcctgcgggcctatgctgattcgctcggtgcgctcgattcctatgcccgccgtatggcacagcttacgctgctcaaggccggtgtgcccgacgggcgtctggccgcggtggccgacagcctgcttgcctgcgaggccgactctctcgaccgcgaggggcgcgagcgctgcctgcgtgccggggtgcatgccctcttctggcagggatgctggtcgcagctggctgacttctgccggcgatgggagccggtcagcgaggggctttcgagctggttgcagcgttatgcccgcatagccatgcagtttgaggggcacgacagcgtacgtgtggagcgtccggcccgcaactgctatctgcctaccacactggagtggcccatgatgacgagtattgaggttaacggccacacttttgacgatatggtggtggagacgggctatcccgtcacgatgatcagtcaggccgaggccgaccgctgcggcctgcgggtgttgagcgatacgctcctggtgggcagtatgttcggcccgctcaaggtgcgtcccgcccagattgaccgcctgagcctgggcgacattgtgctgaccgacgtgcccgtatatgtggctacggccgacaacccctcgctcgcgtccagcttttccgggctgctcggcacgtcggccctggcgcgtctgggggtaattgacattgagccggagcgcctggtgtttccctatcgagccgaggccggcgcttctgcggaacccaacatgcgcctttcgggcgacggcaaccttcaggttgaagctttttatcagggccgccgccagcgctttgcgctcgacacggggcagagtgcctgcatattctctacctacagctatccgcgagccacgaccgatgttcacgaacttcagctcaccgtggccggacagacgctgcgcgtgccctacgccgaactgacggacatgcacgcctacgaccacgagggcgtattgggcgtgcccttcctgaagagtttcaagaagctgcgcatggatttccgccacatgtgtctgacggcttcgggcgtgcagccctttcattaccgcgacattgagcagtggattaacgacggcaacctcttctgcctcgaccgtaacctcgacgccatttccgtagtgaccgacgacgtgggctgccagatggccgaaatcttttcgctctacggcaagaatgctcccgaggagctttgcgaggccatcgacgagcttttcagcagcgacagcaacagccgcgaggcctctacgctcaacatgatgcgcctgcaggcgctggaggacatggggcgctgggccgaagccggcagccatatccgcaacatgctcgaccacggctattacaaccccgatacgcgcgatacgctggtggccagaatgaacctctacaccaccgaaatggcccacgtgcagcccctgagcatcaacatgggcaatcaggcggccgaattgcagtggctgcctgagcaggacaaccgctccctgcccgcaggtgaggtgacggtgaacggacgtcaggccgaattcctgttcgaccccaccgagaagtattgcgtcattaccgacaaggccgcccgccgcctcaagctgcatcccttttcaaagccctacttgtggcagggccagacggcgcgtctggtcgtcattccgagtctgcacctcggcgccatcgaggttaacaatctggtatgcgtagtggtgccgggaaaaaagaaacagcccctggtgctgggtcacgacctgtggcgccatttcggagccctggagctcgacggcaagcgtctggtcatgcacagcgagtcgccctacgacggcacgcgcagcgcccccatgcgtctggacaacggccacctctacgtgtcggcgcgcagcagtcagggcgaggagcacgtgctgaaggtaacctccacggccaacgacctttctgtgccccttgagggcaacctgcgtatcggcaatgtggtgctcgacgccgcgcgtttcccccagtcgccccatgagtccgacgtcttcagttgcggctgtgtgtcgtggccctggctggccggaaatgacggccatgtggtgctcgacttcacccagatgatgtgctggcgccggtaggccgttcgtcttgtgcttccggcctgcggttgcgcccggacattcgcccttctcggggccggatgtccgggcgtaattgttggccgcgggggggaggcgttcgggccgtagcccgcgcagggaaaacagggccggacctttttttcacaacgtcccgcctggttaaaataaagtcccgtcccgttttgccagcaacccgttgtcagatttttcctgccccttaccttcgtaatgaggttgcggagaaatggccggaagggctttccccatgcccgtcagcgcacatcgggagtatgttgtgcggcatggagagtcagaaaaatcactttttgtttgtcccggcctgctgctttcgctatatttgtggctcacaggagtgtgccggcttagacttactgatgatgcttccggcctgcctgtgcgtaaaaaaccactaaacgagaaaagaagatgaaaaacctgtttaccctgctgtgtgtttgtttgctcggcgtgttggtcagtacctcctgccgccaccgtgagcccgaaccgcccaagcccgaggccgaagcggaatatatgaaagcctttaacctgcttttcagcgacagtctgttccgcgatgtgtcgcgacgcgacgtgcaggccgctgccgggcactaccgcaaagccctgtccattgaccccgactatacgctctgccgtacggaatatgccatgctcctgctggccaacgacagcgtggagcaggcctggcagctgattgacgacgaccgcaacgatgccggcgcagccttcctgaaggggcttatctgtcactaccgcggccagatggacggccgccgtcaggcctttgagcgcgccgcctcgctgctgcagcggcgtatgtccgacgggcaggcctcctttggcgattcgctcaactatgcagccagccagtattttgtaggtgggcgcgaggctttcctgaaggctgtggagccgattcacggctttgtttacgaaggtgagcgtgaggagtttattgacggctacgtgcaggtgccccccgatacgattctcaaccagatgctctatcagctcattgtggtgcgccgtcccacaagcgagcgcagcaacatggtattgccgcagctggagccttgatgcgacatcgctccttttccctacaaggcagccgcgctccatcctttccgtatgcgaaggatggagcgcggctgcttttgtaaggggcggacagggaaaagtccggctcagaagatttctacgcggaagccgccctgccacgtctgtccgggcttggcttcgttgacgtaggggcgcatggaataatcgccctcaaatccggcgtagtcgcacaggccgaaccacggctcgatgcagatgaacggagcttcagccggtgcccaaagcaaaaaggccggtgcttccgacgacaggtgcagaaacggctggttgtgtttgtcaaagagcgttacgccgcgcagctggctgtggtcaaaaataagtccggagtcgcccgtggtgtggctcttcagggccagcatgccgttattttccagcccgggcgggtcgaaatgtcccggaatcagacagttttgttcgccggtgtgcagaatgctttccacgtcgccctccagtcgtgcgtagccatgcacctcgtcggcagggtcaaagtcgggcagacggaatccggggtgtccgccaatctgaaaccacatggtgcgggcgtcgcaattctgaattttgaaaaccacgttgagcgtgcggccttcaagggagtaggtcacttcaaaatgatactggaaggggtagagcttcagctgttcttcagtggcgttgtgctccagtgtgacggacgaagccgttttttccttcacgttgaaacgtacgtcgcgaataaagccgtggcgcggcgtgtgatacacctttccgttgaaccgggcctcgccgttccaaagtccgcccacggcgggaaacagaatgggagaacttctgtcccagaatttggggtcggcctcccaaatgtattgccggttgtcactcagtcgtgtgagttcttttatttcagcgccctgctccgacacacaaaggctgagaaattcgttactgattttttccatagtgaatctgagaataggggttatagactctctaacagacaaaggtagaaaaaaaactcgaaacctcgtcttaaatgccggaaagatgaatgcctgctgtttgctgagcctgattccgtagtgttttcgggaaaataatgcggaggcagatgtcttttgttttccaaaaaaaatgtatttttgagaatctttaaaatttgcagtacaatgactaaacagattttaggcctggatataggcaccaacagtataggatgggccgtggtgcgcggccagggcgacgacgcccaaccccttcaggaaattgtggcagccggttcgcgggtgattcccgttgacgccggtgtgctgggtgattttgaaagaggagtcagcagcaagtcaaaggcggccgagcgtacggctttccgccaggtgcgccgcatgattgagcggtcgcatctgcggcggcagcgcctgctgcgcgtgttgcaggtgatggactatttgccgcctcactacgcccgctgcctcgaccgctacggcaagttcctgccgcacaccgaacccaaaatagcctggaacgaaacggccgacggccactacgagttcctcttccgtgacgccttcgacgagatgatggccgccttccggcagcgtaatccggagtggttggcccggggtggaaaggtaccctacgactggacgctctattacctccgcaccaaggccctgagccagcctgtcagcccgtatgagctggcctggattctgctcagcttcaaccagaagcgtggctaccggcaggcgcgtggcgagcagcaggaggacgggcgcgtgaagcgttcgttccgttcgcccaaagctgacgactggaccctgctgaaaaagaaaaccgaggctcagattgcgcaggcacaccagacggtgggagcctacatttttgaggcgctgctgcgcaatccaagccaaaagattcgcggcaaactggtacacaccattgaccgtaagttgtattatgacgagctgaaggccattttgcaggcccagcagccgtatcatgttgccctgaccgaccccgccgtgctggtgcgctgcgtgcgcacgctgtaccagaagaatgaggcccatgcccgtcaggccctgtgtcacgatcttacggccttcctgctggacgacgtgctcttttaccagcggccgctcaagagccagaaggcactgattgccaactgctgctttgagtcgctgacctattacgaccggcagacgggcgaagagaagcaggcaccggtgaagtgcattcccaagtcgcacccgctgtatgcggagtaccgcctgtggcagttcctcgacaatctgcgtatttatcagctggagggcgaggtagacggaaagaagtgtttcgacatcgatgtgacccggcagttcctgcccgaccacgaggcttatgcccggctgtttaaatggctctaccgccggaaaaatgtcagccagaagaacttgctgaaatatccgccctttggactgaaacctaccgccgacctttaccgctggaattacgcccaggacaagagctatccgtgccacgaaacctgggcccacatgcagcagtgcctgaagaaggccgggctgtcgcccgacttcctgacgccggagcgcgaggaggccctgtggcacattctctattccgtgtccgacatgcaggaactgggccgcgccctccacacctttgcacataaaaacgaattgaccgatgacgaggctgagcgttttgccaagtttttcggtaaaatggagccctttgctcacgactatggcgcctgttcggccaaggccctcaagaagttgctgcccctgatgcggcggggcagttactggagcgaggaggccctggcgcccggggtgcgcgagcgcatcgggcagctgctggccggcactgacgatgccgccctgccggctaaggcccgcgaggccctcaaggctctgcacgcggttagcgactatcagggcctgcccctgtggctggccagctatgtggtgtacaaccgccacgccgaggccaaggatatagtccggtgggagacgccggccgacattgaccgcttcctgctgaacttccgccccaacgagctgcgtaatccgatagtggagctggtggtgcgcgagacgctgcgtgtggtgcgtgacatctggatccggtatggcagcttcgacgaaattcacgtggagctgggccgcgaaatgaaaatgccggcccagcaacggcagaaactgagcgagcgcatgctggagaacgagcggaccaacctgcgcatcaaaatgatgctggcctgcttccagcacccggagttcggggtggatgatgtgcggccttactcgccctatcagcaggaaatcctgaagatttatgaggaatatgtgctgcgtgacgtgaaggatattcccgacgacatagccgccattctgcgtaaattcggcgaaagtactgctgccaaacagccttcggccaaagaggtgttgcgctatcggctctggctggatcagaagtacaccagtccttatacggggcaaatcattccgctgggccgcctttttacgcgagattatgaaatagagcacatcattccgcagaagcgctatttcgacgattcgctgagcaacaaggtcatttgcgagtcggccgtcaacaagctgaagagtgcgcagctggcccacgaattcatcagccagcaccacggcgaggtggtggaactgggtcacggacgcactgcccgcattctggagctggaggattacgaaaagtgggtcaaggagcattatgccgccttgccgcgcaaacggcgcaacctgttgctggacgaggtgcccgaggccttcattgcccgccagctcaacgatacgcgctacatcagcaagtacgtgagcatgttgctctccaacattgtgcgcggggaggacgagcgcagcgtgaactccacgcacctcattgccaccaacggcagcattaccacgcgcctgaagcaggattggggcatcaacgacgtgtggaacgccattgtactgccgcgttttgagcggcttaacggcatggtgccgccaaaggacggacagccggcccaggtgtacgtgacgcgcaacacgcaggggcaccctatacccaccgtacctctcgaccggcagcgcggattcagcatgaagcgcattgaccaccgacaccacgccatggatgccatcgtcatagcctgcgcctcgcgcaacatggtgaactatttgaacaacgagtcggcccgtaagggagccaaggtgacgcgcatggatttgcagcacctgctgtgcaccaagacgcgggcggatgccaatggcaattatagatgggtgatgaataagccctggcctacgtttatcaccgatgtgcgccatgcgctggaggacatagtggccagcttcaagcagaaccggcggataatgtctcccactgtaaattactttgaccactatgaccctgccaccggcaagaagcggcggaaaaagcaaacccaaggcgaaatgcaggccgtgcggatgtcaatgcacgatgccactttctatggcgaaatcaatttgcgcagcataaaggaggtaagtttgaaacaggctttggagcagccgcagcgcatagtcaataaggacctcaagcacaagttgcagactttgcaggctgagggcttgaacttaaagcagatgacggcgtattttgaggagcatcatgacgaatgggctgatgtcaatgtcaagaaaatagcggtttacgtttattctaaagaagagggtaaggcacgctattttgcttcccgtactgtactggatcagagttttactcgggattatattgagcgcaaggtggccgatacgggtatacagtagatattgttacgccatttggctcattatgagaatgccgagcaggcgttttcgcccgagggtattgaggatatgaacaaaaatttaaaagaactgaacaacggtcggccgcatcagcctatttataaggtgcgaacttatacccaaggcgtaaaatcagctgtaggtcagcgtaattgtaaagctgcccaatttgtgaatggagcaaagggtacgaatctttattttgccgtgtatgagggtacagaaggagaagtttcagagagtaagcgaagctttgctaccttttctttacgtgatgtattgccttgtttaaaggacggtaaaccggttattccggagtttgataaaaaaggtaaaaggttgaagttcgtgctttctccattggatttggtatatgtgcctacacccgaggaattgaagctaggacaggtgcagctaccgttggacaagaaaagaatttacaaaatggtgtcgtgtagcgatgcccggtgtttttgggttccggttaatgtggcttcagctattgtagacaaatatgagttctcttctttaaataaaatggaacgggctgtaaccggcgaaatgataaaggaaatttgcttgccgcttgacgtggaccgactcggaaacgtgcatttgcgccagtagcctgttgaactgatacatgcaaacctgagcagggaagacgtcggaatcagcgatggctttcctgctcaagtgctttttaacctaaacgagacgaaaatacgatgattaagaaaacactttattttggaaatccggcttacctgtcgctccggcagaatcagctggtcattcaactgcccgaggcggaggaaaatctggctgactgcctgaaggctgaggctgtgcgcacggtgcctattgaggatatcggcgtggtggtgctggaccactggcaaattacgctgacttctgccctgatggcggaactgttggataataattgcgcattaatcagttgcgacagtcgcggcctgccggtggggctgactttgccgttgagcgggcataccattcagaacgagcgtttccgcaaacagctggaggcttccgtgccgctgcgcaagcagctgtggcagcagaccatacaggccaaaatcagcaaccaggccacggtgttgcagcgttatacccgacaggaggtgaagtgtatgcgcgtgtgggccgcgggcgtgaagagcggtgaccccgaaaatgtggaagcccgggcggcggcctattactggaaaacgctgtttgggcctggatttacgcgaaaccgtgagggaccaccgcccaacgccctgctcaattacggttatgccatattgcgggccgtggtggcgcgggctctggtgagcagcgggttgctggccacgtggggcattcaccatcataaccgatataatgcctattgtctggccgacgacattatggaaccctaccggccgtatgtagacgaactggtgtggacgctggtggaggcgcacggactggatggctgcgccacgttgagccgcgaactgaaggcggaactgctgcgcatacccgtgctgacggtagtgatgggcgggcggcgcagccccctgatggtagcggccagcctgacggccagctcgctcagcaagtgttttaatggagagagtcggaaaatagtgtacccggagttatgatggaccgactgagtgaatacagagtaatgtgggtattggtattttttgatttgcctacggccacgccgcgcgaccgcaaggcgtatgcgcagttccgtacgagtttgcaacgggacgggtttaccatgtttcagttttcggtgtatgtgcgtcattgtgccagtcaggagaatgcggcagtccacgtaaagcgggttaagtccatcttgcccacgtatggcaaggtgtgcattctgtgcattacggacaagcagtttgaacagattgaggtattttacgggcgcaaaacgcagcgtacgcccggccccggattacaactggaattattctaaagcaagcgccccaccaactggcgggacgcttacttttttattttctaataatctttgtatcttctttattctcagtgaattgtgtagattcagctgtgatgtatggtacaaagttacaaaaatgagagcaaatcacaacaatttagaagcgtttaaacatcgtgctactgctgtgatgtatggtacaaagttacaaaaatgagagcaaatcacaactaacaacttcggattacgtttcgcttccagctgtgatgtatggtacaaagttacaaaaatagagtaaatcacaactcattttccggtacagtgtggatggattacgctgtgaggtacggtaaacttatgataggggtatatgtataaaaaatgcccaccgataaaggacgatgggcttagggcctaaataacacaacggaatcaaatccttattgtgatttgcttcatttttgataggagcaaagtaacaaaaaaatagcgaaatgaacaaactttgcaggcaaaaaatgcggatgacggttttggaggtgttgccataatgggaggtaagacgggattgcttgttatcggaacgaaaaaaaacaaactaaggctttgtttggcacacgctttgcactatctttgcgtataataaaagtggaactgtcaggtatgtatttaaaaagtatattatgggccggcgtgctttgggcttgcgtcagtacggccggcgcgcagagtgcgcgtgaggaaataaagactgacgtgaggctctcggccagtaactattgtgcctaccgtgagccacagggagtgcggctgacgccggcgccgtcgggctatgagcctttttatttgagtgcgtatgcccgccacggttcgcgctttcagattaacccgaacgagtatcgggagccgctgcgcgtgttgcagcaggccgactcggtgggggcgctgacgccactggggcagcaggtgctggcggtggtggacagcgtggcgcgtatggcaaacgggcgttacggcgaactgacgccgctgggcgcgcggcagcaccggggcattgcggccagaatgtatgcccgctttccgcaggtgtttgagggtagggctgacatcaatgcccgttcgacgccggtggtgcgctgcatcctctcgatgctcaacgaatgctgtacgctgcaggggctgaacccgcagttgcaggtgacgaccgacgcgtcggctcacgacatgtattatatgaacgacgagttcaaccgcgtgacgcgctatcgtggcgaaaaggcggcgcaggcttcgttgcgcgactttcgcagccggcaggtgaagcccgaccggctgatgcgctcgctgtttgccgacacggcttacgtgagccgtcacgtgaaggcaggccgtctgatggggcagttgtttgacctggcgtcgaacatgcagagcctggacacgtcgctcgacctttataatctgtttacgacggacgagtgttacgacctgtggctgcgcgacaattacgactggtatgtgaactacgggccgtcgcccctgacgcaaggcaagctgccctacacgcaggccaacctgctgcgtaacatcctggatacggccgatacgtgtgtggcgcgccggcaaaacggggctacgctgcgtttcggtcatgaggtgtgtgtgctgccgctggcctgcctgatggagctggacagttgcggatatgctacgacgtgtgccgactcggtggcaatgagctggcgtaactaccgcatttttccgatggcttcgaacatccagatggtgttttaccgcaacaagcagaacgacattctggtgaaggtgttgctcaacgagcgtgaggtgcgtctgccggtgcctacgcgccgggcgccttactacaaatggacggacgtgagggcttactaccgccagaaactggcgcaggccgactgaatgagaacaaattgaacaatatattgtatatacggatagatctatgatcatagaaatgagaggcatcaccaagcgttttggtcagctggaggtgctgaaaggaatagacttggatattaacaagggcgaggtggtgagcattgtaggcccgagtggcgccggaaagacgacgctgctgcaaatcatgggtacgctctacaagcccgacagcggcagcgtaagcattaacggcgaggacgtgttgcggctgaagggaaacgccctgtcgcgctttcgtaaccgccatttgggatttgtgtttcagttccatcagttgctgccggagtttacggcgctggaaaatgtgatgattccggcctatatcggtggcatgaagggacatgcggtgaagcaacgggcggaggaactgctcgactttatggggctggccgaccgtatggagcacaagcccaacgagttgtcgggcggcgagaaacagcgcgtggccgtggcgcgggctttgattaaccagcccgacgtcatcctggccgacgaaccttcgggaagtctggacagccggaacaaggccgagctgcaccagttgtttttcgacctgcgcgacaaaaccgggcagacttttgttatcgtgacccacgacgaggaattggccggcttgaccgaccgtaccattcacatggtggacggaatgataaatactcagcatcatgaagatagcacaacaactgactgagctggtggggcacacgcccctgttgcagcttaacgcatatagccgtgcagcgggactggaacagccgctggtggccaaactggaaatgatgaatcccggcgggagcgtgaaggaccgtgcggcaatgaacatcattgctgaggccgagcgctccggccgcctgaagcccgggggcactattattgaaccgaccagcggcaacacgggcattggtctggcctggctggcagccgtgaaggggtaccgcatgattgtggtaatgcccgacacgatgagtcaggagcgccgaaaactggtgcaggcctttggggctgaactgcatctgagcgacggccgcatgggcatgacgggagccgtggaactggccaaccgcttgcgggccaggattcccggttcgatgattgccggacagtttgagaatcttgccaacccgcgtattcacgaactgactacggccgaggaaatctggcaggacactgacggcaaggtggcgatgctgattgccggtgtgggtacagggggaacactgtgcggcacggggcgacgcctgaagcaactgaatgcgaacatcgaggtggtggccgtagagccggccgactcacctctgctcagccaggggcgcacgggggcacacggcctgcagggcatcggtcctaatttcctgccgctgaattacgacgggagtgtggttgaccgcatcagtgccgtaacctacgatgaggcgctgcgcgctgcccgcctgttggcccgcacggagggcctgctggccggaatatcctcgggggcagccctggctgctgctactgaactggcgcgtcagcagccggatggcatgaaagtcgtgatactgccggatacgggcgaccgctacctctccacgcaggagtttgacgaagagaattatccgttgccctgaggcggactaaaaaacaaagtaaaagattctggcaaaaaaaacaatatgtttgaattaggaaaatggaatgacctgagcatcgtgcgctttacggaccacggcgcctatctggacggaggaaacggagtagagattctgatgccccgccgatatgtacgtgatgaaatgcggccgggcgacgtggtgcacgtgtttgtttatctggaccagagcgagatgctggtggccaccaccgagcagccgctggcacaggtgggcgaatttgcgtggctcaaggtgtcgtggatcaatgagtatggcgcctttctgaactggggcctgatgaaggatctgtttgtgcctttcagcgagcagaaaatgaatatgatggaggggcgcaactatattgtacacattcatgtcgacccgcaaacctgccgcattgtaggttcggccaaggtggagcgttatctggaccgtcggcgccctgttttgcaccgggatgaggaggtggacatcctgatttggcagaagacgccgctgggcttcaaggccatcgtgaacaatgcctttgccggtctgctgtatgacaatcagttgtttggtgccgagctgcacaccggcgaccgcctgaaggcctatgtggtgcaggtgcgccccgactataaaatagacctttcgctacagcgtctgggcaagagccgcttccgtgactttgcggaggtattgctcgacgagttgcgccaggccggcggcacgcttccctttaccgacgcttcgtcggccgaggacatcacagcgcgctttggcgtaagcaaaaagacctttaagcgcgccgtgggcaccctctaccgccaacgcctcatcacgctggagccaggcagcatcagtctgacagaaggggagaaatagtgaccttgcagcgcagtataggagttttgcatagcttcagttcgttgcttattgacaaagaaagaatgcagcttgactgtttcaaatgttgaaaactttgttttccgtttgcctctgtgctcgcctttcactatctttgtggagtaaaaacattataaaaaaccaatttatcgctttaatatatgttcgacgtaaagaaatgcctcagtgattgtgaggaaaaaatggaaatgagtgtgatgcaccttgaggaaaaattggcccaaatccgtgccggaaaagccaacgtacacatcctggatgacatccgtgtcaattcctacggcagcatggtacccattaacaatgtcgctgctctgaccacgcccgacgcacgtaccatcgctatcaagccctgggataaaaatatgttcaaggtaattgaaaaagccatcatcgactcagaagtgggcattatgcccgaaaacaacggcgaggttatccgtctgggtattccgcctttgaccgaggagcgccgccgtcagctgaccaaacagtgtggcaaagagggcgaggaatgtaaggtggccgtacgcaatgcccgccgcgagggtattgagcgcctgaagaaggcacagaaagagggtctggccgaggatgccgaaaaggatgctgaaaacgagctgcagaagattcacgacaagaagatcaagcagattgatgctctccttcaggctaaggaaaaggaaatcatgaccgtataaaaaactgtgcgcaacatgcaaagcaggtcggatggtcgaccttgtaaaacgttaggcgaatcctgctccaaaaagggcgtttcttttttggagcaggattcattggcttcattaaaaaaaacaagaaacaaatattattatcataataaaaatattattatatggctttattagtttagtaaccctaattggtatcaccagtgtctttaacaccatcaataccagcataatgttaagaaaaaaagaatttgccgtattaagaagcctaggattaactaatcatggttttaacaaaatgattttctttgaaagtattatgtttggaataaaatcattatttaaaaaaccaattaagctatcgaatttctttgtagtgatagcgggaattgttcatttaattatttcaactattcaaataaatacgattaatactctttctaatcaggaatgtggtgttgttctatttatgtttatcttagttggattagctgccgtatttaatgcaacaagatttaaagaggctaagggtccaagagtaatatttgtagtagctgtcttagctgttgtaattggttttggtgtttggcttcttgcaatttattttaatgcttatactaatcaagcaaatgctaataaaggacaaataatgaaaggtgttattgtttcaattttaatgcttgcatgttattttgtaggtgttgttggagcaatttgggcttatattaaaagaaaaaaggctttaagtgcctaaagtataaggaggtgcagaataatgaaagaggaatc

SEQ ID NO: 736 - DNA, 17054 bp, synthetic construct
  source 1..17054: mol_type = other DNA
  misc_feature 1..17054: note = Synthetic
aggcagctacaccacccagcatacatgcttctgaggaaccgatggcaagtgcacctgttttccaggtttccttttcgggggagttccaaaggttggcaacgatgttgatacatttaccgttcattacggcgatgcgcggatattcggtctcgtcgatgtagttgatgttgatggcttcgttcatcagcttggtggcgtagtcgtccatataggtagtgacaaatgtagccagattcaagcgaggctgcgtttgggcaaaggtctcgtcttttaccatttggtaagcgatttccggggtagtggggccgtcgggaattttttctaccggtgagggttgcaacatacggtttgaaccgaatacgtcagtctttgcatctccttttctgaaattcaaatcttccatataaataagtttttaaaaggtttaggtggcggggcttttccccgccgaatttcccacaacaacggggtttgcggatgaaagtttcttggttttacattatttggcgtttattaaagggcagaacagtaaaatattaaagaacgaacattctaaggggcgttttgttgttctcacattattcatttaattaatatgtatatgaaaatcaataccggaaagggaaccattcccctcattacacttgtcggcatttggtctgtctctgcattgacttctttgcctggactggctgtatcgcctattttgggacaacttaccatcatttttccacatgccacggaattggatatacagatgcttacctcgctaccttcactgctgataattccttttgtgctgttggcgggcaagttggcagagaaacgtgattttgtgcgtttactgaagacaggactttggatgtttgccgccagtggaatgctttatctttttgcgggcaaaatgtggcagttgatggcagtcagtgctttgctcggcattggctcggggttgataattccgttgtctaccggtttggtttcacgctatttcacgggagagtatcgggtgaggcagttcggttacagttctgccattaacaatgtaacgctggtggtggcaacagcagtgacgggttatctggcggaggtaaattggcatctgccttttgtggtttatctgctgccgttggtttctctactgctcgtcggctatttgaaggggaataccggccagccgcaagctgcagaagatacggttgctgtcgttccggcggaatctgcacctgtgattcccggcaaatacggtattcatgtccgccacttgttacagttgatgctgttttatggtcttatcacgtatgtagtgctggtcgttacttttgatttgcctttcttgatggaggcccatcatttctccagtggaaattccggtttgatgatttccttgtttttccttgccattatgactccgggcttctttctggggcatatagtgaagtggttggggaagagtacgaaattctacagtcttttgtccatagcagcgggtttgctgctgatatggatctcgcccaaggaatggctgataataccgggatgtatgctggtgggtttgggatatggtatcattcaaccgcttatttatgacaagactgtagatacagccatacctgaaaaaacgactttggcactggcctttgtaatggtgatgaattacttggcaattttattgtcaccgttcattacggatttcttccaaaccttgtttcatacaagttccaaggaatttccgtttatcttcaacctctgcattacattgcttgccatgtgttgggcatggagaaggaaggggatttaaggattgggggagattaagggttggccgatattttgtatttatacaacgcaacccttaattcctaatctttaatactgaatccttaattacattggttcatatttcagcccgaatacatcggctacagctttatacgtcaccttgccttccactatgttcagtcccagtgccagagccgggtcgtccttgcaggcttgtttccagcctttgcatgccaaggcgacggtgtagggcagggtagcatttgtcagtgccatggtagaggtgaaaggtacggcgccggggatattggcaacggcatagtgcacaattccgtccacgatgtaagtagggtcgctgtgtgtggtggggtgagaggtctcgaaacaacctccttggtcgatggccacgtctacgagtacggtaccgggtttcatcattttcagcatttcgcgggtgatgaggtgcggggccttgtcaccgggaatgaggacggagcctattaccatatcgatgtttggcaactccattttgatattatgagtggaagaatagagtgttttcacgtttttcggcatcacttcgctcaagtaacgcaggcggggaaggttgatgtctgcaatcagtacctcggcacccattccggcagctatctgtgcggcgttggttcccacgatgccacctccgaggataagtacacgtgcggggcgtacaccagtcacacctcccatcagctttcctttgccaccttgcggcttttcaaggaaacgggctcctacctgtgtggccatacgtccggctacttcactcattggagtaagcaatggaagtgagtggtcttccttttccacggtttcgtaggcgatgcagacggcaccgctttcaatcatggcttcagtcagtaatttatcggctgcaaaatgaaaataggtaaataccacttgtccctttttaatcagtttgtactccggtgcaataggttcctttaccttgacaatcatgtccgctgcggcatacgtgtcttcaatggtcggtaaggtcttggcgcctgcggcgatgtagtcatcgtcggagaaaccgctgttttcgcctgccgtttcctgcacatataccgtatgacctctttttaccaattcggctactccggcaggggtcatgcccacgcggttctcgttgttcttgatttctttaggtactccgataatcataaccttagagttttaattggggggttaaacatggcgcaatatagcgatttctccgtttgggtgttattggtgaatctatgttcttcaacagaatttttatgcatgttttaatcaatgataattgttgttttctgtaggtggagagaactattctttttatatttgcatgcatttaaataatattgactgtacaaaatatgaaataccctatatttctctctcttttgttctttatcggtagtatgcaaagtggatatgcccaagaagcacccgttacagacagggtctctttcactccaccttttgattttcctattgttttctcgggtaacttcggcgagatacgtgccaaccattttcatggtggactggattttaaaaccggtggcactattggcaaaccggtacgtgccttggcagacggatatatttcgcgtattcgtgttacccacgggtcgggatatgtgcttgatgtgacctatgacaatggctattccacaataaaccgccacttgaatgcttttgtgggcgacgtggctcgccgtgtggaagacttgcaatatgaaaaagaaagctgggaggtggagattactcccgaacccggtgaataccccgtgaaggcaggtcaaataatagctttgagcgggaatacaggatattcgttcggtccgcacttgcatctggatatgattgagacggctacggatgaatacatagacccgctgcctttttttatgaataaggttaaggacacgactgctccgcgtgctgaaagcatcatgttgtttccccagccgggcaaaggagtggtggaaggtaaacaggttcgccgtgcttttccggcacgcccggcgaaacccattactgcctggggactgattggtgcaggtatccgtgcctacgattatatggacggagtgcataataaatatggtgtgaagacggtaattcttgaagtggacggcaaagaagtcttccgtagcatggtggatcgttttgcctatgaagaaaaccgctatatcaattcgtggacacacggccaatatatgaagtctttcatcgagccgggcaatcgcttgcgtatgttgcatgcatccaatggcaaccgcggattggtggacatcaacgaagaacgtccttaccagtttgtctacacgctgagcgatgcactgggaaatacctccaaggtccgctttacggtgcagggaaagaagacgacaattgttccggtggaacatcgtgagaaatacgccctcaagtgggataaagtgaactatctgcaggaaccggggctggaattggtcatcccgaaaggaatgctctacgatgatgtctttctgaactattccgtacgggctgatagcggtgacatagctttcacttaccagctgaacgatacccgcatcccgatgcacgatgcctgcgatttgtgtatcggcttgcgtcggcgtccgatagaggatatgaccaaatattatgtggcaggggtaaaggcacgtggtgagaaataccgcatcggcggtaagtatgaggacggtttcatgaaagtgcgcatacgggatttggggacttatactgtggctgtggatactgttccgccggtgataactcccgtgaaccaaacccagtgggggcgtacaggaaaaatcattttcaaagccaaagacaaggaaaccggtatcaatacctatcggggtacgattgacgggaaatatgccttgtttggaaagcccaactccatcagtggcaacttggtgtgcgagctcgatccgaggcatgtggagaaagggggcaagcacgtggtggagatgacggtgacggatggctgtggtaaccggacaactgaacagtttgaatttgtgtggtgacaatgaaggcatggcaaaactcaacaggcatttcatctgtcatgcagaacatagtgaagcatctcttctactactcataaagctaatgacagagttaaatgatagtgaattttagttttgacacaccttcgtgattatagaaaaatagcatttgaataactaataacaactgaagtatgaaaagtaaaagactgactctttccgtcttgtttgtagtggcagccgtggcgaatgcactggcttgtaccaatcttatcgtaggcaagaatgcctccgcagacggttctaccattgtttcttattctgccgattcctatggtttgttcggcgagttatatcattatcctgccggcatgcacaagaaaggtgtgctgattgacatacacgagtgggacaccggaaaatatctcggaaagatagaacaggctcgtcagacgtataacgtcatcggcaatatgaacgaatttcagctcactatcggtgaaacgacatttggtggacgccccgaactggtagacactaccggtattatcgactacggcagcttgatttaccttggtctgcaacgttcacgcaccgcccgcgaggccatcaaagtgatgacagaactggtgcaagaatacggttattacagcagtggcgagtccttcaccatcgccgaccctaacgaaatatggattatggagatgattggcaagggacccggtgtacgtggtgccgtatgggtggctgtccgcgtgcccgatgattgcatctccgcacatgccaaccaaagccgtatccaccagttcgatatgaatgacaagaacaactgcatgtattctcccgatgtcatatcctttgcccgcgagaaaggctatttcgacggagtgaacaaagatttcagttttgcaaatgcttatgcaccgcttgactttggcgctcgtcgttactgcgaagcccgcgtgtggagttactttaatatgttcacagctcgcggcaacgagttcctaccttatatattaggcgatacggataccccgatgccgttgtttgtgaagcccaaccgcaaggtttccgtgcaggatgtgaagaacgccatgcgcgaccattatgaaggtacgcctctcgacatcagcaaagatttcggtgcaggtccgtatcataccccataccgcctttctccgctttctttcaaggtggacgaccaggaatatttcaatgaacgtcccatttcaacccagcagagtggtttcgtattcgtggcacagatgcgttccgagttgcccgaccctatcggtggagtactgtggttcggcacggatgacgccaacatgacggtatttacgcccgtatattgctgtacggataaagttcccgtatgctacactcgcgtggatggtgccgattacatcactttctcctggaactccgctttctggattttcaactgggtggccaatatggtttatccacgttatgacttgatgatggatgacgtgcgtgccactcagactgagttggagacaaccttcaacgaagcgcaggaaggtgttgaggctgctgccgccaaacttctggaaaaagaccctgccaaagcgaaagcattccttaccaactatacgaacatcaccgcccagagtacctttgatacatggaaacgtcttggcgagtttcttatcgtaaagtataatgatggtgttgtcaaacgtatgaaaaacggtcagttcgaacgtaattccatcggtcaaccggcaggcgtaatccgtccgggatacccgaaggaattccttgaagagtatgtcaagcagactggagacagatataaaatacctgaataaaattaggatatttgaacttattcttctacatttgtatcttacagcaaagtttatattaactattaaaataataatggtcttatggaaaatcaagaactgattaaacaagtgactgaaaaagccgagaaatggcttaccccggcatatgatgccgaaactcaggcagaagtgaaacgcatgttggaaaatccagataaaaccgaattgatagacagtttttacaaagatttggaatttggaacgggcggtctgcgtggcatcatgggtgccggtacaaaccgcatgaatatctacaccgtaggtgccgctacacaaggcttatccaactatctgaacaagtgctttgccggaaagaaggatatttctgtcgtagtgggtcatgactgccgcaacaatagcgataagtttgccaagatttctgcagatatcttctctgcaaacggcatcaaggtatatcttttcgacgaccttcgtcctactcccgaagtttcattcgccatccgccacttcggttgccaaagtggtatcaatatcactgccagccacaaccccagagaatacaatggctacaaggcctactgggatgacggtgcgcaggtacttgctccgcacgacacggccatcattgatgaggtgaacaaggtgactgtggccgacatcaagttcaatggcaacaaggatttgattcagattatcggtaaagaagtggataaggtttatctggatatggttcattccatttccatcgaccccgaagttatccgtcgtcaaaaagacctcagcattgtgtatactccgcttcatggtgcaggtcgcgtgcttattccggattcattgaaggagtggggatttgagaatatcaattgcgtgtccgaacagatggtgaaggacggtaatttcccgacggtggtttctccgaaccccgaaaatgccgaagctctttccatggctattgcactggccaagaagattgatgctgacatcgtgatggcaagtgacccggatgccgaccgtgttggcatggcctgcaagaacgacaaaggcgaatgggtgctgatcaatggtaaccagacttgtcttatcttcctgtactacatcatcaagaaccgtatcgcgatgggcaagatgaaaccgaatgatttcattgtaaagactattgtaaccactgaactcatcaaggctgtggccgacaagaacaagatcgagatgcgcgattgttataccggtttcaaatggattgcccgtgaaatccgtttgagtgaaggtaagcagcagtacatcggtggtggtgaagaaagctacggcttcctggccgaagactttgtccgtgataaagatgcggtttctgcctgctccttgctggccgaaatctgtgcttgggcaaaagaccagggcaagacactttatgacgtattgatggaaatctatgtagaatacggattctctaaggaaaccaccgtgaacgtggtgaaacctggtaagagcggtgccgaagaaatcaaggcgatgatggataacttccgtgccaatcctccgaaggaaattggtggttcggctgtctgcttgataaaggattacaaaacattggaggctaccgatgcccagggtaacgtaaacaagctggatatgccggagacttctaatgtactccaatatttcactgtggatggtacgaagatttctgtccgtccttccggtacggaaccgaaaatcaagttctatattgaggtgaagggcgaaatgggttgcccgaagtgttatgccagtgctgaagccgaagctgaaaagaaagtggaggcagtgcgcaagtcacttggcatttgagaggaaaagaagaataatgtatatatagtgttcggaaaggtgtagctcgtgagagttgcactttttctttttacttctgtgttgaaagaaaacttaaataaagacttaaacccgatgattgatgaacaaaacgtttacagggaagtttagtatatgcagattgcggttacacaccgattggttgatgtgaatgagagtcgtttcattcgtagttgttcgtttgtgagtgtgtgctttccgcaatctgcttttatttttcagctgttcattttctaattattctccagccaccagtctatcagccttcgtgcaatgctcagtttacgcggtatttctggtaagttgtctttggaatagaaggcagcggcagtcagttcatcttcctgcagtttaatttccccactttcgtagtcggcaatgaagcccaccatcaatccgctgggatagggccaaggctgattgctgaagtaggtgatgttctttaccttcaatcctgtttcttcaaaaatttctcgttccacgcattcttccaatgtttcacccgcttcgaggaaacctgccaccagtccgtagaaagtcccacggaaattgcgtgcatgcaccagcaggatttcgttccctttgcgtatcagcacgatgatggcggtggagacgggagggtacatttcattgccgcaattgggacacttcttcataatgggggtctggtgctccatggcggtgccacatacggggcagaagtggctgtgctcgtcccaatagagtatctggaaggctttccctgcagagcgatattcatcggtagagatgtaatcatacgatgcgcgtaggcctatcattacccattcatcggtttcggccacgggctgtttaagggcgaatgcacgcacttgcttgccgttgggcgggaatacttcgtgtatattacttccggtttccggtgttagggggggctctatactaacggggacgctgtattttatttctcctttttccgtatatccctttttcagcagcagttggtctttgaagaagacgaaccactgcgtggagggcttgatttctgtcgaatcttccatgttttattatttgttataagtgaatcgttttttttctttgtaagaggaaatcagacattgagagcatttgccctgctttcttattcaggtatttcctcttgtcggacaaaactgaaatagatatgggatgattattttttatatagcaaaagtataaaatatagtgatacgaagagtagtgtttggggaggaaagttttagttgtcagcaaaaagggtgtaagatattgggaataaatggatttcttggtaataaaaaatcccccgttaaggacgagggaacctaatgttttcacaacggaataatccttattgtgacttgcttcattttagtatggcaaatgtataaaataaatatggaaatacaatacttatattaataaaaaaaatacctttgatgaaaatattcaaaatataatgctatgaaaacggtacttgggttagatttgggaactaacagtataggatgggctgtaataaactctgtaattaaagagcagagtgagagatcttggatagaaatggcaggaagtagaataattccgatggatgccgctatcttgggggactttgacaaagggaattctatatcacagacagctgaaagaacccgttttagaggagtacgtcgattgagagaacgacaattactacgccgcgaacgattgcataaagttttgaagattcttggctttctgccggagcactatttaaaaggaatagattttgaaaagcatatgggtaaattcttatcaggtagtgaaccaaaattgccatgggtaaaggatgaaaggggaaaatatgcttttttatttcagacggcatttcatgaaatgttggcggattttgcaaaacaccagccttcattggtttctgatggtaaaaaaatcccttatgattggacggtttactatctccgtaagaaagctttgacagaaatgataagtaaagaagaactggcatggattcttttgaactttaatcagaaacgtggttattaccagcttagaggagaagaggaggaagacaatgcaggaaagtcagctgaattctacgcattgaaagtcttgtcggtggaagcgactgatgaaaaaaaaggtcgggatatatggtataatgtacatctggagaatggatggatatatcgcagaagcagtagtgtaccgttggattgggagggtcaggtaaaagagttcattgtaactactgacttgaatccggatggcactccaaaattggataaatatggtgaggtgaagcgttctttcagagctcctaaagaggatgattggatgttgataaagaaaaggactgaagcggatattaccaatactcataaaacgattgggagttatatctatgatactttgttgcaggagccacaacaaaaaataataggaaaattggtgaaagcggtagaaagaaagttttacaaggaagaactgaacttgattttgcagaggcaatgtacttttcatgcagaattgcaggatagaggtttatacatgaagtgtattgaagcattgtatccgagcaatgaagtgcgacggagaaatatagctaaccgggactttatctatttgttaatggatgatatcttgttttatcaaagaccgttgaaaaccaaaaagtcattgattgctaattgcccttatgaggaaaatgaatatgtaaaccgcaaaacaggtgaagtcaaaaaggctcctttaaagtgtatagccaagtcacatcctctttttcaggaattccgtttatggcatttcctttccaatattcgggtatatcaaaaagaaaaggaagtaaatggaactttacgtttggatgtggatgtgacaacggagtttttgaaaacagaagatgattatgtggctctatttgattggttgaactctcgaaaggaaatagatcaaaaggcttttctgaaatatcctgcgtttggaatgaaaaaggaaatcaataattatcgttggaattatgtcgaggataagttctatccatgtaatgagacgaggtatgcgattctttcccgtttggaaaaggccggtgtcagtattgatttcttatctgatgaaaaagaagcagccttgtggcatatcttatattctgtaagtgataagcaggaaatagagaaagcattgaaaacctttgctgctaagaacggattgaatgaatcctttgtggaagtgttcaagaagtttcctcctttcaagtctgaatatggagcctattctgctaaggcaataaagaaattgttgcctttgatgaggtgcggaaagcattgggatgtgtctttgattgatggtacaaccaaggaaagaatagaaaggataatagcaggtgaatgtgatgagagcataggtgccaaggttaaagaaaagatgatgaacttgtcggatatatcttgttttaagaggcttccgttgtggttggcttgttatgtagtgtataatcgtcattccgaagataaagaaatagccaaatgggaaactcctgctgatattgatgcttatctggctgcttttaagcaacattcactaagaaatcctattgtagaacaagtgataaccgagacattgagagttgtcagggacatttggaaacaagttgggaaaattgatgaaatccatattgagttaggacgcgagatgaaaaatcctgcgaacaagcgaaaaaaatgactactcagattctggagaatgaaaatgctaatttacgtataaaggcattacttgctgaatttgtgaatccggaatatggggtagagaatatccgtccctattcaccaagccagcaagaaatattgcggatttatgaagatgcggtattgaagggggaagaacagattccagaagatataaatgcaatattgaaaaaattcaatgatagtaaaagtgaattaccgacgaaatcagaatttttgcgttataaattatggttggagcagaaatatcgttcaccttataccggtgaactgatacctttggctaaattgttcactgctgcgtatgagatagaacatgtcatacctcaatctcgttattttgatgattcattctctaacaaggtgatatgtgaatctgctgtgaacaagttgaaagataatcaactgggatatgagtttatcaagaattatcatggacagaaagtggaagtgggttttggaaagacagtaaaaattttttctgtggatagttacgaacgttttgtaaaggaacaatatacaaaatcgagtatgaaaatgaggaaattgttgatggatgatattcccgagcaatttattgaacgccaattaaacgatagccggtatatcagtaaggttgtcaaagggcttttgtcgaatatcgtgcgtgaaaagaatgatagtggtgaatatgaaccggaggctgtttcaaaaaatatattagtttgtacaggaagtgtgacggacaggctgaaaaaggattggggaatgaatgacgtctggaacagtattgtaggtcctcgttttgagcgtttaaatactttgaccgaaactcagtgctatggacattgggagaataaaaacggaaaaaaagtttttcaaacagaagtgccccttgaatatcagaaagggttcagtaagaagcgcatagaccatcggcatcatgccatggatgcaatagtgatagcttgtgctacacggaatcatgtaaactatctgaataatgagtctgcaagccggaacgcgaaaatctcccgttatgatttgcagagattgttgtgtgataagagtagggtggatggtaatggtaattataaatggattataaagaagccatggaatacttttacacaagatgcaagagaggtgttaagtgggataatagttagtttgaaacagaatttacgcattataaataagacaactaacgtttatcagcattttgatgcggatggaaatcttgtttatgagaaacaggaaaccggtgatagctgggctatccgtaaaccgatgcacaaagatacagtttttggagcggtgaacttgagaaaagtaaaagttgtgcgattatctgtagccttggatactcctgccatgattgttgacaaaaggatgaagagtaaagtgtttgaattgttatcttataagtatgacaagaagaggattgaaaaatattttaaagagaatgctttcttgtggaaagaactggattttgctaaagttgcagtttattattttacggaagatacggcggagcctttggttgcagtgcgtaaatcgctcgattctactttcaatgagaaaaaaataaaagaatcggtaacggatactggtatacagaagattcttctaaaacatttgtgtacaaaggaaggaaagcccgatttagcattttctgcagaaggtatagaggaaatgaaccgcaatcttttacagttgaatgatggcaaaagacatcagccgatatacaaggtaagggtatatgaaccgcgtggaaataaatttagtattggtgtgcttggtaataagggcactaaatgggtggaagcagccaagggaaccaatttgtttttcgctatttatataacagaagatggaaaaagagtgtatgagactattcctttaaatctggttatagagcgtgaaaaacagggacttatccctgtaccggatagaaatgaagagggagataggctattgttttggctatctcctaatgatttggtatatttaccaacaaaagaagaacgggaatttggtaggataaatgagccaatagataagggaagggtttataagatggtttcatcttctggaagtcaatgtttttttatacctcaaaatatttcaaatgctattattcctattaaggaattaggtgctaataataaagctgaaaaatcatgggatggtgagatgataaaaaatatttgtattcctattaaagttgatagattgggcaatattatcgagatgagatataaggcaaatgagtaatggtcaattgtttcgaggcaagaatcaaattgatttttactatgtttggtaagtatgttactaccggaatatctcagaaagaaaaaatgaacacattgccaagagcaaactttagagctttttttagaaaatgatgaataacttataaaattttattctatgattaagaaaacgctttattttggaaatccggtttatctgtctttaaaaaatgcccagttggtgattaaattgccggaagtggttaaaaacagcactttacctgaagggttcaagcaaatgtctgaggtgactaaatcaatagaagacattggagtagtggtgttggacaataagcagataaccattacttcgggagtactggaatctttacttgaaaataattgtgcagtcattacttgcaattctaaaagtatgccggttggtttaatgcttcctttgtatggaaatactacacagaacgaaaggtttcgtcatcaacttggtgcttctttgccattaatgaaacaactttggcaacaaactataaaagtcaaaatagaaaatcaggcagtagtattgaatgaatgtaccggagaagaatttaaatgcatgaaggtatgggctacagacgtgaagagtggggattcggataacttggaggctcgtgctgctgcttattattggaagaatttgtttaagatagagggctttacaagagatagggaaggcattcctcctaataatctgttgaattatgggtatgccattttgcgggcagtcgttgctcgtggattggttgtaagcggacttttacctactttggggatacatcaccataatcgttataatgcttattgcttggcagatgatataatggaaccttatcgtccgtatgtggataggttggtatatgatatcttcaaggaagaaggatcgaattgtgctgagttgacgaaagaacagaaagcgaggttgctgactatccctatattagaaactgttatttcaggaaaacgtagtccgttgatggtagctgttgggcagactacggcttctctgtataaatgtttcagtggtgagttgcgcaaaatatcctatccggagatgtaatggaccgatttagtgaatatcgtataatgtgggtgcttgtattgtttgatttgcctactgaaacaaagaaagataagaaggcgtatgcggaatttagaaaaaatctgcaaaaggatggatttacaatgttccagttctctatatatgttcgtcattgtgcaagttgtgaaaatgcggaggtacatataaaaagagttaaatcttttttgccggaatacggaagtgtcggaattatatgcattacggacaaacaatttggaaatatagaacttttctatgggaaaaaaacggtagatgtaaatacaccagggcaacaattagaattattctgaagaaaaatcccgcacaatggcgggattttctggaggaaatagcattcttttttaggctgtttcctatggttcaaagatactaaaatgaaagcaaatcacaacttttactctaattgttatcaaaatattcacgctgtttcctatggttcaaagatactaaaatgaaagcaaatcacaacttcattgtcataattttgattttatatttgctgtttcctatggttcaaagatactaaaatgaaagcaaatcacaacccgcagaagagaccttgttgttgttctccagctgtttcctatggttcaaagatactaaaatgaaagcaaatcacaacatagaacaaggggtcactgttcagtctgtagctgtttcctatggttcaaagatactaaaatgaaagcaaatcacaacttacccgctgttttgaggatgtagtctcttgctgtttcctatggttcaaagatactaaaatgaaagcaaatcacaacagtaatgttttcgtctgttgggttcttcttgctgtttcctatggttcaaagatactaaaatgaaagcaaatcacaactattgattgatattattttctttccgtaaagctgtttcctatggttcaaagatactaaaatgaaagcaaatcacaacaagaatgtcactgttttattgggcacccctgctgtttcctatggttcaaagatactaaaatgaaagcaaatcacaacgaaatcccaggtagacgctgatttcggtctgctgtttcctatggttcaaagatactaaaatgaaagcaaatcacaacaggactcgtagctgcggttggtaacatagtgctgtttcctatggttcaaagatactaaaatgaaagcaaatcacaacattactgcatccggcaaccaaaataccattgctgtttcctatggttcaaagatactaaaatgaaagcaaatcacaacgtaaatataattcttttccgttttcacagtgctgtttcctatggttcaaagatactaaaatgaaggcaaatcacaataaattcctatctttagaggatgtaatttaaactgtgtcagcaaggaataaaatattaactttgctaacac

SEQ ID NO: 737 - DNA, 17020 bp, synthetic construct
  source 1..17020: mol_type = other DNA
  misc_feature 1..17020: note = Synthetic
tttatcttttttcggataaaatgtggcagttgatggtggtcagcgctttgcttggcatcggttcgggggtgattattccgttgtccaccggtctggtttcacgctatttcacgggggaatatcgggtgaagcagtttggttacagttctgccattaccaatgtgacgctggttgtggcaacggcggtgactgggtatctggcagaggtaaactggcacttgcctttcgtggtatatctgcttccgttggtttctctgctgcttgtcgggtatttgaagggagataccggtcagccgcagaaaacagaagatacggctaccgttgttccggaggaatccaagcgtgcgattcccggtaaatacggcatccatgtccgccatctgctacagttgatgctgttttatggcgtcactacgtatgtagtgctggcggttacttttgacttgccttttttgatggaggcccatcacttctccagcggaaattccggattgatgatctccttattcttccttgccattatggctccgggtttcttcctggggcatatcgtgaagtggatggggaaacacacaaagttttacagccttttgtccattgcagcgggtttgcttttgatatggatttcgcctaaagaatggctgataataccgggatgtatgttggttggtttgggatatggtgtcattcaaccgctgatttatgacgagacagtagatacggctataccggaaaaaacaactttggcactggcctttgtaatggtaatgaattatctggcgattctattgtccccgttcattacagacttctttcagaccttgttccacactaattccaaggaatttccgtttattttcaacctctgcatcacactgctcgctatgtggtgggagtatgcgaggaagaaggattctttgttggggggggagttatgagtgatgagtgatttgttggtaattgtgctgcgctaccatgctgaaaggaaaataccaacaaatcactcatcacttataacttataacttataactcaatcgcctcatatttcagcccgaagacgtcggctacagctttgtatgttactttgccttccactacgttcaatccttgcgccagagccgagtcgtccttgcaggcttgtctccagcctttacatgccagggaaacagtgtagggcagggtggcatttgtcagtgccatggtggaggtgaagggtacggcgccggggatattggcaacggcgtagtgtacaattccgtccacaatgtaggtagggtgctgtgcgtggtggggtgggaggtttcgaaacaaccgccctggtcgatggctacgtctacgagtaccgtaccgggtttcatcatcttcagcatttcgctggtgatgaggtgtggggccttgtcaccggggatgaggacggaaccgattaccaagtcgatgttcggcaattccatcttgatgttatgggtggaagaatagagtgtctttacgtttttcggcatcacttcactcaggtagcgcaggcggggaaggttgatgtcggcaatcagtacctcggcacccattccggcagctatctgtgcggcattggtgcccacgataccacctccaaggataagtacgcgtgcgggacgtacgcccgttactccgcccatcagttttcccttgccgccttgtggcttttcaaggaagcgggctcctacttgggtagccatacgtcctgccacctcgctcatgggggtaagcagcggaagtgaacggtcttctttttccacggtttcgtaggcgatgcagacggcaccactttcaatcatggcttcggtcagcaatttatcggctgcaaagtggaaataggtaaataccacttgttcctttttaatcagtttgtactccggtgcaataggttcctttaccttgacaatcatgtcggctgcggcatacgtgtcttcaatggtcggtaaagtctttgcacctacggcgatgtatcatcgtcggagaaaccgctgtttacgcctgctgtggcctgcacatacaccgtatgaccttttttcaccaattcggctactccggcaggggtcatgcccacgcggttctcgttgttcttgatttctttaggtactccgataatcataaccttaaagttttaattggggggttaaacatggcgcaatatagcgatttcccggcttgggtgttatcggtgcatctatgttcttcaacagaatttttatgcatgttttaatcaatgataattgtagctttctgtaggtagagagaactattctttttatatttgcatgcatttaaaataatattgactgtacaaaatatgaaatattctatatttttctctcttttgttctttattggtagtgtgcaaagcggctatgcccaagaaaccgatacagacaagccctccttcatcccgccttttgattttcccatcattttctccggtaactttggcgagatacgtgccaaccattttcatggcggactggatttcaagaccggtggcgccataggcaaaccggtacgtgcgctggcggacggatatatttcgcgtatccgtgtcacccacggctcgggctatgtgctcgatgtggtgtatgataacggctataccgccatctaccgtcatcttagcgcctttgtgggtgaagtggcaaagcgagtgaaggctcttcagtacgaaaaggaaagctgggaagtagagataattcccgagcctgctcccgtgtcagatgagggagacgatagagatagaggcagtaataatctcggggtgcatatcttgggcgaatatcccgtgaaagccggtcagataatagctttgagcggaaacaccggatactctttcggtccgcacctgcatctggatatgatagagacggctacggacgaatatatagacccactgcctttcttcatggacaaagtgaaggacaagactgccccgcgtgccgaaggtatcatgttgtttcctcagccgggcaaaggagtggtggaaggtaagcagacgcgacgggcttttccggcacatcctacgaaaccattaccgcctggggattgattggtgcaggcatccgtgcttatgattatatggacggagtgcagaataaatatggcgtgaaaacggtgattctcgaagtggacggcgaggaagtcttccgcagtacggtagaccgctttgcgtacgaagaaaaccgctatatcaattcgtggacacacggccagtatatgaagtctttcatcgagccgggaaaccacttacgcatgctgcatgcatccaacggtaaccgtggactggtggacatcaacgaagaacgcccttaccggtttgtctatacgctgagcgatgcgctgggaaatacctccaaggtctgcttcacggtgcaggggcagaagacgacaattgctccggtggaacatcgtgagaaatacgccctcaagtgggacaaggtgaactatctgcaggaaccggggttagaattggtcattccgaaaggaatgctctgcgataacgtcctgttgaactattccgtgcgggctgatagcggtgatatagctttcacctatcagtgaacgatacccgcattccgatgcacgatgcctgcgatttgcgtatcggcttgcgccggcgtccggtagaggatatgaccaaatattatgtggcgggcgtaacggcgcgcggtggaaaataccgcatcggcggtaagtatgaggatggtgtcatgaaagtgcgtatacgggatttggggacttatactgtggcagtggatacggttccgccggtgataactcccgtgaaccaagctcagtggggacgtacgggaaaaatcatcttcaaggccaaggacaaggaaaccggcatcaacacctatcggggtacgattgacggaaaatatgccttgtttggaaagcccaactccatcagtggtaacctggtgtgcgagctcgacccgaaacatgtggagaaaggcggcaagcatgtggtggagatgacggtgacggatggctgtggcaactgtaccaccgaacagtttgaatttgtatggtaaagcctctcccccgacccctcccccgtagggaggggaggtcggaagttacttttgctatatatagtgtaataaataagtgtaataaaaatatgtgtaacaagctatcattctcttctccctctctttcggagaggggatgggggtgaggccttaatttattagaagtatgaaaagtaaaagactgactctttccgtcttgtttgttgtggcagccgtggcgaatgcactggcttgcaccaatctgattgtaggcaagaatgcctcggcggacggttctaccatcgtttcttattctgccgattcctatggcttgttcggcgagctatatcattatcctgccggtatgcacaaaaaaggcacgctgattgacatacacgagtgggataccggcaaatacctcgggcagatagcgcaggcccgtcagacgtacaacgtcatcggcaatatgaacgaattccagctcactatcggtgagacgacattcggcggacgtcccgagctggtggataccaccggtatcatcgactacggtagcttgatttatctcggactgcaacgttcacgcactgcccgcgaggctatcaaggtgatgacggaactggtgcaggaatatggctattacagcagtggcgagtccttcaccattgccgaccccaacgagatatggatcatggagatgattggcaagggaccggtgtgcgcggtgccgtatgggtagctgtccgcgtgcccgatgattgtatctccgcacatgccaaccagagccgcattcatcagtcaatatgaatgacaaggaaaactgcatgtactctgccgacgtcatctcctttgcacgtgagaagggttactttgatggtgtgaacaaggatttcagttttgccgatgcctatgctccgctcgattttggtgcccgtcgctattgcgaggcccgtgtatggagctatttcaatatgtttaccgaccgtggtaacgagttcttaccttatatattaggtgagacgaacactccgatgcctctgtttgtgaaacccaaccgcaaggtttcccgtgcaggatgtgaaaaatgccatgcgcgaccattatgaaggtactcctctcgacatcagcaaagatttcggtgcaggcccgtatcataccccgtaccgcctttctccactctctttcaaagtgggcgaccgggaatatttcaatgagcgtcccatctccacccagcagagtggtttcgtattcgtggcacagatgcgttccgagttgcccgaccctatcggtggagtactgtggtttggcacggatgatgccaacatgacggtatttacgcccgtatattgctgtacggacaaggttcccgtatgctacacccgtgtggacggcgccgattacatcactttctcctggaactccgctttctggattttcaattgggtggccaatatggtatatccccgctatgacttgatgatagacgacgtgcgtgccactcagacagagttggagacaactttcaatgaagcgcaggagggcgttgaggctgctgctgccaaacttttggaaaaagaccctgccaaagcgaaggcattcctaaccaactatacgaacatgaccgcccaaagcactttcgatacctggaaacgtcttggcgagtttcttgtcgtaaagtataatgacggcgttgtcaaacgtatgaaaaacggtcaattcgaacgtaattccatcggccagccggcaggcgtaatccgcccgggatacccgaaggagttccttgaagagtacgttaagcagacgggagacagatataaaatgcctgaataaaattaggatatttgaacttattcttctacatttgtgtcttacaaaaaagtttatattaacccttaaaacaataacagtcttatggaaaatcaggaactgattaagcaggtgactgagaaggccgaaaaatggcttaccccgcatatgatgccgaaactcaggcagaagtgaaacgcatgttggaaaatccagataaaaccgaattgatagacagtttttacaaagacctggagtttggaacgggtggtctgcgtggcatcatgggtgccggtacaaaccgcatgaacatctacaccgtaggtgccgcaacacagggcttgtccaactatctgaacaaatgttttgccggaaaaaaggatatttccgttgttgtggggcacgactgccgcaacaatagcgacaagttcgcaaagatttctgccgacatcttctctgcaaacggcatcaaggtatatctttttgatgaccttcgtcctacgcccgaagtttcattcgccatccgccacttcggttgccagagcggtatcaacattaccgccagccacaatcccagagaatacaacggctacaaggcttattgggatgacggtgcgcaggtgcttgctccgcacgatactgccattatcgaagaggtgaacaaggtgacggtggccgacatcaagttcaacggcaacaaggacttgattcagattatcggcaaggaagtggataaggtttatctggacatggttcactccatctctatcgaccccgaagtcatccgtcgccagaaagacctcagcattgtgtatactccgcttcatggcgcaggccgcgtgcttattccggactcattgaaggagtggggatttgagaatatcaactgcgtgcccgaacagatggtgaaggacggcaatttcccgacggtggtttctccgaatcccgaaaatgccgaagccctttccatggccattgcgctggccaagaagattgacgctgacatcgtgatggcaagtgacccggatgccgaccgtgtcggtatggcctgcaaggacgataagggcgagtgggtgcttattaatggtaaccagacttgtctcattttcttgtactacatcatcaagaaccgtattgcaatgggcaagatgcagccgaatgacttcatcgtgaagaccatcgtgaccactgaacttatcaaggctgtggcagataagaacaagattgaaatgcgcgattgctataccggcttcaagtggattgcccgcgaaatccgtctgagcgaaggcaagcagcagtatatcggtggtggtgaagaaagctatggcttcctggccgaagactttgtccgtgataaagatgcggtttctgcctgctccttgctggccgaaatctgtgcttgggccaaagaccagggcaagacactctatgacgtattgatggaaatctatgtagaatacggattctctaaggaaaccaccgtgaacgtggtgaaacccggcaagagcggtgccgaagaaatcaaggcgatgatggataacttccgtgccaatcccccgaaggaaatcggcggttcggctgtcagcctgattaaggattataagacgctggaggctaccgatgctcagggcaacgtaagcaagctggatatgccggagacttctaatgtactccagtatttcacagtagacggtacgaagatttctgtccgtccttccggtacggaaccgaaaatcaagttctatatcgaggtgaagggcgagatgggttgtccgaaatgctatgccagcgccgatgccgaagctgagaagaagtggaggcagtgcgcaagtcactcggcatttgataggaaagaggaaaaaatgtgtatatagtgttcggagaggcgtaacccgtgaggctgcgcctcttccttttgcttctgtgttgaaagaaaacttaaataaagacttaaacccgatggttgatgaacaaaacgtttgcagggaagtttagtatatgcagattgcggttacacaccgattggttgatgtgaatgagagtcgtttcattcgtagttgttcgtttgtgagtgtgtgttttccgcaatttgcttttttaaatttcttcccccctctttttaattctttaatttttaattgttctccatccaccagtctatcagcttcttgcgatactcagctttcgtggaatttcgggcaggttgtctttggaatagaaggcggcagcggttagctcatcttcctgcagttttatctccccgctttcgtagtcggcaatgaaacccaccatcaatccgctggggtagggccagggctggttgctgaagtaggtgatgttctttaccttcagccccgtttcttcaaaaacttcccgttccacacattcttccagtgtctcgccggcttcgaggaagcctgccaccagtccgtagaaggttcctcggaagttccgggcatgcaccagcaggatttcgtctcctttgcgtatcagtacaatgatggcggtggaaacgggagggtacatctcattgccgcagttgggacacttcttcatgatggggtctggtgctccatgcggtgccacacacggggcagaagcggctgtgctcgtcccaatagagtatctggaaggcctttcctgcagaacggtactcgtccggcgagatgtagtcgtacgatgcgcgcaggcctatcatgacccattcatcggtttcggccacgggctgttccaaggcgaatgcacgtacttgcttgccgttgggggggaacacttcgtgtatattacttccggcttccggtgtcagaggaggctctatactgacgggtacgctgtattttatttcttcctttgtctgtatatccttttttcagcagcagttggtctttgaagaagacgaaccactgcgtgcagggttggggttctgttgatttttccattgtttgttgttttattattttggggggatgaacacgaaaatacaaaggcacagagattcttttcaaattaatttctatgtctctgtgtctctgtgcttgcccccctaaatttcgtttgctgtgtctttttcttgtcgcacatagaccgttgaccttcccattccgcggcggcgcaggaacccttgccggatgaagttgttcagttcgtctatggcggcatgtctggttagtccgcttagctggatgtattcgttcttgttgatacatacattctgcttgaggaacagttccagttcggcttttcttgtttcttcggtggtctctactacttttttcgatttcttggtagtggagtgtacacgttccaacgtcattttcttcttgatgttgttgcggaacgtgctgctgatgcgcaggtgtacgttttggaattggacggattcggagcggattttctttttctcgtcgtcggtctcgcgcaaacatttcagtgaagtgctgaagaatccgagttctcccagctccacgatgtttccgttggcaaggaggtcgcacaactcgtcaatgcaggcatccaatgctgcccctatcacattcttgggcagatgttggaaagttgcgatatgttccacaaactccttttgggtataagtccttttcgggcagatacgtgcatggagtgatttcttgtcttctttcccgtcgggcgaaggcgtttcgtaaaggtcgtaatacgcgctcataagatatttatttttgtttatagcgataaacagttctcgtcgcttcggggaattatttttgtcgctaagcggattaattttcttcttcctaaaaactaatcgtccgacaactgttgcattatcgtccaacagttgtttaattatcgtccgacagctgtcggacgaaacagaaatgggtatgggacgattaattcttagtgaacaaaggtataaaatatagtgatacgaagagtagtgtttggggaagaaagttttagttttcggcaaaagagggatattgggaatgataattagtttttggaaataaaaaatcccccgttaaggacgagggaacctaatgttttcacaacggaataatccttattgtgacttgcttcattttagtatgacaaatgtataaaataaatatggaaatacaatgcttatattgaaaaaaaaaatacctttgaagaaaatattcaaaatataatactatgagaacgatacttggattggatttgggaaccaatagtataggatgggctgtaataaactctgtaattaaagaacagaccgagagaatttggatagaaatggctggcagtagaataattccgatggatgctgctatcttgggagactttgacaaagggaattctgtatcacagacagctgaaagaacccgttttagaggggtgcgtcgattgagagagcgacaattactacgccgtgaacggttgcataaagttttgaagattcttggcttcctgccggaacactatttaaaaggaatagattttgaaaagcatacgggtaaattcttgtcaggcagcgaaccgaaattgccatgggtaaaggatagatggggaaaatactcttttttatttcagacagcgtttaatgaaatgttggcggattttgcaaaacaccaaccttcattggtttttgatggtaaaaaaatcccttatgactggacagtttattatctccgtaagaaagctttgacagaaatgataagtaaagaagaactggcatggattcttttgaactttaatcagaaacgtggttattatcagcttagaggagaagaggaggaagacaatgcaggaaaatctgttgaattttatgcattgaaagtcttgtcggtggaagcgactgatgaaaagaaaggccgggatatatggtataatgtacatctggagaatggatgggtatatcgtagaagcagtaatgtcccattggactgggaaggacgggtaaaagagtttattgtcactactgacttaaatccggacggtactccaaagcttgataagtatggtgaggtgaagcgttctttcagagcgcctaaagaggatgattggatgttaataaagaaaaggaccgaagcggacattaccggtactcataaaacgattgggagttatatatatgatgctttgttgcaggagccacaacaaaagataataggaaaattggtgaaaacagtagaacgaaagttttacaaggaggaactgaactttattttgcagaagcaatgtgcttttcatgcagaattgcaggatagagatttatacatgaggtgtattgaagcgttgtatccgggtaatgaagtgcaacggagaaatatagctaaccgggactttatctatttgttaatagatgatgtcttgttttatcaaaggccgttgaaaaccaaaaagtcattgatagctaattgcccttatgaggaaaatgaatatgtaaaccgcaaaacaggtgaaatcaaaacagctccgttaaagtgtatagccaagtcacatcctctttttcaggaattccgtttatggtatttcctttccaatattcgggtatatcaaaaggaaagggaagtaaatggaactttacatttggatgtggatgtgacaacggagtttttgaaaacagaagatgattatgtggctctatttgattggctgaactctcgaaaggaaatagatcagaaagcttttctgagatatcctgcgtttggactgaaaaaggaaataaataattatcgttggaattatgtcgaggataagttctacccatgtaatgagacgagacatgcgattctttcccgtttggaaaaggccggtattggtattgactttttatctgatgaaaagaaacagccttgtggcatatcttatattctgtaagtgacaagcaggaaatagagaaagcattggcgacttttgcggttaagaacggattgaatgaatcctttgtggaagtgttcaagaagtttcctcctttcaagtctgaatatggcgcttattctgccaaggcgataaagaagttgttgcctttgatgaggtgcggaagtattgggatatgtcgttgattgatggtacaaccaaggaaagaatagaaaggataatagcaggtgagtgtgatgagagtataggtgccaaggttagagaaaaggcgatgaacttgtcggatatatcttgttttaagaggcttccgttgtggttggcttgttatgtagtgtataatcgtcattccgaagataaagaaataaccaaatgggaaagccctgctgatattgatgcttatctggctgcttttaagcaacattcactacgaaatcctatcgtagaacaagtgataaccgagacattgagagttgtcagggatatttggaaacaggttgggaaaattgatgaaatccatattgagttagggcgcgagatgaaaaatcctgcggacaagcgaaaaagaatgactactcagattctggagaatgaaaatgccaatttacgtataaaggcattgcttgctgaatttgtgaatccggaatatggggtagagaatgtccgtccctattcaccaagtcaacaagaaatattgcggatttatgaggatgcagttttaaagggggaagaacagattccggaagatatagatgtgatattgaaaaaattcaataccagtaaattaccgacgaaatcagaattcttgcgttataaattatggctggaacagaaatatcgttcaccttataccggtgagctgatacctttggctaaattatttactgctgcgtatgagatagaacatgttatacctcaatcccgctattttgatgattcattctctaacaaagtgatatgtgaatctgctgtgaacaagttgaaagataatcaactgggatatgagtttatcaagaatcatcatggacagaaagtggaagtgggttttggaaagacagtagaaatcttttctgtggatagttacgaacgttttgtaaaagaacaatatgcaaaatcgggcataaaaatgaagaaattgttgatggatgatattcccgagcaatttattgaacgccaattaaacgatagccggtatatcagtaaggttgtcaaaggacttttgtcgaatatcgttcgtgaaaagaatgatagcggtgaatatgaaccggaggctgtttcaaaaaacatattagtttgtacaggaagcgtgacggacaggctgaaaaggattgggcatgaatgacgtctggaatagtattgtaagtcctcgttttgaacgtttaaatgctttgaccgaaacccagtgttttggacattgggagaataaagacggaaaaaaagtttttcaaacagcagtgccccttgaatatcagaaaggattcagtaagaagcgtatagaccatcggcatcatgctatggatgcaatagtaatagcttgtgctacacggaatcatgtaaactatctgaataatgagtctgcaagccggaatgcgaaaatttcccgttatgatttgcagagactgttgtgtgataagagtagggggatggtaatggtaattatagatggattataaagaaaccatggactacttttacgcaagatgcaagggaagcgttgagtgggataatagttagcttgaaacagaatttgcgtataataaataaaacaaccaatatctatcaacattttgatgcaaatgggactcgtgtttatgagaaacagaaaatcggtgatagttgggctatccgtaaaccgatgcacaaagatacggtttttggagcggtaaatttaagaaaggtaaaggtggtacgcctatctgtcgctttggatactccttctatgattgttgacaaaagagtaaaaaataaggttcttgaattgttatcatataagtatgataagaagaaaattgaaaaatatttcaaagagaatgctttcttgtggaaagagctggatatagccaaagtcgctgtttattattttacggaaaatactactgaacctttagttgcagtacgtaaatcattggactcaactttcaatgagaagaagatagcatcggtgacggatactggcatacagaaaatactcctgaatcatctgaaatcaaaagaaggaaaggcggagttggctttttctgcagaaggtatagaagaaatgaaccgtaatcttttacaactgaatgatggtaaaggacatcagcctatatataaggtgagggtgtatgaaccgcgtggaaataaatttaaagtcggtgtacttggcaataaaggtgccaaatgggtggaagctgctaaaggtactaacttgttctttgctatttacataacagaagatggaaacagaacgtatgagactattcctttaaattgggttatagagcgtgagaagcaagggcttgttcctgtaccggacagaaatgaaaagggagataaattattgttttggctgtctcctaatgatttggtatatctgccaaccgaagaagagcgggattttggtaggataaatgaaccgatagatagggggaggatttataagatggtttcatcttctggtaatcaatgcttttttatacctcaaagtatatcaaatgctattatttccactaaagaattaggttctaataataaagcagaaaaatcatgggatggtgaatgataaagaatatttgtattccagtaaagttgataggttaggccgtattatagaagttaagtatagagtaaatgaataatataagttgtttcaagagaaaaagatccgttccgtatggaacgaggaagaacagcaatggtatttctctgttgtagatgtagttggtgtattgactgatagtgtgaatcctacggattatctgaagaagatgcgaaaacgggatgaagaactggctacttacctggggacaacttgtccccaggtagaaatggtgacagatacaggaaaaaaacgaaaaacgttggcggcaaatgtgcaggctttattccgtatcattcaatctattccttctcctaaagctgaacctttcaagctttggttagcacaagtaggttatgagcgtgtacaggaaatagaaaatccggaattggctcaagagcgcatgaaagaactatatgagcaaaaaggttatccaaaagattggattgacaaacgtttgagaggaatcgccattcgtcagaatttgacggatgaatggaaagaaaggggaatcacggaaaaaagtggttatgccattcttacggcagaaatatctagagcaacgtttggattgactccttcggattataaaatatataaggggctgacgaagaaaaatcagaatcttcgtgaccacatgtctgatttggagttgatatttacaatgcttggagaacgtgtcacaacggaaatttctcagaaagaaaaaccagatacatttactaaaagtaagcaagtagcacaacgtggaggaaatgtagccggagtagcacgtgaacaagctgaaaaagagttgggtagaagtgttgtttctcctgaaaattttctgttggattctgataaacagaatgatactttagagcttccttttcttgaaaatgatgaatgaataacttgtaaagtctatatgctatgattaagaaaacactttattttgggaatccggtctatttgtctttaaaaaatgcccagttggtgattaaattgccggaggtggtgaagaacagtgctttacccgaagggttcaaacgaatgtccgaagtgactaagccaatagaagatattggagtagtggtgttggacaataagcagataaccattacttcgggagtattggaagctttgcttgagaataattgtgcagtcataacctgcgattctaaaagtatgccggttggtttaatgcttcctttgtatgggaatactacacaaaatgaaaggtttcgtcatcaacttggtgcgtctctaccattgatgaaacaactttggcagcaaacaataaaagccaaaatagagaatcagacggtagtattgcatgaatgtgctggagaagaaataaagtgtatgaaggtgtgggctgcagatgtaaagagtggagattctgataatttggaggctcgtgcagctgcttattattggaagaatttgtttaaaatagaaggctttacaagggatagagaaggtattcctcctaataatttgttaaattatgggtatgctatttgtaggcagttgttgtctcgtgctttggtgacaagtgggcttctacctactttgggaatacatcatcataatcgttataatgcttattgtctggcagatgatataatggaaccttatcgcccttatgtggataggttggtatatgatatattcaaggaagcagaaccgaattgtgttgaattgacgagagaattgaaagcgaggttactgacaattcctacattagagactgttatttcgggaaaacgtagtccgttgatggtagctgttgggcagactacggcttctctgtataaatgtttcagtggtgagttgcgtaaaatatcctatccagagatgtgatggaccggtttagtgaatatcgcattatgtgggtattagtgttgtttgatttgcctaccgaaaccaagaaggataaaaaggcgtatgcggaatttagaaaaaatctgcaaaaggatggatttacgatgttccagttctctatatatgttcgtcattgtgcgagttgtgagaatgcggaggtacatataaaaagagttaaatctttcttaccggactatggaagtgtcggaattatgtgcattacggacaagcaatttggaaatatagcacttttttatgggaaaaagactgtggatgtgaatacgcctggacaacaattagaattattctaaaatccgcgcaatggcgggatttttttagaagcagcactctttttttatattctaacactatgtgtaatcgtttgaatattagattgttacttgtaatcagctgtttccaatggttcaaagatactaaaatgaaagcaaatcacaactaggcgagcttaattactggttttatctcgctgtttccaatggttcaaagatactaaaatgaaagcaaatcacaacttatcaagattgatttgttttatttgttttgctgtttccaatggttcaaagatactaaaatgaaagcaaatcacaacaggcgaccggccttgctcgttgtcccgtcttggctgtttccaatggttcaaagatactaaaatg

SEQ ID NO: 738 - DNA, 16699 bp, synthetic construct
  source 1..16699: mol_type = other DNA
  misc_feature 1..16699: note = Synthetic
ttttttcttttatgtcacttatttcctgaatatttaagatttcctattttttcaaacacccggaactgcttttcggcaagtccgggcgttttttcgtatatacgagagtagaatagaaaaaatacaagatataaagattattagtaacaaggtaatgagaaatgtaacattgatcctcgacgacgggagccgctttcatggcaagtcgttcggctatgagaaaccggtagccggtgaagtagttttcaatacggcaatgaccggataccccgaaagcttgaccgacccttcgtatgccggtcagttgatgacactgacttacccgctggtaggtaactatggtgtgcctcccttcacattcgaagcaaacggactgcccactttcatggaaagcgagaaaatccatgccgaagcgattatcgtaagcgattacagtgaaaaatactctcactggaatgcagtggaaagtctgggcgactggttgaaacgcgaacagattccgggcatcacgggcatcgacacacgcgaactgacaaaggtattgcgcgaacatggagtgatgatgggaaaaatcgtgttcgacgatgaaccaaataacattcccgaagctacctatgcaggtgtgaactacgtagacaaggtttcttgcaaggaagtgattcgctacaacgaaggcgaaggcaagaaaaaagttgtgctggtagactgtggcgtgaaatcaaacattatccgttgcctgctcaagcgcgacgtggaaatcatccgcgtgcctggaactacgacttcaactctctgcagttcgacggtctgttcatctccaacggtccgggcgaccccgacacttgtgatgcagccgtacagaacatccgcaaggccatgcagaacgaaaaacttcctatcttcggtatctgtatgggtaaccagctgctttcaaaggcaggaggtgccaaaatctacaaactgaaatacggtcaccgcagccataaccagccggtacgcatggtaggcacggaaaagtgttttatcacctcacagaaccacggttatgccgtagacaacaatacactgggagccgactgggaaccgctcttcatcaacatgaacgacggttcgaacgaaggtatccgtcacaaaaagaacccctggttctcggctcagttccatccggaagctgccagcggtcctaccgacacggaattcctgttcgatgagtttgtaaagttgctgtaatccactaaaaaacaaagaagacaatgaaagaaaacataaagaaagaaaacataaagaaagtattgctgttaggttcaggagccctgaaaatcggtgaagctggtgaattcgactactctggttcgcaggctctgaaagcgctgaaggaagaaggtatcgaaaccatcctgattaacccgaacatcgccaccgtgcagacttcggaaggtgtggcagacaaaatctacttcctgcccgttactccatatttcgtagaaaaggtcatcgacaaggaacgtcccgacggcgtgctgctgtcattcggtggacagactgccttgaactgcggtgtggctctctacaaagctggtgtgttcgagaaatataacacccgcgtactgggtactccggtacaggccatcatggatacggaagaccgtgagctcttcgtacagaaactggacgaaatcaacgtgaagaccatcaagagtgaggcggtagaaaacatcgaagatgcccgccgtgcagcgaaggaactgggttatccggtcatcatccgtgcagcttacgcactgggaggtctgggttcaggtttctgcgacaacgaagaagaactgaacgtgctggccgaaaaagcgttctctttctctccgcaggtgctggtagaaaagagtctgaaaggctggaaggaagtggaatacgaagtagtgcgcgaccgtttcgacaactgtatcacggtctgcaacatggaaaacttcgacccgctgggtatccacaccggtgagtctatcgttatcgctccgtcacagacgctgaccaacagcgaataccacaaactgcgcgaactggccatccgtatcatccgtcacatcggtatcgtgggtgaatgtaacgtacagtacgcgttcgaccctgaatcagaagactaccgcgtaatcgaggtaaatgcccgtctgagccgttcttctgcactggcatctaaggctacaggttatcctctggctttcgttgcagctaagttgggattgggttacggactgttcgacctgaagaactcggtaacaaaaacaacttctgccttcttcgagccggcactggactactgcgtatgtaaaattcctcgctgggacttgggtaagttccacggcgtagaccgcgaactgggctccagcatgaagtcggtaggtgaagtcatggccatcggacgtaccttcgaagaagccatccagaaaggtcttcgtatgattggtcagggcatgcacggtttcgtggaaaacaaggagctggttatcgaagacatcgacaaagcactgcgcgaaccgaccgacaagcgtatcttcgtcatctcaaaggctatgcgtgcaggctacacagtagaccaaattcacgacctcaccaagattgacaagtggttcctcgacaagctgatgaacatcatgcagacttctaaggaactccacgagtggggcaacaaccatacacagctttcacagcttccgaacgagctgctctacaaggcaaaacgtcagggattctccgacttccaggtggcacgtgccatcggctacgaaggcgatatggaagacggtatcctggaaatccgtaaccaccgtaagagtgtaggcatcgtgccggtagtaaaacagattgacacgctggcagccgaatatccggcacagaccaactacctgtacctgacttacagcggcgtggccaacgatgtacactacctgggcgaccacaagagtatcgttgtactgggttcaggtgcttaccgtatcggttcatccgtagagttcgactggtgcggcgtacaggcactgaacaccatccgtaaggaaggctaccgctcagtaatgatcaactacaaccctgaaaccgtatcgaccgactacgatatgtgcgaccgtctgtacttcgacgaactgactttcgaacgtgtgatggatatcctcgacctggaaaacccgcacggagtcatcgtatctactggcggacagattccgaacaacctggcattgcgcctggacgcacagaaggtaaacatcctgggaacttctgccaagagcatcgacaacgctgaagaccgcgacaagttctcggctatgctcgaccgtatcggcgtagaccagcctgaatggagcgcactgacttctatggaagatatcaacgcatttatcgaaaaagtaggctttcctgtattggttcgcccgtcatacgtgctttctggtgcagcatgaacgtatgttctaatcaggaagagctggaacgcttcctgcagctggccgctaacgtgtcgaagaagcatccggtagtagtaagccagttcatcgaacacgctaaggaagtagaaatggatgccgtggcacagaacggtgaaatcgtagcttacgccatctctgagcacatcgagtttgccggtgtacactcaggcgacgctaccatccagttcccgccgcagaaactgtacgtagaaaccgtacgccgcatcaagcgtatctctcgtcagattgcgaaagagttgaacatctctggtccgttcaacatccagttcttggctcgtgaaaacgacatcaaggtaattgaatgtaacctgcgtgccagccgttcgttcccgttcgtcagcaaggtactgaagattaactttatcgaactggctaccaaagtcatgttaggcttgccggtagaaaagcccgaaaagaacctcttcgatctcgactacgtaggtatcaaggccagccagttctcgttcaaccgcttgcagaaggccgaccctgtgctgggtgtagacatggcttctacaggtgaagtagctgtatcggcgacgacacttcatgtgccgtactgaaagccatgctgtctgtaggctaccgcattccggaaaagaacgtcctaatgtctaccggtacactgaaacagaaagtagatttgcttcaggcagcacgcgccctcaaggccaaaggctacaacatcttcgctaccggcggttcttctaagttcctggcagaaaacggagtggaaaacacccgcgtatactggccaagcgaagaaggtcagcctcaggcactggaaatgctacacaagaaagaaatcgacatggtggtaaacattccgcgtgacctcactcctaccgagttggaaaacggatacaagattcgccgtgccgcagtcgacctgaacattcctctggtaaccaatgcccgtctggcaagcgcattcatcaatgccttctgctctatgagcattgacgacatcgctatcaagagctgggacgaatacaaataatccgtaccacttaaagatatagataaaattaatcccctccggaactatttgtaatgaatgagttctggaggggatcttttatttatagaaaacataaaacaataaaaaagcccaccgataaaggacgatgggcaagcgcctaaatgttttcacaacggaataatccttattgtgatttgcttcattttagttttacaaaaataaaaagaaacaacacaaaagacaagtttttttcataaaaaattagtagttttgagaaaattgaaaaatacaactatgaaacatattttaggtttagacttaggtaccaatagtataggatgggcagttatcaatgccataaaagaagaaaacactcaaaaagaacaactcataggaatcaatactgcaggaagtagaataattccaatggatgccgcccaattaggagatttcaataaaggaaacactgtttcacaaaccgccaaccgtacacaatttcgtggggtacgccgattatatgagcgcaagaagctcagaagagaaagattgcatcgcatcctacaattattaggatttcttccaaagcattatgccagccaattagacaggtatggaaagtttatagccaattccgagcccaagctcgcttggacaacaaatacgcatgaaccttcttactttatctttcaaagctcgttccaagagatgctcaatgactttttacaaaacaacaaccaagtaaaaaaggttccatacgactggactttgttttatttgcgcaaaaaagctttgacacaaaaaattgaaaaagaagaattagcctggattttattaaatttcaaccagaaaagaggatactaccagctacgcgaagaggaaacagaaaaagcgtcttctaaaacacggcaatattttgacagccagattgtaacagatattactgacactgggcaaatttataaaggattaaaaatattcacaataacacttgaaaacggagagaaaggaaaatttttcagtaaaaacatgcctgactggaaaggtcagaaaaaagatattattgcaatcatagaccttgataaaaacgggaatgacaaatatgatgaaaatggagagttaagccgtcgtttcaaaattcctaccgaacaagaatgggaagaacagtgggagcttattaaaacaaaaactcaaaaagatcttgacacatctcataaaacagtaggcgcatacatctatgatacactattacaaactcctagccaaaagattcggggaaaattgattcgcaccattgaacgcaagtattataaagacgaattaaatcagatattaaagaaacaagaagaatttcacccagaattgcgagactccaatttattagaagcctgcatcgaagaactgtatcctaataacgaagcccatcgtaatgctattgcaaaatatagcatttcccaattgcttattgaagatattttgttctatcaacgtccacttaaaagcaaaaaatcgctcattagtaattgcccttacgaagaatacacatacaccaataaagaaacaggagaaatatgcacttcttcattaaagtgcatagctaaatcacatcctctttttcaagagttccgtctatggcaatttatatcaaacctgcgaatttatcaaaaggaaggaaccataaacgggaaatttactactgatatagatgtaacaaatcaatttctgaaaaccgaagatgactacgccaatttgttcgactggcttaatcagaaaaaagaaatcagacaagacacatttcttaaaaaaccagcatttggattaaaaaagaatatagcaaattatcgctggaattatgtagaggacaagacatatccttgtaatgagactcactacaagatactgtcatattgggaaaaagcaggaatagagcaatcagccttaacatcagaaatagaagagaaactatggcatattctatactctatttctgacaagaatgaactcagaaaagctttacagcatttcgctgataaaaactatttaagcgataaatttgcagatacttttcagcaaattcctcctttcgagaaagattacggttcctattctgccaaagctatcaaaaaactattgccacttatgcgtataggaagatattggaaagcagaaaatttcgacagtacaactcttgaccgtatagaaaaaaatattaactggagagtttgaagaaaacataaagaaccgaaccagagaaaaaacaatctatttggacaatttatactcatttcagggacttccaacctggctggcatgctatatcgtatataaccgccattcagagataaaggacgttactaaatggcaacaaccttcagacattgatgcttttctaaacgcattcaagcaacattctttacacaatcctattgtggaacaaatcatcatggaaaccttacgcactgtacgagatatttggaaacagacagggcatattgatgaaattcatgtcgaattaggacgtgaaatgaagaatcctgccgagaaacgcagaaaactcacccaacaaatacaagaaaacgaaaacaccaatctgcgtatcaaggcacttcttactgaatttgccaatccagaatttggaattgagaacgtacgcccgcactctccaagccagcaagatttattgcgtatatatgaagaagaagttctaaacgaaactaaagatataccagaagatattgctgttattttaaagaaattcaatgaagttgataccaaaaaacgcccgtctacatccgatgtcttacgttataaatgctggctggaacaaaaatatcgttctccttatactggagctatgattcctttaggaaaacttttcacccctgcatacgaaattgaacatgtaattcctcaatctcgttattttgatgattcattcacaaataaagttatttgtgaagcagaagttaataagctaaaaggcaatatgttaggctatgaattcatcaaaaacaatcaagaaagaatagtagaactaggattcggacaaaacgttaaaatacagacggttgaagcttatgagctatttgtgaaagaacattattcctacaaccgcactaaaatgcaaaagctattgatggaagatattccagatcagtttattgaacgtcaattaaacgacagccgttatattagtaagctaataaaatcattattatctaatattgtacgtgatgaaggagaagaagaagctacatctaagaatgttattgtttgtactggaagtatcacagaccgactaaaaaaagactgggggatcaacgacgtatggaataaactcattttacctcgtttcatacgcttgaacgaaattacggaaagcaatcgctttacgacaaccaatgcatgcaacaagacaattcctgctatgccattagatttacaaaaaggattcaacaaaaaacgtattgaccaccgccatcatgccatggatgccattgtcatagcctgcgccaatcggaatatagtcaattatttaaataatgaatcagccagcaagaatgcaaagatttcacgtcaagacctgcgacaaatattatgcaagaaaacaaaaaccgacaatttgggaaactatcaatggctcattgacaaaccttgggacacatttacccaagatatgtactccattttaagcaacatcattgtaagcttcaaacaaaatctgcgtattatcaataaaacaactaaccattatatccattatgaaaacggcaagaaagtaaactgctcacaaaaacaaagtgatagttgggctatccgtaagccaatgcataaagaaaccgtatatggagaaatcaacctgcgcagaacaaccactgctacattgaaagccgctcttgagaatcctcaaagaattattgaaaaagacttaaagaaaaaaataaaggaacttttaacgcagggactcaatgaaaaacaaatcaaaaaatactttgaagacaataaagatatttggcaagaaataaatctaaagaagataccagtatactatttcaccaaagaaactgccaacagattctttgcttgccgtgaatcaataaatacaactttcaataaaaagaaaatagaagaaaaagttgcagatacaggaatccaacaaattttactgcgtcatttagaacagaatggtaataatccggaacaagccttctcacctgaaggtattgaacaaatgaataaaaatattatgtccctaaataatggaaaatttcatcaaccaatttataaagtcagaacatacgaacaagccgataaattcgctgttggacaaacaggaaataaatctactaagttcgtagaagccgcaaaaggtactaatctgttctttgcaatatatgaaactgcccataaacgcagtttcgcctctattccattaaatgtggtcattgaacgactgaaaaaaggcttgtcaccagcacccgaaaacgaaaagggtaatctgcctaaatttatattatcacctaatgatttagtatatgtaccaacaaaagaagaaatagaaaatggacatattaaccaaccaatacaaaaagatagaatttataaaatggtaagttgtacaggaaatcaatgtttctttatcaaatccaatgtagccaatacaattattgataaatatgaattttctccactgaataaaatggaaagagctatcacaggagaaatgataaaagaaacatgcatccctatccaaacagatagattaggaaacattataacgccaatcagcctatgataaagaaaacattatattttggtaacccagcatacctatcattacgtaatgcccaacttgtcataaaacttccggaagtagagaaatgttcttcacttccggaagcgatgaaacgtcaatctgaaataaccaaacctattgaagatataggtgttgttattttggataataaacaaatcaccattacgtccggagctattgaagcattgcttgaaaataattgtgcacttattacttgtgacagtaaaagtatgcctgtaggattaatgctccctctctatggaaacactacccaaaatgagcgttttcggaaacaactggatgcttctttgcctttaaagaaacaactatggcaacaaaccattcaagcaaaaatcaacaatcaagcatcttccttatccatatgtataaacgaagatataaaatgcatgcgtatatgggctaacgatgtacgaagtggagaccccgacaatctggaagcacgtgctgcagctttctactggaaaacactttttcatgacattgaaaattttacaagagaccgagatggcataccccctaataatcttttaaattatggttatgccattctccgtgcagttatcgcacgttctcttgtaacaagcggattattacccacattaggcattcaccatcataaccgatacaatgcctattgcttagcagacgatattatggaaccatatcgccccttcatagaccagctagtctatcaactatactctgaaaacaaaatggaacttacaaaagaagtaaaagccagtttattatccatccccacaatagatgtcagaatcagtgggaaaagaagtcctcttatgatagcagcaagccaaacaacggcatcactatataaatgcttttctggagaatcacgaaaaatcatttatcctgaattctaatggaacgtttcagcgaatatagagttatgtggattttagttctttttgacctaccaacagaaacaaagaaagataaaaaagcttatactgattttcgcaaaaatctacaaaaagatggattcacaatgtttcaattctctatctatgtacgccattgtgcaagcagtgaaaatgcagcagtgcatataaaaagagtaaaatcctttctacctgaatatggtcaagttggaattatatgtatcacagacaaacagtttggagaaattgagctattttatggcaagaaagcaagtggggtaaaaacaccaggacaacaattagaactcttttaaaataataaatcccatggttaatatgggatttattatttcaagaaacaactttttctttttctaaatttacttataacctactgatagacaacaagaaacaatcaatgagttgtttctaatggttcaaagatactaaaatgaaagcaaatcacaacctctttctgaacagttcccatgccagggtgttgtttctaatggttcaaagatactaaaatgaaagcaaatcacaaccaacctggtaaccttttgtctttcgattacgttgtttctaatggttcaaagatactaaaatgaaagcaaatcacaacacgatgaaccaagattgttttaaacctttagttgtttctaatggttcaaagatactaaaatgaaagcaaatcacaacccgttataatcagggagaaatatcttattgttgtttctaatggttcaaagatactaaaatgaaagcaaatcacaacatattgagtccgatggtttgtttaaatttggttgtttctaatggttcaaagatactaaaatgaaagcaaatcacaacgacattattcggattgtagtagatgcggttgttgtttctaatggttcaaagatactaaaatgaaagcaaatcacaacagattgcacagcaaacaaatcaggcaaatagttgtttctaatggttcaaagatactaaaatgaaagcaaatcacaacggctcgccaggtaatgacatatcgcctaggttgtttctaatggttcaaagatactaaaatgaaagcaaatcacaacgcgtagaacctgaacaatttttttgagtggttgtttctaatggttcaaagatactaaaatgaaagcaaatcacaacacaagaagacgggagctcttggagtgatagttgtttcccgttgtttaaagatactaaaagtttttctatatttaaatatcatttgtccctataataacacataaaaagctgcctccacaccagagtgttggagacagcctttcttcattaataaaacctataattaatcaaccaaagggaacataaagccttttccgtcattatcatcaaacttagcttttgaaggaagaggcagatgtttggcattgttgctgaaatcccaaagcatggtttcgtcctcggtgatttctcctgtgtcaaggttccgcttctttccgtttagtggataatacagcaccagattctcatcacttccgtctaccgttttccacatgaactgcttcaactgctgaggtgtgcgggccgtcttccagaaacggatttcacgaaccagctcgttcgcaccgccaatccaaaaacctaccagaccgtaaggccctgtacggatttcacggtcggccaccaattccccattcacatatacatagtttttcttaccgtcgtacacgaaagctagcatgtaccaggtgtcggcctgtgccgcaaagacatccgccggtacgtcaatctgagaacctccagtcttaaactgaagctggtcgggacggatggtcacgtcgccgaagcgaggatagatttcatcgagtgcaccggctccagatacgagtttggtaccacagatcgagcggttgttgctctggtatgcactacggttcaccataacctccatcgtcactggtccaccttgaaatcgtccgggaacatcttggcatcttcactgccgtatccgtcaatgcgaagacacttcgtattgatgcgctgctccagtacaatcagtgattcagattcactgtcaatcacgggtaccgtaccgccactcagtttcaccggcaaagcatagcttccctgcagggagaatttcacatccttgaactttaccggcagaaattgctgcgtctgcctagaactgaacaccacttccttgcctacttcatacatttcgggcggcagcatcaggtagtccgttccatgcttcttgttgtatgcttccagctgttccttgctgccggcttctaccgtcaccgtcttggcatcgttttcctgctgcaccagcgatacggtgatagacttcacatcgacttcctttccttcttccacgaatacctgcgaagattcaccagtcttgatgtaagccccctgtgccgactggtattcactggttgcatccttgtataattcattctggcaggaacaagccagcaaggctcctgcgaatatgctgaaatataatttctttttcataattcaatttttaatctaacttacccggataaaccacatttcctaagtgcaaggcttctctgagccatttgtaaggaggagtattcgcatagtcgtattccatgtgatacgtaccgatgccaccgatgcgtctgccgtcgggaaggtccagcgtggcataatcaaaaatctgacgtccttccggataagcattgatttccggacgtacgctggtgtactcatctactccacctgtctgccagccttgctcaaactctacggtgataatggtcttccgctcccagttttcaaggtgaggctgattgattttcctaaggactgtgcggtggaacgttcccagtatgcctgataaatatagtggtcgatgtacttggaagcctcggtagaaagtttctcaggctgaccgtccattaccagcattctgccggccggacgcaaacggtctgaaagggttttgataaatacgaacatgtccgtattgcccgaattttcgctgatcatctcaccgttagccatcgaacctgaatgaccatagccgggctcatagtcaatgtcgaaaccgtccaggttgtacttctcaatggtatcgcagatggcatttgcataggccttcacgccttccacaaagttaccccctcctttttcttcaatccagtatttcttcggttcctgtcccggaggagtcatctggtcgcccaggtcctgtacaatccagcacaacagcgcttttccgcccttgatttcctgaaagaacttcaagtcttttttctgttcttccgaaaggtttccacgcgtaccccacaaggatacgaagtccacgctatcgggcagcatcttcaggtagttctgcgcattgctgcctcgtccggtccagttgccgaaccagccgaatcccttcacatgaggcgtctgacggtattctctcagtttggcaaaatagtcacgcatggagggagtcaggtcggcttcactttccgcctccagcaagggaatgtatttttccaggttctcctggttttcgaacgtttctctttcagcacggtccattcggaacaggccacgaagcctgccgccagcagcagggctcctgcatatcttatgatttttttcatcgcttcatttgttacacttttccgtaaaactcatttctcatttcggctgtttgggacggttgttgcgcacccaccacagcttggttgctccctggtcttccccacccagcagcgccggcacttccgacatgttggggtttgtaccatattctgccggagcaaagcggaatctttcgggcgtaatggcatcttcttcacctcctatgctcacgtaagctttgtcataagccggtttgagcagataaggatagcctgttcggcgatattcggtccaggcttccacggcattgggatagagtgccaggtatttctgggtaatgattttctgcaacttcacttcatccgaatcggcatcgttccacttgggagccacatttccgggagaaagcttgcaggaatattcacggttataaggcaacacagaacggttgatgtcataaggaagatcgtcagtctgcagataagctgcaactccatttgcgccgctttcctcgaacgacttggtaacaccttcttcatacaaatctttcggattgcctcctgtcagtttgtaaagagcagcctctgctttcaggaaagacacctccgaggcacgcatccagaacaaaggagaagcggcatcgaccttcggtttggaagccccattcttggcctccgtactaaggggattgtagtttgtaggaggaataggtacgaaatagccattcgaagtagccgtaaaataagcaagcaagcgaggatctttatatccctgcatgtaggcccagatggtggcacccaggcgacattctccgtagtcctctacagtcggcagcatggagttcatcagcggcaacttgtccgtactccgtattttggcctcctgtgccacggtttcaatgacacctccgtgagaagggtcaagggcaaacgtgatgtattcctttgccagtgcctcatccttgaaatgcacgcggacggctatgcgcaacatgagcgagttagccagtcgcacccagttggaagcgtttccgttataaattacatcgtacgacggaagcactttcgatgcggtattgaccagcagcagcgaagcatccttcaaatcggccagcatcgccttgtacacggtctcctgagaatccagtttcggggcaatgtctccgttgccggcattggtatatacaatcgggccgaacacatccgtcgcacggagccaggcagtcaccttgacaatgttggctacagcctgcacttccttgtcggcagggtcttccgaattcttcgtatgcttgtagatgtcattccatgcacggaacagtttcgaatagaaattctggtaggcatagctcatacgggcatccgtaaagttccacgtagcctccgtattgaaattccagttgttgttcatgccccagtaaccgatgtagttgccggccgacatgatgtccgtattggccaggtcgttacccggtcctgtcgattcagtgggcgaaccgatgggaataaccagcttctgcatgtccatgaaaggagccccatacagcagtccgcccgtcttcattccttcttccgtcacaccatagatatttgtattgatctgctcatagttgcaagatgcaagtgccaatacggaaaatacaggtatcaaatagtttcttatcttcatattatacgttgtttttcatgatttgttagaatccaaatttaaggctcactccatacgtgcgctggctgggcaacataaagtaatcgtatccctgtccgaaggtaccggtagaagccgtcagttccggatcaaaaggagctttgttgtaaatcatccagaggttggtgccatacacggaaaggttcacgctatggaacggggtatccttgaaccaggaattagggaaggtgtatcccagactggcttcctgcaggcggacgttggtagcagagtacacattgtacgcatccaggttcaccaccgactcatagtagtcctttggctgaactgccacattgcccaccatacttttccggcatcacgcgcatcggccgaagcctgtgacacaccgaactggtcgagcacggcctgtgtcttggatatcacgatacctcccagacggcagtcacaaggaagttcaggttaaagcctttgtaggtaaagccgtttctccagccaggttccacttggcattgacactgcctagcttgtaaggttccgtagattccgtggtaatggtctgaccttcgttgtacacgatgtaaccgtcctgatcacgtttcaggcgttcttccgcatatatcgtacccacttcttctccttcgcgcaggcggaaacgtcccaccttgatgtcgctcaggtcgagtgcttctccggtcacggggttcttcacgttcgaagccagtgcgatgattttattacggttggcagtagctgtcagcgaggtactgtatgagaaattgccaaaggtctggtcgtatcccagcgtcagttcgataccccggttttccacgttaccggcctgcacgaacatatagtcataacccgacgtttccgacagcttggcttcgagcaactggtcgtaggtattcgatttatacagcgtcacaccgagcgacacggtattgttcagccatttggagtcgatacctacctcataagagcgggttctttccggcttcagctccggcagcggataatacttgaaaggtttgattacacctccttcaatggagtgcgtaatggtgccgggagtcagtccggtgtaaggaataggcgaacccacctccgtataggaagcacgtactttcaggaagcccagcaccggcgaaatggactggcgcatggtttcgggcaataggtcggtcacgatggccgaaagtccgacagaaggatagaatatccatggcga

SEQ ID NO: 739 - DNA, 16660 bp, synthetic construct
  misc_feature 1..16660: note = Synthetic
  source 1..16660: mol_type = other DNA
tgctgtttccgcaacccggcaagggaatggtggacggaacccagaagcgtcaggcttttcctcttagcctaaacagccgatcactgcctggggactgataggagcgggcatccgtgcatacgactatatggatggtgtgcacaaccgttacggtgtgcacacggttatcctggaagtggacagcgtggaagtgttccgcagtgtggtggatcgcttctcggagaacgagaaccgcatgattaactcgtggacatacgggcaatatatgaaatcgttcatcgaaccgggaaatacattgcggatgttgcatgcttcaaatgataaccggggactgattgatatcaacgaagagcgtccgtaccgctttgtctacaccttgaaggatgccctgggaaacacttcgaaagtacgcttcaccgtgcatggaaagcgggcggagatagctcctgtggaacatcgggagaagtacatcttccgctgggataaggtgaactatctgcaggaacccggtctgtcgctggtgattcctcgcgggatgctgtatgacgacgcgtacctgaattatgtcgtgcgtgcagatagcggggacgttgcctttacttatcagttgaatgacacacgcatccctttacatggccgttgcgagttgagcatcggcttgcgtcgccgccctctggaagataggtcgaaatactatgtggcaggcgtgaactcccggggcgggaagtatagcataggtggcaagtacgaggacggtttcatgaagacgaccatccgggagttgggtacgtataccgttgctatcgataccgtgcctcctgaaatcactccgctgaacccgcaacagtggggacgcacgggacgcattacgttcaaggcgaaggataaagaaaccggcataagcagttatcgcggcaccatcgacgggaagtatgccttgtttggcaaacctaattccatcagtgggaacctggtctatgagattgaccctaaacgggtggaacggggtaagcatgtggtggaaatcaccgtgacggatggttgcggcaaccgggcaacagaacagtttacgttcgtctggtaaacaagtctgtatatatgtgacacatgaattaataatttaaatagctaaagtatgaaaagcaaaagactgactctttccgtcttatttgtggctgttgcagtagtgaatgcactggcttgtaccaaccttattgttggtaagaatgcctccacggacggttctacaatcgtttcttattctgccgactcttacgggttgttcggcgagttatatcattatcctgcgggcatacataagaaaggtaccctgatggatgtgcatgagtgggacaccggcaagtatctgggacagattgagcaggcacgccagacgtacaacgtcatcggcaatatcaacgaattccagcttaccattgctgaaaccactttcggaggtcgtccggaactggtagataccaccggtatcatcgactacggaagcttgatttatctcggtctgcaacgtgcccgtaccgcccgtgaagctatcaaggtaatgactgaccttgtacaggaatatggctattacagcagtggcgagtctttcactatcgctgatccgaacgagatctggattatggagatgattggcaaaggccccggtgtgcgtggtgccgtgtgggtggctgtgcgcatccctgatgattgcatctcggcacatgccaaccagtcgcgcattcaccagttcgatatgaatgataagaacaactgtatgtattcttccgatgtcatctcttttgcccgcgaaaaaggttacttcaacggtgtgaacaaagatttcagctttgctgatgcatacgctcctctggatttcggtgcacgccgttactgcgaagcccgcgtatggagttacttcaatatgtttaccgatcgtggtgaggaattccttccttatatagaaggtaaaaccaatcagcccatgcctctctacctgaaagccaaccgcaaaatctccgtacaggatgtgaagaatgccatgcgcgaccattacgaaggtactccgctggatatcagcaaagattttggtgccggtccttatcacaccccttaccgtctttctccgctgtccttcaaggtgaacgaccaggaatatttcaacgaacgtcccatctctacccagcagtcaggtttcgttttcgtatctcagatgcgctctaccatgcccgatgctatcggtggcgtgctgtggttcggtacggatgatgccaacatgactgttttcacccctgtatattgctgtactgataaagtgcctgtatgctactctcgtgtagatggtgccgactatatcaccttctcctggaattcttctttctggattttcaactgggtggcgaacatggtttatccccgctacgacctgatgattggcgatgtacgtgcaagccagtcggagatggaaactactttcaatgatgcacaggaaggaatcgaatcggctgcatccaaactctattccaaagatcctgcccaggcaaaagcattcctgactaactatacgaatatgaccgcgcagagtacgctcgatacctggaaacgtctcggcgaattccttatcgtaaaatacaatgacggtgtggtgaaacgtatgaaagacggtaagtttgaacgtaatgctatcggtcaaccggcaggtgtgatacgtcctggatatccgaaagagtttctggaagaatacgtgaaacaaaccggtgatcgctataagatgccgaagtaacaccctgttgcaggctttgtagatttcgcaggaacaataagaagcctgtgaaatctgtacaaagcagtgtaaatctttaatggaaaagtaggatatttgaacttattcgcctacatttgtgtcttacaactaatagatatattttaacctctaaaataacaataattgtatggaaaatcaggaacttatcaagcaggtaactgagaaagcccagatgtggctcaccccggcatacgatgccgaaactcaggctgaagtaaaacgcatgttggaaaacgaagataaaactgagttgatagattgtttctataaggatttggaattcggtacgggtggcctgcgcggcatcatgggtgctggaaccaatcgcatgaatatctataccgtaggcgctgcaacacaggggctttccaactatctgaataagtgtttcaaggacaaagagcagatttccgtagtggtaggttatgactgccgtaacaatagcgacaaattcgctaaaatctctgccgacatcttctctgcaaacggcatcaaagtatatcttttcgatgatttgcgtcctacaccggaagtttcattcgctatccgtcacttcggatgccagagcggtatcaatatcactgccagccacaatccgagagaatataacggttacaaggcttattgggatgatggtgctcaagtacttgctccgcacgataccgctatcatcgatgaagtaaacaaggtgactgttgccgacatcaaatttgaaggtaacaaagacctgattcagatcattggtgctgatgtagataaggtttatctggatatggttcattctatttctatagatccggaagttatcaagcgtcagaaagatctcagcatagtttatactcctctgcatggtgcaggtcgtgtgcttattccttcttctctgaaagaatggggatttgagaatgtaaattgcgtacccgaacagatggtgaaggacggtaatttcccgactgtggtatctccgaaccctgaaaatgctgaggcgctttctatggctatcgcattggcgaagaaacttgatgccgacatcgtaatggcgagcgatccggatgctgaccgtgtgggtatggcttgcaaagatgataagggcgagtgggtgcttatcaatggtaaccagacttgtctgatcttcttgtattacatcatcaagaaccgtattgcaatgggcaagatgcagcccaacgacttcatcgtgaagaccattgtaacgactgaactgattaaggctgtcgctgataagaataagattgaaatgcgtgattgctacaccggtttcaaatggattgcacgtgaaattcgtttgagcgaaggcaagcagcaatatattggtggtggtgaagaaagttacggcttcctggcagaagattttgttcgggataaagatgccgtttctgcctgttcattgttggctgagatctgtgcctgggctaaggatcagggcaagacgctgtatgatgtgctgatggatatctatgtagagtatggtttctctaaagaaacgactgtaaacgtagtgaaacccggtaagagcggtgcggatgaaatcaaagccatgatggataacttccgtgctaacccgccgaaagaaatcggaggttcacctgtcaaattgatcaaggattataagacattgaagatgatcgatgctcaaggaaatgctgttgatctggatatgccggagacttcaaatgttcttcagtatttcacggaagatggtacaaagatttctgttcgtccgtcgggtacagaaccgaaaatcaagttctatatcgaggtgaagggcgaaatgggttgcccgaaatgctacgccagtgcggatgcagaagcagaagaaaaggtggtggctgttcgtaagtcactcggtatctaaagataaactgctgtaaggcagaaggaaaggtgtaatcctgcgaagggttgcaccttttttgttttttgccgggcagtgtgtgctttctttccggattaaggttcttttactttctttaagtcattcctctaatcattctctgttaaatgccgttctataagcaacatctaaacctaaactaaaatagttatgaaagatcttgttgccggcattaagtatgatgccgctaaagtgattgaacaggccgtagggccaagtaaagaattctgcatgggttacatgaaccccggtgctccgaatggtcagggatacatctctaccatgaaactctcagtgggcacagtcgatgtaaaagaccttgacgtagttaccgaaaacattgtttcgtatgaccgttgcgaaaagaacgatgcctatatcggacaaatcaatatgctgaccgtatcttctttctgtggtcagaacggtgctgtatggggatacgacctcgctgtacacgaagatattgctacaggtaaggagaaacccatgtacatgcaggaacaaccggatggaaaacccgctattcccgtatataatgcccgcccattgctggaagcaagcgaacgcctcttcggacgtgagggccagcgacgcttcccacccatgccgggagcacacgtcatctgcgccaacaaggatgtgacagcccgcggacctgtgtgggtatggtcggccattggcatcgctatcctgaaaaatcgtagtgacggctcttgcctcttcatcgaggatgccaacacgtatggcgatgataggactaccgaagccgaaatcataggtttcctggaaggctcactccgtaaagtaaccaacagcattgtgctgtgtggacaagaccagtcggtagagtacgaccgcatttatgtagctacaagtacactttcgtagaaccgaatcaagtgggttgcgcgttgacttgcgccccgtacatttatctggctcagaatgccattcccgagggaatgaaagctgccgacctaaaaggcatgcctatcgacgagtgggaaaagaagctgggacttgagcacctggcaatgattgaataataagacctaacctagactttacctatataaatatttttatcatggatgaaatgaaagggacacgttatcccattttcggatttgtaacaggtggtacaggcgcttttaatgacggtattccacctcagccttatgaaacctttgcctatgacctcgccttgcacgaagccggaattgaaaactttaatgtaattccttacacctctgttatgccgcccgaaatacgtggcaacctggtgaccattaccccggagatgaatcagaaattccattatctgcctttccgtcccgacattaaagaccagtttcatcatggagcagtgctggaagtgattgtcgccggatcgggtgccaactatgtcgaacataaagcaattgctaccggcgtgggcatcgtatgggcaaagaagaacggtaagtttgtgggaggttttgctgccgagtatgtgcagtattacgactcaaagattgatgatgaaatagcgggtgcagaagtacgcatgtggttgaataagtcgttgaatcatgaactctccatgcgtggcatggaacaggacggtgataaggagttattccataatttcatcaatataccttccgataatccgtttgcatactgtctgacggctatcggtttcctgaactttggttatgcaccattagctaaataagtgatatggcggatacttcaaagaaattaggattgggcggactcgtcgctatcgtcttcggttccatgattggtggaggtattttcaatatctcgcaaaacatggcacaaggagcggggttaggggccactcttatctcctgggtcatttcgggagtgggagtattgttccttgtgctcaacttcaaggtgttggccgatgcccgtcctgatctcaatgaaggtatctatcagtacgcaaaagagggttttggcaattatgtgggatttaacattgcctggggatactggctgtgtgcagctatgggtaacgtggcgtttgccgtgatgctcaatgactcgttcggtgagtttctccctgtgctgcttcatcatggctggcagacggtggtgtttggatcgttcttcatttgggccatgtatttcattgtggcaagaggtgtgaaagctgctgccgccctgaatacaatagtcactatcgtgaagttcgcggcgttgatattaattgtcattatcctctttattttctttaaaataggtgcgctgagttttgatttctggggacatacgcctgacttgggatccataggagcacaggtgaagagtaccatgcttgtcaccctctggtgcttcatcggtgtggagggtgccgtggtgatgtctgcccatgcccgcaacagtaaagatgtgggtaaagcgggtgttatcggttttctgctggcgttggtgctttatgcattaatcagcgttttgtcctatggtatcatgcaccagcctgaactggcaaagttggatgacccgtccgtggcatacgtgctgaaacatgcggtgggcgactgggcttatacctttgtggtgctcagtgtcatagtctctgttattggtggttggattgcctggacgttgatgtgtgcgcaagtaccctatacggctgctcaggtaaagatattgccgaagtcattcctacgtgagaataagaagtcgacacctatttatgccttgctgatatccagtatcatcatgcaggtgtttatggtgatggttgctatggcaaagtcggtttacgatgccgctatcgacattaccggtgtcatgatccttcccgcttatctgttctgcggaatctatctggtgaaagccagctttatgaaaggggaactgagcacaacagatccgaagaagattggtcaataccgctttatcggtatcgtgtcttctttattctgcctttggttgctctatgcaggcggattgttgcttttgcttgtgacgtccattttctatttggtgggtatctatttctatgtagtggcacgcaaacagaaccgggcgcagggggaaccaatcttctctcatgctgaacgttggctggcactggccattgcggtttgctccgtaatagcggtgatactgttgattgagggaaaggtgggactctgatcatttaaaattgaagaattaagagttaaaagttgtcggctgccgggaggcagttgccgatagagataaaatacagattgcggttgcacgcgattggttgatgtgaatgagagtcgtttcattcgtagttgttcgtttgttgagtgcgtgtcctccgcaatctgttcttatttcatttatctctctccttttaactttttaattcttctttttgatttagccaccagtctatcattttccgtgcgatacttagtttacgtggtatttccggaaggttctctttggagtagaaagcaccggcactgagttcgtctttctgtagtttgatttctccgtcttcataatcggcaatgaaacctaccattaatccgctgggatagggccaaggctgatttccgaaataagtgatgtttttcacttttaatcccgtttcttccattacttcccgttctacacattgttccagcgtttctccgggttcaaggaatcccgctaccagtccgtagaatgttccgcggaagttgcgtgcatgcaccagcaaaagttcttctccacggcgtatcagtacgatgatagcggtagaaatgggtggatatatttcgtaggcacacgaaggacactttttcatgatagctgtttgttgttccgtaggcgtgccacataccggacaaaagcgactgtgctgatcccaatacaatatctgataagcctttccggcagctttgtagtcatccagggtgatgtattcgtaagagcctcgcaggttgaccatgatccagtcttcagtttcctcaacaagttgttcgatgtcgaatgcgtgcaccatttcatccgtaggcagaaatacttcatgaatagtgctacctgtaccgggtttcaacggtggtttcgtaccataaggtacactgtatttaatctctcctttttctgttctttcttttttcagcagcagttggtccttaaagaagacgaaccactgcgtagggttttgatctagttctttcattttccttcttcatttttgatgtatactacatttctgcctgttccgcgtcggcgcaggacgccttcagtgataaatgcattcaactcgttcatggcagttcgctctccgctaccggtcagcctgatgtattctctccgtgagacgcagacatttttatcgagaaatgtgagcaatgcttcttttttcttttcgatattgatgtctccctttgaaggacgggtaggtgactggatacgttctaaggtcatttgagttctcattttctttttgaacgccttgctagtgcgcagacacacatttttgaagacgattgattctgcacgtatctttttctccggcgtggcttctcgcagacatttcaaggaagtgctaaggaaaccgagttctcctaattctacgatattaccgtccgatagcaattcgcacaattcgtccgtaataccctgtagagctccttccaacagggcgtacggaaggtgttggagcatagctacttgtttcagaaactctttggtggtgtacgtttttttaggatagatacgggcgtgaagcgctttttctgctttttttcctttcggagcgggcgtttcgtaaagatcataatatgcactcataagattttgagttaaagggttaatgatgttgtttttacgaagtgcataaatatattcttgttctttcagtaattaaattctttagttctgacgaattaatattgcattcgcatgaatttatttgtgcaacaagtataactctttcatgcaatatttgtatatgtctcgtgcaacaaatgttgcatgaaaaaatcacatcctttgcatgagaaaattttagcatgcaaaggtataaataatagtgaaacgatggagagttttcaggaaaagaattaataattgtgcatggtgttgaaagtgtagtaggggcaaggcataaaaaatcccccgttaaaggacgagggaacctaatgttttcacaacggaataatccttattgtgattttctttcattttagtacgacaaagataggaaataaaaatggtataatctatacttctgatatttattttttctacttttgtgaatatgaactttaaaacatgatattatgaaaaaagtaacactgggtttggatctgggaaccaatagtgtgggatggtctgtcataaattcgataattaccgaacaaagtgaaaaaatatggttagagatggctggcagtcgaataattcctatggatgctgctatattgggagactttgataggggaaataccacttcacagacggcagaaagaactcgtctccgcgggataagacgtttgcgtgaaagatgtttgttgaggcgtgaacgattgcacaaagtattgcacatattagaatttttgccggaacattattctgagcagataagctgggataaacatccaggacaatttatgaatctgacagagcctaaattggcctggaagaggagtgatactggaaaatatgaattcatctttcaggccgcttttaacgagatgctggctgattttgcacaacatcagccaacattagtggcaaatggtaaaaaagtgccttatgactggactatatattatttaagaaaaaaggctctgacagagaaaataactcaacaagaattagcgtggattatattaaatttcaatcagaaacgtggatattaccaactgagaggtgaagaggaagaagaaaaatccaataagcaggttgaatattatgctttgaaagtagtgtgtgtggaggcaacggacgaaaaaaagggaaaagatacctggtataatgtacatttggaaaatggatggatttatcgtcggtcaagtaatgtcccattagattgggagggcaaaattaaggagtttattgtgacaacagatctgaatgaagatggaactcctaaagttgataaacaaggtgaggttaaacgttcgttccgtgccccaaaggaagatgattggacactgataaagaagaaaacagaagcggatgtggccgatagtcgtaagactgtgggctggtatatctacgatatattactgcaaaaacctcagcagaagataagaggaaagttagtacgtactatagaacgtaaattttataaagaagagctaaagcagatattagaaaaacagtctgttttccatactgaattgcaagaccgtgatttatataagaaatgtcttgaatgtttatatccgcaaaatgatgcacacaagcgcaacatcgctaatcgtgattttgtgtatatgtttacagaagatatccttttttatcagcgtccattgaagagtaagaaatcgttgattgacgattgcccttatgagaagaatgaatatgtggacaaggagactggtgaaataaagcatgcgtcattaaagtgtatagctaagtcgcatccattatttcaagagtttcgtttgtggcattttctatcgaatatcaggatttatcaaaaagaaaggcagcaaggagacagattgttgactgatgtggatgtgactagtgaatttttgaatacagaggaagattgtgtagctttatttgaatggttgaatgaacgtaaggaaattgaccagaagaattttctgaaatatcctcagtttaatctgaaaaataaagcagtcaactatcgttggaattatgtggaagataaaatgtatccttgcaatgaaacaagatatttaataaaatcccgattagacaaagcacatgtcttctccggagactttattttatctgcagaaaatgagatggctctgtggcatatactatattcagtcagtgataaagttgaattagagaaggcgttagccacatttgcaactaagcatgctttagataaggtcgctttcgttgaaacctttaagaaagcgcctccatttgaaaaagagtatggagcttattctgccaaagctattaagaaactgttgccattgatgcgaatgggaaaatactggagtgcagatgctattgatgaaacgactagagagcgtatagacaaaatcgtaactggcgaatatgatgaaaagattcataataaagttcatgagaaatctatacatttgcagagtgttgatgacttcagaggtttacctttatggttggtttgttatgttgtctatgggcggcattctgaagtgaaggacatcgctaaatgggaaacgccatctgatatagacgcttatttgaaagcattcaagcagcattctttgcgtaatccgatagtagagcaaatcatagtggaaacactacgtgtggtccgtgatatttggaagcgtgtagggactattgatgaaattcatgtggagttagggcgcgaaatgaaaaatacagcaaaggatagggcaaaaatgacgatgcaagttttggaaaatgaaaatgctaatcttcgcatcaaggcattattgacggaatttgtgaatcccgaatataacattgaaaatgtgcgtccctattcaccaagtcagcaggagttgttacgtatttatgaagatggaatattaaattatgtagcggatatcccggaagatattgagaatttcctgaaaaaactgaaagacagtaaatctccttcaaaatcagaatttatgcgatataactatggttggagcagaaatatcgttctccttatacaggagaaattattcctcttgccaaactgtttacaccggcttatgagatagaacatataattccccaatctcgtttctttgatgattcgttcagcaataaagtaatttgcgaatcagaagtgaataagttgaaagataaatacttgggatatgagtttataaaagagcatcatggacgaaaagtcgaattgaatttcggtaaagtcgttacgattttttctgttgaggcttatgaacagtttgtgaaggaacattattcgaaatcgagggctaagatgaaaaagctgctgatggatgatataccggaagagtttatcaaacgccagttaaatgatagccgttatattagtaaggtaattaaaactttactttccaatgttgtccgtgagaaagacaaggatggcgagtatgaacaggaagcaatctcaaagaatgtggtggtttgtacgggtagcgttacggatagattgaagaaggattggggattgaatgatgtttggaatagtattgtttcttcccgattcgaacgtttaaaccaattaaaagatacccaatgcttcggacactgggaatgtaaggatggaaaacgcttttttcagattgaactgccgctggaacttcaaaagggatttagtaaaaagcgtattgaccatcgtcatcatgcgatggatgctatcgttatagcttgtgcctcacgaaatcacattaactatttaaataatgagtcagcaaggaaggatgctgaaataactcggcgtgatttacaaagattattgtgtgataaatataagacggatgataatggaaactataaatggatgatcaagaaaccgtgggatacatttacacaagatgtgcaggctgttttgaatgatattgtggtaagctttaagcagaatattcgggtgataaacaagagtactaattattatcagtcttatgatgaaaaaggtaagaagacgttattagcacaaactaaaggggataattgggcgataaggaagcctatgcataaagacacggtattcggtagagtgaatcttcgaaaagtaaaggaggtacgattgtctgtggctttggacactcctgaaatgattgtagataaaaaattaaaagcgaagatattgcagctcttttcttataactatgataaaaaacgtgttgagaagtattttaaagaaaatacagctctttggaaagatttgaatctgacaaaaatagctatttactattttacagataattcttcggaaccattggtagctgtgcgcaaagctttggatacaagttttacagagaaaaaaattattgaatccattacagatactggaattcagaaaatattattgaaacatttggagtctaaagaaggaaaagcggatttagctttttctcctgatggcattgacgaaatgaataggaatctggaatttctgaataatggtaaacctcatcaacctatttataaactaagggtttacgaaccacgtggtaataaatatagtgtgggtgagacaggacagaaatcaactaaatttgtagaagcagctaagggtacgaatttattttttgctgtctatgctatgggagatggaaagagagtgtatgaaacaattcctttgaatattgtaattgaacgtgaaaagcaaggctatactcctgttccggagaaaaatgaggctggaaataaattgttgttctggttgtcaccgaatgacttggtttatgtgcctacagaggaagaattggagcggggtaggattgaggaactgatagataggaaaaggatatataaagttgttagttttacaggaaatcgtttatatggagttccttatgcaattgcaaatatgatagttgacaaggtagaatatttctctttaaataaagttgagattacagatagtaaagaatcaattaaagagaaatgtattcctttaaaagtggataggttgggtaatataataaagattggaactttaaaatgagtatactttttgtgaaaaaaaacatttggtttggaatagaaaagagttctttgttgatgtaataggtctattgactgacagagtcaattttacagattgtaaaaaacagaatagaaaatggtaaatgttctggggacaacttgtccccaggtagaaataatcatagaagggttcttgctgttaatatcaaagctctatttagtaactccaattagttgatatttacaaacgaataatatgcatcaattgccatttgaagtagatgatgagtggtaatcattaaaatagaaatactatgattaaaaagacattttattttggaaatccggtttatttatctttaaaaaatgcgcagttagtgataaaattaccggaagtggtaaagaatggaattttaccagaaggattcaaacagaagtcagaagtgactaagccaatagaagatattggtgtagtggtgttggataataaacagataactgttacttcgggagtattagaggctctgcttgaaaataattgtgctattattacttgtgatagtaaaagtatgcctgttggtttaatgcttcctttgtatggtaatacaactcaaaatgagcgttttcggcagcaattgaatgcttcacttccattaacaaaacaattatggcaacagactgtcaagcagaaaatagagaatcaagctgctgtattgcagagatgttcgggtgaagagataaagtgtatgaggatatgggcggccgatgtgaagagtggagacccagataacttggaagctcgtgccgcagcttattattggaaaaatttatttgaaatagagggctttacaagagatagagaaggtattccacctaataatttattgaattatggatatgctatattacgagctgttgtggcgcgtgggttggtggtgagtggacttctgcctacattgggtattcatcatcacaatcggtataatgcttattgtttggctgatgatataatggaaccttaccggccgtatgtggatgacttggtttatggtattgtgaagagtgggataggttatgaggtattgacaaaagagataaaagggcgacttttgtcaattccaacattggatgttgtcatttcgggcaagcgtagtcctttgatgatagcggtggggcaaacaactgcctctctttacaaatgctttagcggtgagttacgcagactatcatatcctgagatgtgatggaacgctttagtgaatatcgcattatgtgggtattagtattgtttgacatgctactgatactaaaaaggataggaaggcatatgccgattttagaaaaaatctgcaaaaggatggttttactatgttccaattttctatttatgtacgtcactgcgcaagtagtgaaaatgcggatgtacatataaaaagagttaaatcttttttgccagagtttgggcagataggaatcatgtgtattacagataaacaatttggcaatattgaactttttaatggaaaaaaggctcaggatgcgggtgcgccaggacaacaattagagttgttttaaaattaaaatcccgccaattagcgggatttttagttgaaaacagcttgttttttataattctaatttgcaatgtaatggattgattattagattgtaatagggaatctgctgtttctaatggttcaaagatactaaaatgaaagcaaatcacaactcattatatccgtattgcagagccatgcctgctgtttctaatggttcaaagatactaaaatgaaagcaaatcacaacgaaggtctacaagcgtaagctcaagatgcagctgtttctaatggttcaaagatactaaaatgaaagcaaatcacaactgtgagtgtagtttaggcgggtcaagtgcggctgtttctaatggttcaaagatactaaaatgaaagcaaatcacaacaacgacaacgcatccgccaacgtatcagtcgctgtttctaatggttcaaagatactaaaatgaaagcaaatcacaacataagggaagcaagactattgtctaccgcagctgtttctaatggttcaaagatactaaaatgaaagcaaatcacaacacagtggctgaaactcgtcatgcccatagg

SEQ ID NO: 740 - DNA, 16613 bp, synthetic construct
  misc_feature 1..16613: note = Synthetic
  source 1..16613: mol_type = other DNA
ccaacgaccccgagattacaaatcacgtgctctggccaactgagctaaagaggcaaattcttgcagccgtttagaagtcggcaaagaacccattgtaaaacggctgcaaagatactacttattttttaatcgccaaaacttttgattatttttttcaacgattcctgtttttctccttatgtttcgtaagctgcactttcattgcgtcaacaaccaaatccacaccctcttcaaaggtgtcacaagtcttcgctacaaaaaagcgttgtcccggcacatacaccgtgatacttgtttctttattgagcgctgttgcaggctttactacttttaattgcacctctactttctgtatatcctcgtaggatttctccaacttggaaattttcttctcaataaaagcctctaacttctcggtagtgtcaaaatgaattgactgaattttaatctccataatacgtctgttttaaaggttatgcccgtggatgggcgtttaaatattcacgctttaattgttcaaaagtcgtatgcgtataaatttcagttgttgacaaactctcatgtcccaacaacttctttacgctttcaatgcccgccttatgattcaacatcgctgttgcaaacgtatgacgtagcacatgcggtgtacgctttttcaaagtgcttaccaacgaaagatgcttttttacgcgataccgaatggcatctgccgtcatctgttgcccatcatttgcgagaaacaatgctgcagaatgtctcaccacttgcgcatcacgcacacccatataatgttgcaatgcttgtgacaactcggttccaaaaggaaccaaacgttgtttatttcgcttccctgtaacttttaattgcccactcataaagtcgacatcgccatcacagagattcatcaattcagccaaacgaatacctgtttcatagaaagtcatgataatcattctatcacgaacatcctcataacaatctgtccaaaagtcctcttgcagcaactcatccatctctttctctttcagaaattgtggaaggggcttatctttctttggaccaacgacaccttgaacaggatcgcttttcaccaaatttcttgctaatgcgaaacgataaaaggagcgtaaagcactcaaacgtcgattgatggatgttgcgcgttggccttcattcatcatttcagccatccaatctctcaccaaatcagcatcaacatccgcccataacagcgtagaatcctgcgcttggacaaatttttgaaaggcctctaagtcctttctatagcttgaaacggtcgctaaagagcgattacgttcatagcttaaatatgccaagaattgattcaccatctgttatgcgttactaactttcaattcgttttcagcaacgaacttacagaaataaaatcagactaccaaatttttaacgagattttactcctcgttagtacgcaatttctgtacgtaaacggcgtgttccatcttgagacgcttcaaaacagaaggcttgttatactgctgacgagaacgaagctctttaacaacacctgtcttttcgaattttctcttgaacttttttaaagctctttcgatgttttcaccatcttttacgggtacaataatcatgtttcttttaaatttattaattgatttatatagcgctcacagtcaagcatttaccctccaacgagagccaattcgcccactacaagcggctgcaaaattacgaagttttcaagaaagtcccaaacaaattactgattttcttttagttatcccgctgcataagcacaaagaaaccagctgtaatcgtttacttctccaccttattatatagactgacgctgcacactttccaatcgcttattcagcaaatcaagaatggcttgcggcttcatctcgagattatccaccggaaagctctcttgcgcaccaatcgactcttcattcattcgccgaaaagctttcccgatggcatgcgttgcttccaactttctcaccctcacgtcgggtttatatttcactgcaatttgcaccgatttactcacaccaaccaacgtaaaagcctcaacatcggcaaagcgaacagcccaaacgcgctgtccatctaccgctaccccgtcatctgaaatgaccaaataaggatgatcccccaagcgctcacgcaccaaaaggtagattaaatacaaaccaccgccaccaaacagcacgatatttccccacgcaaggagtgcatcaacaccaattatcagcagataaacacctatacccgcacatgcatcgcataacaataacagtaaaacatttttctgcaacgaccgataaatcttaatttcttccatatctatcccttcattatttttacacctgcaaatataccataattctcattccattacaaacaatagcccaagaaattagtttcatccactcatcctggccttattctcttcttctaatgcgctgccgatatttgttattcaccacaaacggcacgcgctccacagtgacattactcgtgtcaagtcccaaagcctgttcatcatccacaccaatatggcggataaacccaaagagatggagcgtgatattatctaacgcactcaccacagtcgaagcataataaatgcgatgaatgacgataaaacggaagtcacccgcaacattatgtttgcgcaacgaaggataaccactacgaatatcaaagcgacgctgggcgattaaatcttcaacaatctgacgaaggtaaagggtcatcagcggattcacacgaaatcccactcgaatatcaatggtgtaaagcgtgttggcaatcaattcatgacaagtgtaatccaatgtgttgggcgcatcgtcattggtgaaatgcaccagaaaataatggtcagcccgcttcggttgcttattgacaatcgaataaatcagtttctcctccaccatattttcatcatcagattgccggacataaaccaagttggttgcaaattttggtaccgtttcatccgccttcaagtcacgaatgacatcataataatccgaaagtttcttaaatttcaaatactttctacgaatattccatgcgcgataccaaatgcgcataacagcacctgtgacaagtgccaataggattgtaaaccaacctccatgcacgaatttcgtcaagttggctaaaaagaagaaaccctctatgcccaaataaacaaacaaaaagatgaggactgcccaaaggggtgtgaaccgttgctgcaaataaacggccaacatcaccgttgtagtgagcatcgtgatggtgatagacagcccataagcggcctccatgtgtgccgatgtctgaaacagcaacaccgtaacaacacacaagatataaagcagattgttgatctgtggaatatagatttgtcctttatcaacagagggatacttaaatttcaacgtgggccagaagttcaaatgcaccgcttcactaaagatggtaaagcaaccactgatgagcgcttggcttgcaatgatggcagctccggtagccatgacaatcccgggaataagcaaccaatcgggcatcacggcataaaaaggattcatgcccgtgtgtacactgtcgagatgacccatgatataagccccttgccccatataattcaagatgagcatggccttaacaaacagccaactgatggtgatattgcgacgaccacagtgccccaaatcagaataaagcgcctcagcacccgtcgtacaaaggaacactgcaccaagaattaaaaaccattctggcgaagacaacaacagctttagggcataataagggttgaaagcctttacgatgagtgggaaatccacaagatgcacagcacccaacacccctaaaagcagaaaccaaaccagcatgaaagggccaaaataagtgccgatagaccccgtaccaaaacgctgaataaagaatactgtcgagataatggcaatcacaatgggaacaatgggaatatcagccgagaatgtatgcagtccttctatcgccgaagtgaccgtgatagcgggtgtaatcacaccatcggcaatgagcgtactggcacccaacatcgccacaaccgataaccaacgatagcctcgtttgcgtatcaaggtgtaaagtgccagcacacctccttcacctttattatcggctctgagcgccaccaccacatatttcagggtggtttgcaaggtcaatgtccaaatgatacacgacaccgcacccaaaatataattggcatcaaaatgtggatttgcacgtaaaatggtgcgcatcacatagagcggtgaggtgcctatatcgccaaaaacaacgccgatagcaatcaacagccccatggctgtgagctttttgtgggttgaagttcctgaattcatctttacatctttttattgatgcgtgcaaaattaatagaacctcaaaaaagagaatatcatcatgggttaaaaaaggctaacatcacgccctacttatccgagactatctcacacgatttctactcatgtgcccaacgacaccaacagccaccatcaaccatgcctatcagcactgcattgcaacagctgtgctatttcctgacaatagcatgcaaattgtgctgcaatatggtgcagattgcatggcaatgcggtatatattagtccgcaatatgcacgctattaaacccgcatcctcccctactctcaacagaatgtaggcaaggatgttatgcccaaagcaagcggttttgcatgcgttcaaaaagccttaaagatacaaatgatggcagccatcggccacaaaacaaaaaaatatatcccaaaagttgttgctttatcagataaacactacctttgagacagcgaaaaagaaaaggacgagtcgccccgccctgtttgttttcacaacggaaaaatccttattgtgacttgcttaaataatatctgagtgcaaatataggagttttctactaaagaaccaaataaaataaagaaaatatatgaaaacaattcttggcttagacttaggaaccaacagcattggttgggccaaagtcaccgttgatgacaatgaaaattatttaagagacattcaacttggcagtcgtatcatccccatgagccaagatgttcttggcaagtttgacaaaggagtaacagagtctcaaaccgccatccgaacgagcttccgaggcattcgacgcctcagagagcgcactttgcaacgccgcgagcgcctccatcgcgtgctacacacgttgcattgcttacctccccactacgattcggccattggatgggacaggaagacacccactacctatggtaaatttttaaatcatggtgaacctaaattagcatgggaacgccgagaagatggcacaatgcaatttcttttcatggatgctttccatgagatgatagcagacttcgctaaatatcaacccgcgctcgttgctgacggcaagaaggtgccacttgattggacgatttattacctgcgtaagaaagcacttacgcaacccatcaagaaagaggagcttgcctggattttgctcaacttcaaccaaaagcgtggctattatcagctgcgtggcgaagaggatgaagagaatgccgcaaaacatgaggaatatcatgagttgaaagtggttggcgttgaagtcgatgaagcgggaaaaggtgacaacacctggtataatgtgaagttagagaatggctggatatatcaccgtcaaagcaaaatacccttagacgactgggtgggtaaagtcagggctttcattgtgacaaccgaatatgaaaaagatggaacgacacccaaaaaagataaagaaggcaacgtgaaacgctccttccgctcaccagatgagaaggattgggggctgcgaaagaaacaaacggagcactcgttagaagcatcgggcacgcctgttggcgcttttatctatgaccacctcttaaaagaaccctctgataaaatccgcggaaaattcatccataccatcgagcgtaaatattacaagcaggaattagcagccattcttcgcgagcaaagcaaacaccatgaggaactatgcagcaaggacatgttaaaagcatgcatcgaagagttatatccaaacaacccacttcatcgtgaaagtctgttgaaaaagaacatgacttacttgctcatagaggatcttatcttctaccaacgcccgctgaagagcaagaaatcgctgattgcagagtgcccctatgaggcctattcctatgtggacaaggaaacaggagaaatgaaacggcaaggcattaaatgtatagcaaagtccaatccctactaccaagagttccgtttgtggcagtttatagccaacttacgcctacgcaatcgagccgatgagcgcgacgtaacagccgaatatctgcctcatcaagaagactatgtgcgcctgtttacctatctaaacgataggaaagaaatcaatcaagagacgctgttgaaggactttttcaagttgaagaaggtggcgataggcggtgaaaaggtgtttcctattcgctggaactacatcgaagacaaagaaaagaaatatccttgtaatgcaacacgccacgaacttctccttgtataatccgtaaaacgaagcgttccgaaaaaataagacgaagcgttctgccttgtaaaacgaaatgttcttttttcaggttccccccctccacaatgtaaaacgcctcagatttctctggggcgttttgagtttcttatttattacatctcagacattcaagtcgaacttcacgctctcatcaccgtcaagcagtaaccttgtgcgctccaaattattctcgtatatatgtacattgccgaggttcagcattatattcttcagcggcagatctatctgtcgtgccataagatagaggtggtatatatcggccggtagtccgaggttcgcatcactgcttcgctgataggccgacaaaaccagctcgccttcgtctatctggaactgacccaggctcaggcatggtgtctggttgctctccgcacctgtctcgccgaggaacagcacatagttctttgagtcgcgtttctcgcgatttattctcgctatcaatggtggcagtttctcaaaataggtcggatagctattcaccagcacacttccgcaatagtcccaccagttaatgcctgcttctcgatatcgctccacctgccgctcaccttgcatgaacaactgtagttcatttttcaatttctttcttgcaatgctgtggctctcaaatatgtcgagcaggtcgccaggtgtcaacgacagctgctcatttagaagatagcgaagattacctttcttattggcctggggctttccctgttccagaatcttatccagtatctgatagtatttattcatcattcgaatggtgtttgaacagtgtttttataaagcatgatatccgtgtaagaggagttataattcatgtgtgcattgaattctaccttggtgcacattttaaatgggttgtctatatgcttatttcgtcctatccaatcacatagttccaatatagatgatttattgcttgtgaagtaaacaaacgagtgacccgagagaactgatagcacatcaagatagtctgcaagtttccaatacatcttataagtgccaacatcggtacttaggtacggcggatcgaccaggaatactacatcaggcatgtccttatacttcttaaatacctccttgtagtcgctggaggtgatggtcaacccgtcgagatagtctgtgcaaggcgaatagtccgtagtcttgatgttgttgtacaaggtttctttttcaaagtcagagaactcggtagcatacttcattgcaaacattaatgaagaggacagtgttatataatcggcatatccgtaggtccgttcatgttcacgtattaatgatagaacttgctcacgttcctttccctgtatcggtttatgtcgtggaacactaacaacgcctcttaaccttgtgagcagctcgttagtttgcggtatatgttccaatcgtttgcgatagccatcaaagtcattgtagacaacaatagcatttggtttctgacacttggcgatgtgggataaaagaccactaccaccaaataggtccacgaaaattgaattatcagggaactgctggagtactttgatgtactcttttgcgaacatccgcttttgtccctgaaagggaagcggtgctgaaagatattgtttcttcatcattctttgtttttttagtggcttgcaaaggtcggtatatcccacgggggaaaagaatattcatctacaatcatactgcaaatatattacactcatagttcattcgctttatgaagctatacacagtacgctcactcacggcgtagcgagttgacaacaccaacacgatataggataccttctcaccatgccgatgtagttctgtataatcattatagaggtctatatactgctcgtctttcagacgtataccggcctcgcgaagcctttttatcaattccctgttaaatttcaagatgtctattatcttcatattcaataaaatttgtatctttgcattatctcacttgcataattaagaagcaccatatgtgaacgagggtattagcccccggtcgcacatatggtgcttttgattaatatgtaggtgagatgactattaacaggccgggggcttctttttcactccccgggagattatttaattgactatatactacattgtcagccaatcgagtttttctgcatcttcgaacgttctgtctgagcctttgaacgacttaagaagttctgcggcgtcgagagagtcgatatccacttcaacttctttttctgacaacgaattgaaatactccttgccttttttgttccacgcagcgaaccactcgtttatctctgcgatttcgcgtttttcagcagcagtcatgtcacgtgcctcttcctttgcatgtagttccctttcctgcgcttccttgacgcgctgctgcattttctcaaattcttcatcctgaagcgttgcgcgcacctcctcgatgtctttatcgtaagtctctgagatagggcgcaaggctttgaggttcttccacaccgcaagcatcgcatcatcactcataccgcttactttcaacgcttttaatgccctgtaggcttcaactgccttaatcgtttttactttcattcttactttaattcttactaaattactttgttatttacttttcttttgcttctgttacactgactgtgccgagcttcgctgcgtttgccttgcagtacttcacaaacttagtaacatctgtgataactgcaataatttcgtcttcgtcggtagtaagatagctgatgttgattcccccgaaatgtgcgaaagttgcgagctgtttatttgcatcatcattactactaacgctgccattttctatattcgcatacttatcgctttctacagaaacgaccgccttgattgttgtacttgcgcctactgcttcaacacgtgccttgaagccggcaattgcttttacttttacttccatagtttgtgtatgtttattgttactaatttaagttgtctctaagttatcatttaagtcaatcattttgacagggacctgatcggtctttttcataaaaatgtattctaatcgatatctttggcctgtttgtataccattaaaaaaatgagtatatgtttcgccaggattgacatgctcgaaattatatgcttgttccccttttatcatcggagaatccatttctgtagaagagaatctcaacataacataaaaattgtttctcgaattcccgggataagatttatcgatttttatttttacacaaatttctcctttaattgtctcaaatgcctgtataacataatatttttcaacattatattgattagatataactttagtttcagaagcactaaatccgtgaattgtgtagtaaatagctttcacaggaggtctatttaatgcaagtggtacagaacttaagaatgcataagctttgtaaactcctaaacccaaatttgcatcttttatatctacgcttgcatttcctgatttcaagggctcgttagaagtcttaaaacaaacaatttgtcctgattcattttttaaggctacaccgaaatatgtttctgctaatatacctatattatatatattaagttcataatcaatactaatatctttaatcatcataatagcagtaatactaccattttttgtcccttcaaccataatagaaggccttttaaaaggtgcagttgcagcatgcttgtagcctatgaaatcagaaagccgataagggcatgcaaaagtagagcctacttttacacgcgaccagctgcccaagcctttatcgtataattctgtcaagctttgtaaagtgttactatgcgcgatttttataccgcatatcccgacaccctcaaagtccgctcccttgaaccacgttgcattgtcacgccaacgattattttcaaaatcaaactcgtcagaggtaaagggtttattcagttccacgggcttaaactttgcccacatattgattttgtcgctcctgcaaagtgctgcaaggtcgttactcgtttcgccgagtgcagtcttcacatctgcgatgctgacaggggcttgtatgataccattaatgatactcatgccgggcctcctttctctttataacaagtcacgctgccagttacgatgagcgagcccttgacgagcaggtcgccctcaacgattaaatcgccttcaatcgttccagccttggggataaagtgtcttaagacttctttttctactgtcacagtcttgactatcgtctttaccgtgcacacaccaaactcctcggctaaccactttattaatctcttcatgctaattatgttttaaaagttcgacttcgttttcaagttctcttatccgtttttttaatctctcaactttatcatcaacttgtacagctgccccaagcgcgagtgcaataagtctcgtgtcaagatagttaagcttcaagtaaccgtctgcattcgtacagaccatactcttgagtgcactatctttcacgctctgcgcaataaaacctatgctgtgctcgcccgtgtccttgtaatcgaactgccaggtaccgccaagactgcggattatccgcatactatcaacctgcttgatgtttgttttcaaacgcccatctgacgttgtgtaagctgttacgccaccctgcgctaacacattacctgaaaaagttgcattccggtcaggagttataacaagtgcgtcctgccaaccgctattatacacgttaaaatgtaactcactacctacaaaaagcgtgtaaagtggtcggtcgttacaaccgaaataaacgacattagaattagagataaatagcgcacgttgattatgtccctctttatctcttaagttaagccctatattattcgcaagacttaaatatccgtcaatggtgagattgccatagatttcgctaccactttcgtggaagcgagcaatgagggtgctgctatcttttgtaataccgaaaccaaggctgttgtcagcacctccgcgaatattacctatctgatagtgcgtgccataccacgcaaaatcaagcgcatgtcggattgcagcagctgtaacaacagtattctttattgcactattgttatttgttattgttttaatatcacaattttctgtaccagaaagtagtattcggtcggcaattcgtgcagtgccttttatattcagtttgtaaggcgaatctttttcagtatctccgacaacaacattgccgttattcaagatgctgaaaacatgcttcgctacattattccacaaaaagaacctcgtcggataaccaccgaacacccactcgtttccactcgcacattgacacctgtaagaactctcatcacctgtggatgtcaacttaacaccagaaaagccactatgcttgacagtaagcatcccatcgatatttccagtcccgtcgaaattttgtccccatagtagccggctatcctttaatttcgttgcagatacagcgttactattaagtggtagatacttgcctgatacaatatcatctgttaattgtgagagtttcgttaggttcttttcgtcccatatttttatccacttcgcatctttgatttgcttgccatcagcttcattcttacgataatatacgctttcatttcgctgcgtagggagtgcgagttgactaatccagttcacgctgtcatttttagaccagtccatcgaaatgatatgtctccaatcatcgccaattccgctctttgtagtcatcacagcataatagcccgacacctcaggtgcaaaattgacttctctgtacgtcttgaatgtatcaacaataccataaccgtcaatggttgtaggcttatctcgcagctgcgagaaagcgtgcgtatgcgatatgcttgcagcatctgtaatgccgtacccctgcagagtcgtaggcttattcaatagagatgcaaaagagtgcgaatgtgtagacggattgaactcattcggcttacctgttatttcattccaggcatacgagggcttcgtcgctgccttggcccaggcaggtacatcgctggcgggcattgaggtaggtttgttcctgataatcgaccagtccaccgaggtcaatgcacctccctcaactttcttcaatcgctcgttaaggtcattgcccaaaaatgcagagaggacggctgctgcttttgcagtagtgtaatcgctccaacggtccaggcgctcatagcttgtgccgccactttcgctaccactaccttgcgcggagcctgcaccgaatgccgtcaatccacctgtagcatacagccctgctgccttacttgtatccgaaatacgtgtcagcgaaagtgcgccactcgtctcatcatagctgattttaatatcgccgatggtgatgcccttgaggaaatttatcaattccttggctgtatcttccttatccttgcgcaggaactcatcgtatgcagggctgtcctccgccaaagcccgtgctttatcggcataggcagcccgggctgcatcgtttgcctgcagagccttgtctgcttgttctgcaaacgtagccttgtctgccgacagtgcatgccgcacgtcgtcactctgtgtccaggacgtcgtgctgccacccctgtcggttccctcagcccgctttcgggcaaacatcttgatatcaatcattgctgtctatttcctttaatgtcagttctgccgttccctctgcaaggtttctgctgatgccctgcacaaagaagttcttgtttagataattatgcctatagtgcgcaaacgggtctacaaaccctccgcggatatccgtcatgtgctgtgtcatgatcacccggggcgcatgatattcctgatagtaactgttcacatagagctgttcgggtttggcgatactatcggttaaccgattatacaatataagtataccatcaccgctggtaacgtctacaggagtagaaaggcaaagggtattcttaacgcctatctgcatgcattcgtcatgcgtcagggcagaggtaaccttgaactcaaggtcatccttgcggttgcaaaatgaactctgcgcagcactcatatatacgatgtcgtgatcatcgccgagtagttccgtctttccattgtcactcaccaccttcacttcaaaagactttatctgtattgaactcacgtgtgccagcagtggaatggcatcttcggtccactttgtgtgtctgaagaatgtaggatggcggcgtgtgatatcactccaaagcacattcaccggcccaaggacgataaaccttacagcaccagcaatgtggtcgcgtttccgaataggtatagccatgccttcactgtctacgccatgcttccagctgatgttattctgcaggtcatactcgtgaccaactaacttgtcaccaatcttggggtcaaatccaatagtaaaactctgcgcgtagtattcatcatcactgctgcattccgagcgttctttgtatttacgccactcaaaatcttccatctgtgagccgctccctgtctcaacaacgcatttatcaccgataataagcatacaggctacgagtcctactttgctgattttgtcggttccgtcacccacgctactatatttaaactcgtactcttcaggtgctgtatccgtaaatgggtaccatcccgaatcaccttctttatcccatagtgcttcttcattttgtcgcggatcagacacttgttgcttccaaaataggcgtgtataatagcacttatctttcgacttgttctttacaatattaattgggaccttactatcagacgccttgtctgcaaatggcattaatatccactcctttgttctgagatcattatatctacctgttacttccataattgggtttagtagcatttttcctgaaaatacaatgtaatttatagtctcctcatcgacaggagaaaacacaccaccagaatgctgcccctcataagttgcataaggaatagcctcacgaagggcttccacattcggataagcttccgaggagctattcttcccattaccattcactgacagcacaagtacagtctccatattgattttcgacacggggctgttatctttccttgccatagcccgctccaccttgccataagaaacaagccctgctccaagatgcttaccgagccattgcaacattgcatgttgattcttgccatctcgcccgaaatagctattaaggtctttatcagcattggctatattatcatgcatcagaaatttccactcaggatgccgctttatccacacataccaatctacaatactaccatcatcataatctgtatcaccattgaataccatttcataaaagcctctcaaagctcgtttgccatcgcctaagctgatcagttctgacatgtatttttgacgcgccgtgaaatagctccccaattcattttcttttaatggactttcgacaagactctccatcttctccaccttacaggttaatagcagctgattatagatttcgccaacactgatagtggtatccgtacctaccgccttatctgtcgttatccctatcagtctgtgaggtgtagttagagacttgttgctgtaaaggtctttccattcaatattttctgccttttttatgctttcccatgaaaatacatagaaagaaaatccctgctgtacgatgtgcaggttaagatacttcagcagttcagtcagcacctcttctaccgtccacacattatcttcattatcagagaggaacaacagctcatgaatgcctatctgtgagaaaatattgaatgtaggctccgatttattcattccgatactgccgtcataataacaagctaaactttgctttccaagaatatcaagattatccgtcagtccagacagctgctcacgaatgatatctaagagactgcgctgtcctgcattctctttcacctccttataggtgatcccctgcacgccgacattttggtactttccatattgcagggctgttagcacatcgatacagctgagttcgatttcatcttcttcctcattgtaaggttgcgaataggtctgcggttcgataaaaccagcaaaaaggcattctccctcacgatagatatttactacagcatcacggcaggaagcacagaacaggtcaggaatgaaattcttcaccagcagtcgtatggtagcctgatatttgagcagcacatcgaacgtatcgctcacttggctttctatctccacggggtcatccgtccagttgatgccgcagcccttggctccgatttcaacttcatttgtgcgatcacctcgaatgagaatgtgcacctcaatgcgctcgttcttttcattataaaattgtccgtgtatatacatttttacaatttgatatttgttttccgtctactgatacgtgtttcgttagccatcgccagcacaatatcacgtccgcgaaggcgcgcctccaatcgcccgccaccattaccaccatcaccgataatcgattttagtttattcagcggtgcaatcacctcaggattagaccttgccccggcatattcgcccatgatcgagagcgttggtccataaacgatgccaccgtcggcaaagggagtaacaccgttgatgaagttaaagaggcgactctgctgcgccccgttgagtatcatttcacccgagttcacgcgagccaataatttatcaccgcttggcgatgagccgcccacaatgccaccattagcaaatgcaccgctgatagaggccaatgcggccaccacagcagccacacccgcggcaatggcaacgatgttataggggaacggcatgcttgcaccgcttgctgtagcactggcaatggcttcaccacttttagcagctgtgttggtaattgttgcagctgtgtcggcagctgttgcggcggtatgcgtcgtcgtagccgctgtttctgttgctgtagccgaagctttcacgccgcttgctgctgcgctggcctgtgtggcccccgtcagcaccttgatgatgtc

SEQ ID NO: 741 - DNA, 16610 bp, synthetic construct
  misc_feature 1..16610: note = Synthetic
  source 1..16610: mol_type = other DNA
ttaaaccacatgttcctccgcttgtgcgggcccccgtcaattcctttgagtttcaccgttgccggcgtactccccaggtggaatacttaacgctttcgcttggccgcttgccgtatatcgcaaacagcgagtattcatcgtttaccgtgtggactaccagggtatctaatcctgtttgatacccacactttcgagcctcaatgtcagttgcagcttagcaggctgccttcgcaatcggagttcttcgtgatatctaagcatttcaccgctacaccacgaattccgcccactttgtgcgtactcaaggaaaccagttcgcgctgcagtgcagacgttgagcgtctacatttcacaacacgcttaatctccggcctacgctccctttaaacccaataaatccggataacgctcggatcctccgtattaccgcggctgctggcacggagttagccgatccttattcataaagtacatgcaaacgggtatgcatacccgactttattcctttataaaagaagtttacaacccatagggcagtcatccttcacgctacttggctggttcaggctctcgcccattgaccaatattcctcactgctgcctcccgtaggagtttggaccgtgtctcagttccaatgtgggggaccttcctctcagaacccctatccatcgttgactaggtgggccgttaccccgcctactatctaatggaacgcatccccatcgtctaccggaatacctttaatcatgtgaacatgcggactcatgatgccatcttgtattaatcttcctttcagaaggctgtccaagagtagacggcaggttggatacgtgttactcacccgtgcgccggtcgccatcagccttagcaagctaagaccatgctgcccctcgacttgcatgtgttaagcctgtagctagcgttcatcctgagccaggatcaaactcttcattgtaaatataatgtttttgttttctctgtttatatgctcaagactacctgttatttattagagtaattgacggtttgttttaaacctttgttacttgcataccctgtttccagtgcagtgcaagtcccttgtacttctctacaaaatagttttatgtaatttctttcaaagaactctttgctgtcgcggtggtgagtggtgtaccgctcgtcccgtttagcgagtgcaaaattacggactttttccataaccaccaaatgttttcgcaattatttttcaagaaaaaattgcgcgaaaaggacaaggcgctaaaacacaaagctttgcgccctgaaaaatttttcgacttttttcggtcgacaacacggcaaaggtaggaaacgataagaatatggcaaaaacctgcggcggaatttttcgggttttatgccgaagaatatggtttcgggagaacccaaaacataattaagagcatttcgcggcccaacaatgtttgttggagtaccaagaatgagcggattctcacaatatgtacaacagtatctttgcgctttatgcaaacgtaaagaatatctatggggggctattaaaacaaggtccgctctaattatgttttgaacgatagctttttcatatatatataatgaacaacagaactgccccaacaagacatgcgccattctgcaacaacgttccgaagccccctgtataaaaacgaagtgacttcgtgaatattcacgaagccactcgaaatgttttcacaacggaataatccttattgcgaattgctttcaattagcaagggcaaagtaaacaaatatttttcagaaagcaaagccttttcacaataaattcactacatttgtaaatgtttctatacagagggctgttttagaataccaggtaggcctgtacaacaactcatttttaaaaaagactaccaggtgttatggattactgacacataaggaactatgtgttttgtattcctcacaccatgtagccgtcaacagtacataccccttcaaaactggacataataggacgcctcttaacccgttcaccaaacataaaacacaaccatataatatcatgacaaagaacacaaggaacatcattggcttggacttaggaacaaatagtattggctggagctggattcaacagctaatatcacctaccccaacgcaaccttcagaatatctttttgacggaactcctattattaggatgtctggcagccgcatcattccgatgcctggagatgtcactggaagctttgagcgaggcgaaaccatctccaagaccaaagacagaacagctaagcgcatggctcgccgcatgaacgaacgctttcaattgaggcgtgaacgtttaaaccgcgtgctaaatattatgggctttctgcccgagcactatgcacgcgctcttgaccgctacggcaaattaaacgaagaaagcaacaccaccatcgcatggcgaagcaaagaagacgggaagaatgaattcatattctatccgtccttccttgaaatggcatctatttttaaggagcaccacccagatatccaacgcattcctttagactggaccttatattatctccgcagcaaagctctacaccaagccatcaccaaggaggaattgtcatgggtgttacatagtttcaatcagaaaaggggctactatcaatcacgcgaagacatcacagaggaagacaaaacgaaaaaggtcgagtacatcaaaggtgtcgtaaactccgttgaagacactggggaaaaagcgaaaggcaaaaaatatataaagtgaccttcgccgatggcactgagtttacaagcacaaagtccgaagcccccttatggattggacgcacacgggaaatcattgtaacaacatcgcttgacacctctggaaaaccaaaacttgacaaagaaggaaaaatcatccagagcgccaaaactcccgatgagaaggactggactctgataaagatccgcacagaggccaccatcgatgacagcaaactgacagtcggtgaatacatttttcacgccttgcttaaaaacccagagacaaaaataaaaggagcacacgtcagcaccatagaccgtcgcttttacatcaacgaaatcaacgccatattaaaagagcaagaaaaataccatgaagaactaagagacaagtccctctacgagcagtgtatcaaagcgttatatgctcaaaacgaggtaaggcgcaacatcattgccccttggagcatgaaagacctgcttacaaaagacatattgttctaccatagaccccttaaaagcaagaagtctcaaatttcagaatgcccattggagttccattgctatacggacaaagatggggaaacacatcggcaaggcatcaaatgtattccagtatcgcatccgctttttcaagaataccgcatttggcaattcatatccaacctgcgcatatatgagcgtgagcactttgacaacggcaagcattttaccaatgtggacaaaacctcggaatttctaacgagcgaaaagaaagaagaattgtatgaatggctggcggagagagattccgtgagccagaagaccttgcttggcaaaatcggactaaaggttgaagattatcactggaatttccctgaagagaaaacctatccctgtggggaaaccagacatctgattcagagcaggctgaagaaagccaatcttcagaaagccttccattccctgatttctgatgagcaaaaagaatgtttcgaacggggtttatggcatatcctctattctgtcagtgactataacgagctgtgcaaggctttaaaaacttttgcaagaaaaacaggattcacgctcgaagaacaacttctctttgttgaagcattttcatcctgccctcccttcaaaaaagactacggagcctactgcaaaagagccatcaccaaattattgcctttgatgcgcatcggaaaattttggcacgaagaatccatcgataccacaacaaagacccgcattgaacatctcatctctggagaggaatgcagcggcatcgacgtccgcgtacgcgaaaaagtcgccaaagccgggctctgcgaatccatagaacaatatcaaggtctccaacaatggctcgcaaactatgtcgtttacaaccgacattcagaagcgtctgaaatcatcaaatgggaatctcctgacgaattagacaattacatcaggtccttcaagcaatattctctacgcaatccaatcgttgagcaggtttctcttgaaacgctgcgcgtggtgcgtgacctatgggctgaacttcaaaaagaaggtcaaacgattgacgaaatccatttggaaatggggcgcgaccttaaaaacacagccgaggaacggtccaagatttttagaagaaacagcgagaacgaagataccaattttcgtatcaagcttctgttggaagagttttacgcaaacgaaaaagacataaaagacgtgcgcccctattctccctcccaacaagagctcctgcgcatctacgaagagggcgtttggcaacaagaaaaagatattcctcaagacatcaaggacatcaagaagcgaatctcgaacgacaaggacattaaagacatcacgcccaacgacatacaacgctacagaatctggatggaccagaagtattgttctccatacacaggcaaaacgataccactgtcccgtcttttcaccaccgactacgaaatcgaacacgtcattccacgttcacggtattttgacgactcctataataataaggtcatctgcgaagctgccgtcaacaaagacaaaaacaaccgactgggcatggaatacatcatagctgctggaggaaaaacgattgaactcggcaacgggaaaaacgttcaaattctgaaggaagaagaatacgttgaactggttgacaaaatctttggcaacaacacgcgcaagcgcaacatcatgctggcagacgaaatcacagaagagttcagccatcgccagttgaacgacacacgctacatagcgcgcttcatgaagggcatcctgtcgaacatcgtgcgcgaaaagaatgccgacggaacattggaaccagaggaaacttcgaagaatctgattgtttgttcaggccgaatcaccgaccgcgtcaagcaagactggggactgaacgacatttggagccacatcgtcacaccgcgatttgaacgactgaacacaaagacctcatccaacgattttggagaatacgtgtgcaaagatggcaaacgttatttccaaacgcgggtgcccctcaatctgcaaaagggcttcaacaaaaagcgcatcgaccatcgccaccacgccatggacgccattgccatagcctgcgtcaaccgaagcatcgtcaactacctcaacaatgccgccgccaaccaaaccgaacgcgaagaccttcgccgtgccgtgtgcatcccggaaagaaacggacaaaccaaacgccaactccgttcaccatggcattgttttgcaagggaggcagaaaacgccctgcggcaaatcgttgttagtttcaagcagaatctgcgcgtcgccaccaaagccacaaacagttacgaatgttttgacaccgcttccggcaaaaaaatccgaaaacaccaaagcaaccgtgaacactacgccattcgaaaaccgttacacaaagattccgtctacggcgaagtcatcctgacaagcatcgcttccgtcaatctaaaaaaggctctgctgaaagctgaaagaattttagacaaacgcctaaaggagaaaatctttgagttgcgcaagctctacaactatagcaacaaacaaatagaggagcatctgacaaaggtgtgcatcaattgtccggaatggaagaactacgatttcaaaaagattgccgttcgcattctttccaacgatgcagatgccacacacattgttgccatacgaaaaccgcttgacgaatcctttgatgaggtcaaaatcaacaccatcacggacactggcatccaaaagattctgaaaaaccacctaagccgatacgccgatgacccgaagaaggctttttcgccggaaggcatcgaagacatgaatgccaacatcgcatcgctgaacggcggaaagcaacatctgcctatatataaggtgagggtctctgaaaaaaacaacggtggctatttccccatagggcaaaaaggtaatcgtcataaaaaatatgtcacaacggcccaagataccaacctattctttgccatttatgcagactcaaaaggcaagcgcagttacaagaccattgatttgcgcacggccatcgaatgccgaaaacaaggattgtccgttgccccaagcataaacgaaaaaggagacaaactgcttttcacactctctcccaacgaccttgtatatatgccgtcggaaggggaagagactaacggatttgccatcgacaacaatctcaacaaagagcaaatctataagatggtaagcgccaccaacaatcgatgcttttttataccccacactgtggctgacttcatatccagaggccaagaatacaattctgtaaataagattgaactcacagaagacggacgcagcatcaaagagcattgcgttcctctgaaagttaaccgcctgggtaaataaaacactctaaagaatctggcaacaagactgcaattgtaaatcaaaacagatgattacaattgcagtcttatgctttttaaaaccttacgaccatgataaagaaaactctctattttggaaatcctgcctatctgagcctacgcaacaaacaattggtcatcaaaatgcccgcagtggagaaatctcaaaatgttgcagacatcattcgagcagaatcaatcacaacaaaacccatagaagatttaggagtggtggtgctcgaccaccaacaaatcaccatcactcaaggactgctggaagctctgcttgaaaacaatgtcgccctgattacgtgcaactcccgaagcatgcctatcggcctacaactgcccctctacggcaacaccattcagaacgaacggttccggtcgcaactcgatgcctccaagccgctgcaaaaacagctatggcagcaaacgatgaaggcaaaaattgaaaatcaagcctacgttctcaaacacaatacagaaacggaaacacaatgcatgtttgtctgggccgactgcttgaaaagcggcgaccccaccaatttggaagcacgagctgccgtttattattggaaaaacctttttcgcaaggaatgcgctggcttcatccgcgaacgggaaggcatgcctcccaacaatctactcaactatggctatgccatcctgcgtgccatcattgcacgctcactcgtttgcagcggcctgttgccaactttgggcatacaccaccacaaccgatataatgcctactgcctggcagatgacattatggagccatatcgtccctacgttgacgaactgatattgagaatcatacggagcaacaccgactacaaagaattgacaactgcgttgaaagcccaattgctaagcatcccaatattggatgtcaacatcaacggcaaacgcagcccgctcatgattgccgcatcaacaaccaccgcctctctggtaaaatgtttcagcggcgaaatacgcaaaattgcctatccgtcaatgtctacgagttgattatgaaacgtttaaacgaatatagagttatgtggattttagtgttctttgatttgcccacagaaacgaagaaagacataaaggaatatacaatattccgcaaattccttctggacgatgggtttacgatgtttcaattttcaatctacatacgtaactgcgccagcagcgagaatgccgcagtacacatcaaacgaataaaatcacgccttcctccacatgggaaagtgggaatattatgtataacagacaaacaattttcaaacatggaattattttttggcacgaaaactcaaaaagttcaagcggaaggggttcaactggaattattctaaaacaagaaagaggtagaaccgagaaaagcctttaccatttctcattctacctcttctatgacaaactttttctttttctatttgtcactataacacattgatttccttcacataagacgaatcgagctgtttgccataggacaaaattactaatttgaaagcaattcacaacgattcggtcaaagtaaatttgcccaatcgcgctgtttgccataggacaaaattactaatttgaaagcaattcacaacactggcgatggtattattttgtctcaaaaaagctgtttgccataggacaaaattactaatttgaaagcaattcacaactgcattaaggtgagcctgttttacaaattgctgtttgccataggacaaaattactaatttgaaagcaattcacaacgaactctgcgaacatttttttgtcgttgtcgctgtttgccataggacaaaattactaatttgaaagcaattcacaactgacgaattcagcatctgcgttagatttgtgctgtttgccataggacaaaattactaatttgaaagcaattcacaactcaccttgacaatttcagaggaaaacattggctgtttgccataggacaaaattactaatttgaaagcaattcacaacataggtcatcaacgagtagcagccattatagctgtttgccataggacaaaattactaatttgaaagcaattcacaacaggtcttagaggtggcctttctctccagcgctgtttgccataggataaaattactaatttgaaagcaattcacaaccaaatttctttctttttgctcattttttgctgtttgtcataggacaaaattactaatttgaaggcaattcacaaccaacagagcgcataatatattcctcgtgggttgtttgtctgaacaaaatcaccaatttgaaagccattcacaaccgttatacacacgcagattccgcaccaataactttttgtcatgattcaaattacccatttgagagcaatttagaactaacattcacctcataccacactgccgcctgtgccatcgcgtccttgagggcttctaaaaactgcttgtagttctcctgtgtgatggtgatatgatgctccgggtgttgtccgtcgtggtcgccactcgtcagatgaatgatgaagaatgtgcggtctgtgtcgtgatgcgccaccatacctcgcttcttcaaaatcgccatagtgcgctcaaagtctgccggcgtggtaggcaccacctgaagaacgctccagggatattcctgtgccgtgagaagtatttgcccttcctgctcagaaagcaggaaggaataaattgtttttgatgttaccataggtttaagtttttcgtgcaacatagttagtcactcccccttagtaggacttaaaaactacttgaactattactaaactgttcgtcgttggacaaagttaccattttacaggcaattcgccgctttccctttcagtttttctgtcattttgcagactgcttctcaaggctgtccatccccttctccgtcaatctataatatggagcagaaatgtgtccctgtttcagtagcaatccatcttttgtcaagcggttcaatgttctctgggccgttgaacggctatagcctgtcagagattgaaaaacagcgcggtccaggaaacggacgttctcagaattgaagaaatcgcgaacacgctgaagaatctccgaatccgtcaagacgcagaatacgtaaggcactttcgttgagcgcttgaaacgcacatcgtgcattttcttccgcaatcccacttttggtctgaaagcaatgtttctcacgtaaagatcccgcgttactttcttgtcatttctgtctgcaattttgcgatgacaggaaatcatcggactaaaatagcccaatcccggaatctccacgctggttccgcacgagagtttctctgcaacgacattcaccaaggcgtccataaccgccacgatgtcggtcgaagtgacggtgcaacgattttgtaccgtttcatacaactgttccggcgtaaacttaccggcattcgccactacgggataatagcccactggcgattcttctgtgaagcgtggcagctcacgcaatgaaaatgaaataattgacatggttttaagattagtgtttggtttgataattgtctgggatgtcattcttcacctctcaggagaagtaacgcgccgttgtctgcaatgatgcagggcgaacgcgcggaaggaaacaggaatacagcgctgaaaatcatcctgaatccttttctttcgacacgctccttatgtttgacagcgaacgcgggacgagacgcaaccgaatctgggacgagagacgaccgaatctgggacgaggcacgaccgaatctggggcgagaggcgctgacaagttgagagagcgtggcgcggaggattatttgacgctgcaaagatagggcattatcgtgacagaccacggcaaaaaggaatttggagtgttaaaatgtagtgtcaaagtttctgttcagcaaattctgaggagtctgccagataaaatctcagaataagccaggaaagagagagggaaaggaattatgagaatggggatgttttttcttgcccgtttcaaggtgcactgtggaaattagcatacaacacgccttgtctttcccaaaacacggagatgagaagtggcgagatatatgttttaacattaagagtggcaattttaagattaaaggtgtttgtcctgtcacaagaaattccgaacttagcaacggtaagtagatgttcagaattattttataatatgaaagcagcgaaagagcagtttgatatgatagaatcgttttgaacacctgctaaataggcaaacattaaaataaaccttgctccgacttccccactccactgacagggaggacgcaacaaacaaaatctgaaaccaatgaaacaggaaggatatgtgcagaagcaatttggcatcaagaccaagcgattctgccagacactcgacttgaaggatgagccagagctcattgctgcatacaaacaactgcatgacgaagaccacgtttggagagaaattcttgacggcatcaaagaagtggggattctcgaaatggagatttatctgctggagaaccgcctgtttatgatcgttgaaacaccagaggatttcaattggaatgattcgatggagaaactggccaaacttccgaagcaagaagaatgggaagcactgaccgggagataccaaaagacgaaaagcggtgccacttcttcagagaaatggcagcttatggaccggattttccacctatatgaatagggcggattattccgcgtttcacgtttaaaacggaacgccacgtgatgcaacatcaaacgacggcagaaaaacgccttgagaactttcaaggatttgccaacaggatgctctgaaacggcctcttcggacaaaaccaagagtaattatacggtcttcgttttcgccaataccaaaacattttattcaccccattaaccactacgaccatgatgtatcaactgccaccattgccttaccctaaggaggcactttcaccagctatcagtgcggaaaccattgacttccactacgggaagcattttcagacgtatgtcaacaagctcaacgaactgatcaaaggcacgctgtacgaggatatggaactgccggaaatcacctgcaaagcttctggagctctctacaacaatgccgcacaagcctggaaccacgatttttatttcgaacaactatcgcccaccccaacggagatgagtccgcgtctcagcgcccttatcatgaaatcgtttggaacgattgagaaattcaaggaagagttgttgcaaaacgccacgacgctattcggagcaggatggacatgggtcgttttgcacaacgacgaaacactgaccattgagaacgaatcaaacgcaggaaatccgcttacacgcggattgcgccccatcttgacgctggacgtgtgggagcatgcctattacatcgactaccgcaacaacagagcggaacatctgaagcagattttgggcttgatcaattggaacgttgttgaagagagggcattctgcaacgaatgcaacgtctatatataatatatataataagtaggtgttcaaaattagtttatgctatccatgcagggattatccagtttatattgtcaaaactggggaacgtatttcccaaatccccataagccaacgaccgcgggtttgtcatgactcgcggtcattttgatggattctccttccgtcaaccccgcatttcttacatcgcaaatcacaaaatcagcgctttattttgtctatcagacatttctttgtatttttgcccaacaatacaaaccgatgattgctaaacatatggaaaatccaatacagataatgaaatcggctgcagacaacatcagagtattgtctgtcgcaatggtagaaaaagctaagtcaggacaccccggcggcgccatgggtggagctgactttatcaacgtactctactccgaatttttggtctttgaccccaacgaaccgacatgggaatgccgcgaccgcttcttccttgatcctggacacatgtcgcccatgctctattcggaacttgcactcatcggacgcttcagtctttcagaattacagcagttccgccaatggggttcgccaactcccggacacccggaagttaatttcgcccgcggaattgaaaacacctctggtccgctcggacagggacacacctacgctgtcggtgccgccatcgctgcaaaagcgctctatgcccgcactggcaacccaggattcaagcgtgaaaagatttacgcctacatctctgacggcggcgttcaggaagaaatatcacaaggcgcaggacgcattgccggacacttgggtctggacaacctcatcatgttcttcgacgccaacgaaatccagctctcaacagagacttcggaagtgatttctgaagacactgccatgaagtatcgcgcctggaactggaacgtcatcgaaattgacggcaacgattgcgaacaaatccgcaaagcgctcaaagaggctaacgaggaaacagcgcgcccaacgctcatcatcggacacaccgtcatgggcaaaggtgcccgcaaggccgacaacacgagctacgaacgtgactgcaaaacgcacggcgctccgctcggcagcgatgcctataccaacacggtcaaaaaccttggcggtgatcctgagaatccgttcgtcatccgccctgaagtggccgaactctatgaaaaccgacgcgccgaactgaacgaaatcgttggcaaactgcgtcaggaagaaaagagctgggctgaaagcaatcctgaaaaggcagcacagctcaaggactggctcagcaacaaattgccaaacattccttgggacagcttgaagcaaaagccaaattctccaaccagaaatggttcttcagcctgcttgtctctgctttcagaatatgtgcccaacatgattgtcagctctgcagacctctgcaattcagacaaaacggatggtttcttgaagcacacgacggtgatcacacgcaccaactttgcaggcggatttttccaagctggcgtttctgaactgacaatggcatgtgtctgcatcggtatgacgctccacggaggtatcatcacggcaatgggaaccttcttcgtgttctccgactatatgaaacctgccatccgtatggctgctctcatggaattgccagtgaaattcgtctggacacacgatgccttccgcgtcggcgaagacggtccaacgcacgaacctgttgaacaagaggcacaaatccgcttgatggagaaactcaaaaaccacagcggcctcgacagtgtacgcgtattccgcccatgtgatgttcacgccaccaccaagtgctggcagatggccatggagaacttcagcacgccgacggcacttatcttcagccgccagaacgtcaacgatttgcccgaaaacacgaactacgatggtgtaaaattcggtgcctatgaagttgttgctgaagaaaatcctgatgtcatcctcgttgcttctggttcggaagtaagcacattggctgaaacggccacgatgctcaaagaagacggcatcaaggcacgcgttgtcagctgcccgagcgaaggtctgttccgccgccagacaaaagaataccaagagaagcttctcccgaagaacgccaagatattcggcctgacagctggtcttcctgtaacctttgaggggttggttggtgcaaacggcaaggttcacggccttgagagcttcggattcagcgccccctataaagtgcttgatgagaagctgggctacaccccgcaaaacatccaccaggaagttgttgatttcttaaagagcaacgactaagaaactggtttcataccaaaagaatatgtaatctattattagggtggctcttccatacaacgaacggagccaccctaatataagtaaaggtaagcagacgcgaatggtttgacaaaacgcctgctgcgagtttggctgactaaatgtagattcaacaaatccaaggatctgccctcacccacaaccgttatccatcatcaccaggacgccacaagcgcctcataaaacattttcattatgctcccaattggactggcaagcgaccacgccggatttgaactcaaacagttcgtcaaaaaatatcttgacgaaaaagggatgccatataaggactatggcacctatagcgaagaaagctgcgactaccccgactttgcacacgcattggcaagaggcatcgaaaacggagaatgcgaaaaaggcgttgccatctgcggtagcggcgaaggcatttccatgaccctgaacaagcatcagagcatcagagctgccctcgtttggattcctgaaatcgcacacatgacacgcctgcacaacgatgccaacgttttggtcatgccaggacgctacatcacaagcgaagaggccggaaagattatggacgaatttttcaatacggactttgagggcggcagacacatccgcagaatagaaaagattccagtctgaacggacgaagggataagtcacgccttttcatcttgtagctttcaaatttttttattgacagaaggatgtaacgccaaatggttgacagaaggcacaatacgccgtcaagaaaaaaaacgctccctgctctgactttgcaatcacaaccgacattcaacgccggccggaaatttgaaacggcataaagactggcaataaaacatatttacagtcttcaaaatgttgcggaacttgcttttttacccttacaaaggcaaaaaacagagctgtaagtttctccaaaccaattgaaaattatatctttgcacccgatttcacaaagaggtttaacacaataaaaacaaactacagctaagatgactaaagcagacatcgtaaattcgatttctcagaagactggcattgacaagccaaccgtgcttaacattgtcgaagcattcatgacatctgtcaaagaatctttggcaaacgaagaaaacgtttaccttcgcggattcggcagtttcattttgaaaaagcgtgcccagaaaacggcccgcaatatttcaaagaatacaaccatcatcatccctgaacacaacatccctgcattcaagcctgccaagacttttatgcacgaaatcaaataaacatacaattcacatttataaccgtctaaaaacataacactatgccaagcggaaagaagaaaaaaagacataagatgtctacgcacaagcgtaaaaaaagactgagaaagaatagacataagagcaagtaagcacttagcctttctcaaaaagagatgtgccaatatggaaaagagtacaaaaagtgcggctttgcttattggcacattttatattttcaaacacaggacatttcccgccgtgtttcctctccctcacaagagaaacggcctcgcccagcagggagaagctgaaagctaatgcggagacagacaacggcagactgtccagaaatgcactacaatgacaagcgaagtaatcgtagatgtccaacaaaaagacatatccatagcacttcttgaagacaaacgacttgtagagtttcaacaagaagggcgcgcggagcacttttccgttgggaatatctattttgcaaaagtccgcaagctaatgccaggactgaatgcctgcttcgtgaatgtcggatacgaacgcgatgccttcctacactaccttgatttaggcgttaatttcaacgccatggcgaaatttctcgacctgaatgccgacggaaaaagaaacgcgccaattcataaagcactcggacaaccgattcttgaaaaagaaggaagcatccaaaacacattgaaggtcggacaagaaattcttgttcaaatcgtcaaggagccaatttcaaccaaagggccacgattgacctgcgaattgtcgttcgcaggacgctttctcatcctcgtcccattcggagacaaagtttccgtctcctcgaaaattaaaagcggcgcagaacgtgcacgcctcaagcaactaatccaaagcataaagccaaaaggattcggc

SEQ ID NO: 742 - DNA, 16595 bp, synthetic construct
  source 1..16595: mol_type = other DNA
  misc_feature 1..16595: note = Synthetic
cgggcccccgtcaattcctttgagtttcaccgttgccggcgtactccccaggtggaatacttaacgctttcgcttggccgcttactgtatatcgcaaacagcgagtattcatcgtttactgtgtggactaccagggtatctaatcctgtttgatacccacactttcgagcctcagcgtcagttgcactccggacatatgccttcgcgatcggagttcttcatgatatctaagcatttcaccgctacaccatgaattccaacatccctgtgtgcactcaagcgacgcagtatcaactgcaattgcacggttaagccgcacgatttcacaactgacttacgccgccgcctgcgctccctttaaacccaataaatccggataacgcctggaccttccgtattaccgcggctgctggcacggaattagccggtcctttttctgatggtacatacaataagggacacgtccctctttttattcccaactaaaagcagtttacaacccagagggccgtcatcctgcacgctacttggctggttcagactttcgtccattgaccaatattcctcactgctgcctcccgtaggagtttggaccgtgtctcagttccaatgtgggggaccttcctctcagaacccctacccatcgatgccttggtgagccgttacctcaccaactagctaatgggacgcatcgccatctcataccgataaatcttcactcggacagtcatgcggccatccgagaccgccgggtattaatcttactttcgcaaggctatccccgagtatgaggcaggttcgatacgcgttacgcacccgtgcgccggtcgccatcaaaaagaaccgaagttcctttcatgctgcccctcgacttgcatgtgttaagcctgtagctagcgttcatcctgagccaggatcaaactcttcattgtaatataatgtttttgttttctctgtttatatgctcaagactacctgttatttattagagtaattgacggtttgttttaaacctttgttacttgcatgccctgtttccagtgcagtgcaagtcccttgtacttctctacaaaatagttttatgtaatttctttcaaagaactctttgctgtcgcggtggtgagtggtgtaccgctcgtcccgtttagcgagtgcaaaattacggactttttccattcccaccaaatgttttcgcaattatttttcaagaaaaaattgcgcgaaaaggacaaggcgctaaaagacaacgctttgcgccttgaaaattttttcgacttttttcggtcgacaacacggcaaaggtagaaaacgctaagaatatggcaaaaacctgcggcggaatttttcgggttttatgccgaagaacatggtttcggaaggaactcaaaacataattaagagcatttcgcggcccaacagtgtttgttggagtatcaagaatgagcggattctcacaatatgtacaacagtatctttgcgctttatgcaaatgtaaagaatatctatggggggggctattaaaacaaggtccgctctaattatgatttgaacgatagctttttcatctatattatataatgaatgaacaacagaactgccccaacaagacatgcgccattctgcaacaacgttccgaagccccctgtataaaaacgaagtgacttcgtgaatttcacgaagccactcgaaatgttttcacaacggaataatccttattgcgaattgctttcaattagcaagggcaaagtaaacaaatatttttcagaaagcaaagccttttcacaataaattcactacatttgtaaatgtttctatacagagggctgttttagaataccaggtaggcctgtataacaactcatttttattaaaagctaccaggtgttatggattactgacacataagcaactatgtgttttgtatacctcacaccatgtagccgccaacagtacataccccttcaaaactggccataataggacaccccttaaccgattcaccacacataaaacacaaccatataatatcatgacgaagaacacaaggaacatcattggcttggacttagggacaaatagtattggctggagctggattcaacagctaatatcacctaccccaacgcaaccttcagaatatctttttaacagaactcctattattaggatgtctggcagccgcatcattccgatgcctggagatgtcactgggagctttgagcgaggcgaaaccatctccaagaccaaagacagaacagctaagcgcatggctcgccgcatgaacgaacgctttcaattgaggcgtgaacgtttaaaccgcgtgctaaatattatgggctttctgcccgagcactatgcacgcgctcttgaccgctacggcaaattaaacgaagaaagcaacaccaccatcgcatggcaaagcaaagaagacgggaagaatgaattcatattctatccgtccttccttgaaatggcagctatttttaaggagcgccacccagatatccaacgcattcctttagactggaccttatattatctccgcagcaaagctctgcaccaagccatcaccaaggaggaattgtcatgggtgttacatagtttcaatcagaaaagaggctactatcaatcacgcgaagacatcacagaggaagacaagacgaaaaaggtcgagtacatcaaaggtgtcgtaaactccgttgaagacaccggggaaaaagcgaaaggcaaaaaaatatataaagtgaccttcgccgatggcactgagtttacaagcacaaagtccgaagcccccttatggattggacgcacacgggaaatcattgtaacaacatcgcttgacacctctggaaaaccaaaacttgacaaagaaggaaaaatcattcagagcgccaaaactcccgatgagaaggactggactctgataaagatccgcacagaggccaccatcgatgacagcaaactgacagtcggtgaatacatttttcacgccttgcttaaaaacccagagacaaaaataaaaggagcacacgtcagcaccatagaccgtcgcttttacatcaacgaaatcaacgccatattaaaagagcaagaaaaataccatgaagaactaagagacaagtccctctacgagcagtgtatcaaagcgttatatgctcaaaacgaggtaaggcgcaacatcattgccccttggagcatgaaagacctgcttacaaaagacatattgttctaccatagaccccttaaaagcaagaagtctcaaatttcagaatgcccattggagttccattgctatacggacaaagatggggaaacacatcggcaaggcatcaaatgtattccagtatcgcatccgctttttcaagaataccgcatttggcaattcatatccaacctgcgcatatatgagcgtgagcactttgacaacggcaagcattttaccaatgtggacaaaacctcggaatttctaacgaacgaaaagaaagaagaattgtatgaatggctggcggagagagattccgtgagccagaagaccttgcttggcaaaatcggactgaaggttgaacgttatcactggaatttccctgaagagaaaacctatccctgtggggaaaccagacatctgattcagagcaggctgaagaaagccaatcttcagaaagccttccattccctgatttctgatgagcaaaaagattgtttcgaacggggtttatggcatatcctctattctgtcagtgactataacgagctgtgcaaggctttaaaaacttttgcaagaaaaacaggattcacgctcgaagaacaacttctctttgttgaagaattttcatcctgccctcccttcaaaaaagactacggagcctacagcaaaagagccatcaccaaattattgcctttgatgcgcatcggaaaattttggcacgaagaatccatcgattccacaacaaagaaccgcattgaacatctcatctctggagaggaatgcagcggcatcgacgtccgcgtacgtgaaaaagtcgccaaaaccgggctctgcgaatccatagaacaatatcaaggtctcccacaatggctcgcaaactatgtcgtttacaaccgacattcagaagcgtctgaaatcaccaaatgggaatctcctgacgaattagacaattacatcaggtccttcaagcaatattctctacgcaatccaatcgttgagcaggtttctcttgaaacgctgcgcgtggtgcgtgacctatgggctgaacttcaaaaagatggtcaaacgattgacgaaatccatttggaaatggggcgcgaccttaaaaacacagccgaggaacggtccaggatttttagaagaaacagcgagaacgaagataccaatttccgtatcaagcttctgttggaagagttttacgcaaacgaaaaagacataaaagacgtgcgcccctattctccctcccaacaagagctcctacgcatctacgaagagggcgtttggcaacgagaaaaagagattcctcaagacatcaaggacatcaagaaacgaatctcgaacgacaaggacattaaagacatcacgcccaacgacatacaacgctacagaatctggatggaccagaagtattgttctccatacacaggcaaaacgataccactgtcccgtcttttcaccaccgactacgaaatcgaacacgtcattccgcgttcacggtattttgacgactcctataataataaggtcatctgcgaagctgccgtcaacaaagacaaaaacaaccgactgggcatggaatacatcatggctgctggaggaaaaacgattgaactcggcaacgggaaaaacgttcaaattctgaaggaagaagaatacgttgaactggttgacaaaatctttggcaacaacacgcgcaagcgcaacatcatgctggcagacgaaatcacagaagagttcagccatcgccagttgaacgacacgcgctacattgcgcggttcatgaagggaatcctatcgaacatcgtgcgcgagaagaatgccgacggtacattggaaccagaggaaacctcgaagaatctgattgtttgttcaggccgaatcaccgaccgcgtcaagcaagactggggactgaacgacatttggaaccatatcatcacgccgcgatttgaacgactgaacacaaagacctcatccaacgattttggagaatacgtgtgcaaagatggcaagcggtatttccaaacgcgggtgcccctcaatctgcaaaagggcttcaacaaaaagcgcatcgaccatcgccaccacgccatggatgccattgccatagcctgcgtcaaccgaaacatcgtcaactacctcaacaatgccgccgccaaccaaaccgaacgcgaagaccttcgccgtgccgtgtgcattccagaaagaaacggacaaaccaaacgccaactccgttcaccatggcattgttttgcaagggacgcagaaaacgccctgcggcaaatcgttgttagtttcaagcagaatctgcgcgtcgccaccaaagccacaaacagttacgaatgttttgacaccgcttccggcaaaaaaatccgaaaacaccagagcaaccgtgaacactacgccattcgaaaaccgttacacaaagattccgtctacggcgaagtcatcctgccaagcatcgcttccgtcaatctgaaaaaggccctgctgaaagctgacaggattttagacaaacgtctgaaggacaaaatcttcgagttgcgcaagctctacaactatagcaacaaacaaatagaggagcatctgacaaaggtgtgcatcaattgtctggaatggaagaactacgatttcaaaaaaattgccgtccgcattctttccaacgatgcagatgccacacacattgttgccatacgaaagccgcttgacgaaacatttgataaggaaaaaatcaagacaatcacggacactggcatccaaaagattctgctcaaccacttaagccgatacgccgatgacccgaagaaggctttttcgccggaaggtatcgaagacatgaatgccaacatcgcatcgctgaacggcggaaagcaacatctgcctatatataaggtgagggtctctgaaaaagacaacggcggctatttccccatagggcaaaaaggaaatcgctcaaaaaagtacgtcaccacagccaaagagaccaacctgttttttgctgtatacgcagacagcaatggcaagcgcagtttcaagaccattgatttgcgcacggccatcgaatgcaagaagcaagggctgtccgttgcccccagcgtgaacgagaaaggagacaaactgcttttcacgctctctcccaacgaccttgtatatatgccgtcagaagaggaagaggctaacggattttccattgacaacaatctcaacaaagagcaaatctataagatggtaagtgccacctacaaacaatgctttttcattcctcacactgtggcagacttcatatacaaaaacaaagagttcaatgttctaaacaaaattgagctcacagaagacagacgcagcatcaaagagcattgcgttcctctgaaagttaaccgtctgggtaaataaaacatactaaaggatctggcaacaagactgcaattgtaattcaaaacagatgattacaattgcagtcttatgctttttaaaaccttacgaccatgataaagaaaactctctattttggaaatcccgcctacttgagcctacgcaacaaacaattggtcatcaaaatgcccgcagtggagaaatctcaaaatgttgcagacatcattcgagcagaatcaatcacaacaaaacccattgaagatttaggagtggtggtgctcgaccaccaacaaatcaccatcactcaaggactgctggaagctctgcttgaaaacaatgtcgccctgatcacctgcaactcccgaagcatgccagtaggccttcaactccctctctatggcaacaccattcagaacgaaagattccggttgcaaattgacgcttccaagccattgcaaaaacagctgtggcagcaaacgatgaaggcaaaaattgaaaaccaagcctacgttctcaaacacaatacagaaacggaaacacaatgcatgtttgtctgggccgactgcttgaaaagcggcgaccccaccaatttggaagcacgagctgccgtttattattggaaaaacctttttcatcgagagttccctaacttcatccgcgaacgcgaaggaatgcctcccaacaatctgctcaactacggctatgccatcctgcgtgccatcattgcacgctcactcgtttgcagcggtctgttgccaactttgggcatacaccaccacaaccgatataatgcctactgcctggcagatgacattatggagccatatcgtccctacgttgacgaactgatattgagaatcatacggagcaacaccgactacaaagaattgacaactgcgttgaaagcccaattgctaagcatcccaacattggatgtcaacatcaacggcaaacgcagcccgctcatgattgccgcaacaataaccaccgcctctctggtaaaatgtttcagcggcgaaatacgcaaaattgcctatccgtcaatgtctacgagttgattatgaaacgcttaaacgaatatagagttatgtggattttagtgttctttgatttgcccacagagacgaagaaagacataaaggaatatacaatattccgcaaattccttctggacgatgggtttacgatgtttcaattttcaatctacatacgtaactgcgccagcagcgagaatgccgcagtacacatcaaacgaataaaatcacgccttcctccacatgggaaagtgggaatattatgtataacagacaaacaattttcaaacatggaattattttttggcacgaaaactcaaaaagttcaagcggaaggggttcaactggaattattctaaaacaagaaagaggtagaaccgagaaaagcctttaccatttctcattctacctcttctatgacaaactttttctttttctatttgtcactataacgcattgatttcctttacataagacgaatcaagctgtttgccataggacaaaattactaatttgaaagcaattcacaacgaacgcatccatcttgaccctaccattgggctgtttgccataggacaaaattactaatttgaaagcaattcacaacatatcacattaagttatttacatatcacatgctgtttgccataggacaaaattactaatttgaaagcaattcacaactaaccttgcggagagtgtttttggtgttatgctgtttgccataggacaaaattactaatttgaaagcaattcacaacgaaaccttttatggtttgttcgcgtcgcccgctgtttgccataggacaaaattactaatttgaaagcaattcacaacaacctaagatgttcttcgagatattcaccggctgtttgccataggacaaaattactaatttgaaagcaattcacaacaatgtcaacacggaaattttcatccgtacggctgtttgccataggacaaaattactaatttgaaagcaattcacaacaaaccaatggattcagaagaacagatgcctgctgtttgccataggacaaaattactaatttgaaagcaattcacaaccctctatctctaaaggtgaagcagaatattgctgtttgccataggacaaaattactaatttgaaagcaattcacaacattgttatgtaaaccaccacgtaaaggctgctgtttgccataggacaaaattactaatttgaaagcaattcacaacgttagcagtatataaatcaagtgaggacggctgtttgtctggacaaaatcaccaatttgaaagcaattcacaatagttatacacacgcatattccgcacctatagctttttgtcatgattcaaattacccatttgagagcattttagaactaacattcacctcataccacactgctgcctgtgccatcgcgtccttgagggcttctaaaaactgcttgtagttctcctgcgtgatggtgatatgatgctctaggtgttgtccgtcgtggtcgccactcgccagatggatgatgaagaatgtgcggtctgtgtcgtgatgcgccaccatacctcgcttcttcaaaatcgccatagtgcgctcaaagtctgccagcgtggtaggcaccacctgaagaacgctccagggatattcctgtgccgtgagaagtatttgcccttcctgctcagaaagcaggaaggaataaattgtttttgatgttaccataggtttaagtttttcgtgcaataaagttattcactgcaccttagtaagggttaagggatgttctataaattagttttaatggagattctttatttaggattgacttggccgcttttacagttctcactcgcatcttgctgtatttcaaagactcacatagctcgctatgctcgtctttgaaatacaacaatctgcttcgcgataaatgtaaaatcggctcaagctaatttatagaacaccccttaaaaactacttgaactattactaaactgttcggcgctgaacaaagttaccattttacaggcaattcgccgctttttctttcagttttcccgtcgttttgcagactgcttctcaaggctgtccatccccttctccgtcaatatataatatggagcagaaatgtgtccctgtttcagtagcaatccttcttttgtcaagcgactcaatgttctctgggccgttgaacggctatagcctgtcagagattgaaaaacagcgcggttcaggaaacgaacgctctcagaattgaagaaatcgcgaatacgctgaagaatctccgaatccgtcaagacgcagaatacgtaaggcacttgcgttgagcgcttgaaacgcacatcgtacattttcttccgcaatcccacttttggtctgaaagcaatgtttctcacgtaaagatcccgcgttactttcttgtcatttctgtctgcaattttgcgatggcaggaaatcatcggactaaaatagcccaatcccggaatctccacgctggttccgcacgagagtttctctgcaacgacattcaccaaggcgtccataaccgccacgatgtcggtcgaagtgacggtgcaacgattttgtaccgtttcatacaattgctccggcgtaaacttaccagcattcgccactacgggataatagcccactggcgattcttctgtgaagcgtggcagctcacgcaatgaaaatgaaataattgacatggtttaagattagtgttaggtttgataattgtctgggatgtcattcatcacctccctggggaaataacgcgccgttgtctgctatgatgcagggcgaacgcgcggaaggaaacaggaatacagcgctgaagatcatcctgaatccttttctttcgacacgttccttatgtttgacagcgaacgcgggacgagacgcaaccgaatctgggacgagagacgaccgaatctgggacgaggcacgaccgaatcagggacgggagacgaccgaatctggggcgagaggcgctgacaagttgagagagcgtggcgcggaggattatttgacgctgcaaagatagggcattatcgtgacagaccacggcaaaaagaaatttggagtgttaaaatgtagtgtcaaagtttctgttcagcaatttctgaggagtctgccagataaattctcagaataagccaggaaagagagagggaaaggaattatgagaatggggatggttttttcttgcccgtttcaaggtgcactgtggaaattagcatacaacacgccttgtctttcccaaaacacggagatgagaagtggcgagatatatgttttaacattaagagtggcaattttaagactaaaggtgtttgtcctgtcacaagaaattccgaacttagcaacggtaagtagatgttcagaatatattttataatatgaaagcagcgaaagagctgtttgatatgatagaatagttttgaacacctgctaaacaggcaaacactaaaataaaccttgctccgacttccccactccactgacagggagggcgcaacaaacaaaatctcaaaccaatgaaacaggaaggatatgcgcagaagcaatttggcatcaagaccaagcgattctgccagacactcgacttaaaggatgagccagagctcattgctgcatacaaacaactgcatgacgaagaccacgtttggagagaaattcttgacggcatcaaagaagtggggattctcgaaatggagatttatctgctggagaaccgcctgtttatgatcgttgaaacaccagaggatttcaattggaatgattcgatggagaaactggccaaacttccgaagcaagaagaatgggaagcactgaccgggagataccaaaagacgaaaagcggtgccacttcttcagagaaatggcagcttatggaccggattttccacctatatgaatagggcggattattccgcgtttcacgtttaaaacggaacgccacgtgacgcaacatcaaacgacggcagaaaaaagccttgagaactttcaagaatttgccaacaggatgctctgaaacggcctcttcgggcaaagccaagagtaattgtacgctcttcgttttcgccaataccaaaacattttattcaccccattaaccactacgaccatgatgtaccaactgccaccattgccttaccctaaggaggcactttcaccagctatcagtgcggaaaccattgacttccactacgggaagcattttcagacgtacgtcaacaagctcaacgaactgatcaaaggcacgctatatgaggatatggaactgccggaaatcatctgcaaagcttctggcgctctctacaacaatgccgcgcaagcttggaaccacgatttttatttcgaacaactatcgcccaccccaacggagatgagtccgcgtctcagtgcccttatcatgaaatcgtttggaacgattgagaaattcaaggaagagttgttgcaaaacgccacgacgctattcggagcaggatggacatgggtcgttttgcacaacgacgaaacgctgaccattgagaacgaatcaaacgcaggaaatccgcttacacgcggattgcaccccatcttgacgctggacgtgtgggagcatgcctattacatcgactaccgcaacaacagagcggaacatctgaagcagatttggggcttgatcaattggaacgttgttgaagagagggcattctgcaacgaatgcaacgtctatatataagtaggagtgttccaaacttcgtatttcaggacgccccatgattcattgaccgcgggtttgcagtaactcgcggtctttttgattgtttttccttccgtcagcccttcatttcatacatcgcacatcacaaaatcagcgctttattttgtctatcagacatttctttgtatttttgcccaacaatacaaaccgatgattgctaaacatatggaaaatccaatacagataatgaaatcggctgcagacaacatcagagtattgtctgtcgcaatggtagaaaaagctaagtcaggacaccccggcggcgccatgggtggagctgactttatcaacgtactctactccgaatttttggtctttgaccccaacgaaccgacatgggaatgccgcgaccgcttcttccttgatcctggacacatgtcgcccatgctctattcggaacttgcactcatcggacgcttcagtctttcagaattacagcagttccgccagtggggttcgccaactcccggacacccggaagttaatttcgcccgcggaattgaaaacacctctggtccgctcggacagggacacacctacgctgtcggtgccgccatcgctgcaaaagcgctctacgcccgcactggcaacccaggattcaagcgtgaaaagatttacgcctacatctctgacggcggcgttcaggaagaaatatcacaaggcgcaggacgcattgccggacacttgggtctggacaacctcatcatgttcttcgacgccaacgaaatccagctctcaacagagacttcggaagtgatttctgaagacactgccatgaagtatcgcgcctggaactggaacgtaatcgaaattgacggcaacgactgcgaacaaatccgcaaagcgctcaaagaggctaacgaggaaactgcacgcccaacgctcatcatcggacacaccgtcatgggaaaaggtgcccgcaaagccgacaacacgagctacgaacgtgactgcaaaacgcacggcgctccgctcggcagcgatgcctataccaacactgtcaagaacctcagcggtgatcctgagaatccgttcgtcatccgccctgaagtggccgaactctatgaaaaccgacgcgccgaactgaacgaaatcgttggcaaactgcgtcaggaagaaaagagctgggctgaaagcaatcctgaaaaggcagcacagctcaaggactggctcagcaacaaattgccaaacattccttgggacagtttgaagcaaaagccaaattctccaaccagaaatggttcttcagcctgcttgtctctgctttcagaatatgtgcccaacatgattgtcagctctgccgacctctgcaactcagacaaaacggatggtttcttgaagcacacgacggtgatcacacgcaccaactttgcaggcggattcttccaggctggcgtttctgaactgacaatggcatgtgtctgcatcggtatgacgctccacggaggtatcatcacggcaatgggaaccttcttcgtgttctccgactatatgaaacctgccatccgtatggctgctctcatggaattgccagtgaaattcgtctggacacacgatgccttccgcgtcggcgaagacggtccaacgcacgaacctgttgaacaagaggcacaaatccgcttgatggagaaactcaaaaaccacagcggcctcgacagtgtacgcgtattccgcccatgtgatgttcacgccaccaccaagtgctggcagatggccatggagaacttcagcacgccgacggcacttatcttcagccgccagaacgtcaacgatttgcccgaaaacacgaactacgatggcgtaaaattcggtgcctatgaagttgttgctgaagaaaatcctgatgtcatcctcgttgcttctggttcggaagtaagcacattggctgaaacggccacgatgctcaaagaagacggcatcaaggcacgcgttgtcagctgcccgagcgaaggtctgttccgccgccagacaaaagaataccaagagaagcttctcccgaaaaacgccaagatattcggcctgacagctggtcttcctgtaacctttgaggggttggttggtgcaaacggcaaggttcacggccttgagagcttcggattcagcgccccctataaagtgcttgatgagaagctgggctacaccccgcaaaacatccatcaggaagttgttgatttcttaaagagcaacgactaagaaactggtttcataccaaaagaatatgtaatctatcattagggtggctcttccatacaacgaacggggccaccctaatataagtaaaggtaagcagacgcgaatggtttgacaaaacgcctgctgcgagtttggctgactaaatgtagattcaacaaatccaagtatctgccctcacccacaaccgttatccatcatcaccaggacgccacaagcgcctcataaaacattttcattatgctcccaattggactggcaagcgaccacgccggatttgaactcaaacagttcgtcaaaaaatatcttgacgaaaaagggatgccatataaggactatggcacctatagcgaagaaagctgcgactaccccgactttgcacacgcattggcaagaggcatcgaaaacggagaatgcgaaaaaggcgttgccatctgcggtagcggcgaaggcatttccatgaccctgaacaagcatcagagcatcagagctgccctcgtttggattcctgaaatcgcacacatgacacgcctgcacaacgatgccaacgttttggtcatgccaggacgctacatcacaagcgaagaggccggaaagatcatggacgaatttttcaacacggactttgagggcggcagacacatccgcagaatagaaaagattccagtctgaacggacgaagggataagtcacgccttttcatcttgtagctttcaaaatttttaattgacagaagaatgtaacgccaaatggttgacagaaggcacaatacgccgtcaagaaaagaccgattcctgctctgactttgcaatcgcaaccgacattcaacgccggccggaaatttgaaacggcataaagactggcaataaaacatatttacagtcttcaaaatgttgcggaacttgcttttttacccttacaaaggcaaaaaacagagctgtaagtttctccaaaccaattgaaaattatatctttgcacccgatttcacaaagaggtttaacacaataaaaacaaactacagctaagatgactaaagcagacatcgtaaattcgatttctcagaagactggcattgacaagccaaccgtgcttaacattgtcgaagcattcatgacatctgtcaaagaatctttggcaaacgaagaaaacgtttaccttcgcggattcggcagtttcattttgaaaaagcgtgcccagaaaacagcccgcaatatttcaaagaacacaaccatcatcatccctgaacacaacatccctgcattcaagcctgccaagacttttatgcacgaaatcaaataaacatacaattcacatttataaccgtctaaaaacataacactatgccaagcggaaagaagaaaaaaagacataagatgtctacgcacaagcgtaaaaaaagactgagaaagaatagacataagagcaagtaagcacttagcctttctcaaaaagagatgtgccaatatggaaaagagtacaaaaagtgcggctttgcttattggcacattttatattttcaaacacaggacatttcccgccgtgtttcctctccctcacaagagaaacggcctcgcccagcagggagaagctgaaagctaatgcggagacagacaacggcagactgtccagaaatgcactacaatgacaagcgaagtaatcgtagatgtccaacaaaaagacatatccatagcacttcttgaagacaaacgacttgtagagtttcaacaagaagggcgcgcggagcacttttccgttgggaatatctattttgcaaaagtccgcaagctgatgccaggactgaatgcctgcttcgtgaacgtcggatacgaacgcgatgccttcctacactaccttgatttaggcgtcaatttcaacgccatggcgaaattcctcgacctgaatgccgacggaaaaagaaatgcgccaattcataaagcactcggacaaccgattcttgaaaaggaaggaagcatccaaaacacattgaaggtcggacaagaaattcttgttcaaatcgtcaaggagccaatttcaaccaaagggc

SEQ ID NO: 743 - DNA, 16229 bp, synthetic construct
  misc_feature 1..16229: note = Synthetic
  source 1..16229: mol_type = other DNA
tctcggtgcgtctacgttctcctcccgagagctgatcacctttgttcttgcgcactttggtcaacctgaactccttaatgagcgtttccaatttctccaattgatagctgcgaggttgccctgtcatctcaagaaccgagaggatgttatcttctaccgtcatctttcggaacacactggcctcttgtggcaggtatccgatgccggcacgagcacgcttatagacgggatatttcgttatatcgcggtcgttgagataaatatgtccatcgttgggaacaatcaatcccgtagtcatatagaacgatgtggtttttcctgcaccgttaggcccgagcaaaccgacgatctcaccctgcttcacatcaatcgacacgttgttcaccaccgtgcgttttccataacgtttcaccaatccttccgttcgcagaaccatcgtccgattctgcatttcaggatttgccgacacggcatcaaccgtgttgttccattcatccatatatcaatccatctgtcaaatgtgtcgcaaaattagtaaaattccatctaaataatacttagaaaatcaaaaaccatcacttttattgcagttttttaattgattttggttacttttgcagctaacaaaccacgataataaatggtattattgaagtttcttgtcactttcggaaggtatctaatattgatgggacgatcatttgcacgccccgaacggatgcgtatgtttatgaagagatacatcaaagagatgtcgcaattgggtatagattccattggaatcgtacttttaatctcgttctttatcggtgccgtaatctgtattcagatgaaactgaacatccaaagtccgtggatgccgcgttgggtttcaggctataccacccgcgaaataatgttgctcgaattttcatcgagcataatgtgtttgatattggccggcaaagtgggctccaacatcgcatcggaattagggacaatgcgggtaacccagcagatcgatgcactcgacataatgggcgttaactctgcttcttacctcatattgcctaagattctgggactggtaacaataatgccgttcctcgttatattcagttcggcgatgggaatcatcggtgcttatgccacggcttacatcggcacatcctcagtccggaagatttgacactgggaatacagcactctttcaactcgtggtttatgtggatgagcattgttaagagtctgttctttgcgttcatcattgccagcgtgtcgtcgtatttcggttacacggtcgacggcggatccgtagaagtaggcaaagccagcaccgatgccgtcgtgagtagctctgtcttgattctcttctcggatgtgttcctgacacaagtgcttagttagcgccctgatatgtatacgtaatggatttctattgtccgcaagcgagacgatgtgtagaggtagatgaagaggtgtacgacagtcctaaggtacagaaaaaaggtacagagagaacgacttttctcaatcagaacgatatcaaagttatcagatttaagaacgaagaagtagaaaacaatatagatgatgtggttaataaaatccgtttggcactactttcacgagtcgaatccggctttattgattagatcacgaccacaattcaattatagacaatcaattgggttgggatcgggcaactttgtttgttctgtcccctaaccccttaacttaggggactaaagtatgatagaagtaaagaatctcacaaaatcatttgaagacaagactgtgttgacggagatcagcaccacattcgagaccggcaaaacaaatttgataatcggtcagagcggctcaggaaaaaccgtactgatgaagaatatcgtgggacttttagagcctacgagtggtgaaatactctacgacggacgtaatttcgtggcaatgagcaagaaagaaaaagtgcgaatgcgtcgcgaaatgggtatgatctttcagggagcagcgctcttcgactcactctccgtactcgaaaacgtgatgtttccgcttgatatgttctcctcaatgacacttcgcgaccgtaccaaacgggcacaggagtgcctggcaagagtgaaactgatcgacgcacaagacaaatatccaggtgaaatctcaggcggaatgcagaagcgggtggccattgcgcgtgccatagtcctcaatcccaagtacttgttttgtgacgaacctaactccggtctcgacccaaaaacctccttggtcatcgacgaactgctctcaggaatcaccaaagagttcggtatgaccaccattatcaacacccacgatatgaattccgtgatgggcatcggcgaaaacattatcttcatttacaaaggaaagaaagaatggcaaggtaacaaagacgctgtgatcagctctaccaacgagcgtctcaacgccttagtcttcgcttccgatttgttccgcaaggtgaaagaagtggaaatggaggaagagaatgagaagaaatgaaaagacatttcacccgtagcaatgctgggattctgactgaatccgaacacacgaattcaccgtttatgaagtgattgtacatagaccggtcactgcttaaacgttaacatcattccgtttcacactttttacgcagtaaaataccgttttaactcagaataaccggattctaaactatcgattaccaattaccttatcgcatataccaaacaccctcttgctctaccatcgggacgacaatctgctcggtagtactatctccataggcgaagactaagaacacatcggccacgtggcgagccgtatcggctttagcattaacgatgcgtacctcacgaattccgcgatgttcatcttgctgctgaccgacaaacatcttggcattgacaatcagctgctcgcgataagaatccggaagcgagtcaggacagtagaaaccatcgacgtactgatcgtacttaccggccaaaagctggtcataataaaccttggcagcctgtgccgccacctcatccggcggaggtcctgacgcacacgaagctgcaacgaacagggctgcgacatataacagctttctcatttcgggttatttctgacgtatgaacacgttgatcggacagccgtgcatcgcccaattctcacggattttattctccaagaatcggcgataaggctctttgacatactgcggaagattggcatagaacacaaacgacggtatctgtgtattcggaagctgtgtacaatacttgattttaatgtacttccccttaatcgatggcggtggataagcctctattaaaggcaacatcacctcattgagtttggctgtaccgacatgcgctttacggtttaggtaaacctgtttagccgtttccaaaaccttaaaaatgcgctgtttggtaagtgccgaagcaaatataatagggaaatcgacgaatggtgccattctgtttcggatagcattctcgaacgtttcgattactttctgcgtcttatcttctaccaaatcccatttatttaccaccacaacgagactcttattattcttttgaatcagctgaaaaatattcatatcctgtgcttctacacctcgcgtggcatccaacatcaagatacagacatcactgttttcaatcgatcggatagagcgcatcacgctataaaactccaaatcctccgtaaccttgttcttgcgccgtattccggcggtatcgaccaagtagaaatcaaatccgaacttgtcgaatctcgtgtagatactgtcacgtgttgtgcctgcgatctcggtcacaatattgcggtcttcacccataaatgcgttgatgatgctactcttccccgaattaggtcgccccacaacagcaaagcgtggaatgccatcctcgatgagttcggtatcatctcccaccaacttagacgtcaccagatcgagcaaatcgcccgtaccgccccccgtggcagcactgatacactgcggatctccaagtccgagagaataaaattcagctgcttcgtaatactgcccgctattgtctgccttgttagcaaccagtataaccgggagtttcgaacggcgaagtatctgcgcaacatcttgatcccagtcggtgactccagtcataatatcgaccaaaaacagcacaaggtcagcctcttccgtggctaccagcacttgttttcgtattgcatcttcaaatatatcatctgagttgactacccaaccgccagtatctaccactgaaaattcgcgcccattccagtcgcacttaccgtattgccgatcgcgtgtagtgcccgccgtgtcgctcacgatcgcactccgcgtcttggttaatctgttgaataacgtggatttacccacattagggcgccccacaattgctactaagtttgccattttattctaaattatacccgaattgattgagttcccgctgcgacgaacgccaatctttatccactttcacgaatgtttcaaggtaaattcgcttgtcgaaaaatcgctccaaagccttgcgagcctccgaactcactttcttcaacgccacaccttgatgcccgatgatgattcctttttgactatcgcgctccacgaagatgatcacccagatatggatatgcgcgtcgtcttctttgaaactctccactttcacctccacagaataaggtatttccttgtcgtaatacagcaaaattttctcgcggacaatctcactgacaaagaatttagcaggtttatcagtcagctgatctttctcgaagtaaggcggcgaagcgggcaacagctccttgatgcgctttaaaaggatgtcgattccgaagttgttctgtgccgaaataggcaatatctcggcctcgggaagcagcgtatgccatcgctccaccatcgttccgagttgcttctggttgctctggtcaatcttgttgataagcaacagcaccggaatgatcatttttctcaccttatttaagaactcttcgttcttctccggattctcaaccacatccgtaacatacagcaacacatccgcatcagccaatgccgactcggaaaaagcaagcatcgactcctgtaatttgtagttgggtttcagtacaccgggcgtatccgaaaatacgatttgcatatcctcggtattcacaatacccataatacggtggcgagtggtctgtgctttaaacgttgcaatggatattcgctcgcccaccaaacggttcatcagcgtagatttacctacattcggattgccgacaatatttacaaaacctgctttatgcatctataaattgtttaaaagaccgttaatcgtacgatatttaaccgttagttatacgacatttaattgttaattgcacagcattcaaccgttagttgtgcggcatttaatggttaatcatttcgcaatgagaataaaaaaacgcattcttttcatacgaaggatgcgtttcttgatgtgttattgcgttctgaatcacttctttccggccgcctctgctccgtcatacgcccatcgataataggctgctccgttgacgaaaccggctccgaacgccgtaaagaagatgttatcgcctttcttcaactgcgactcgaagtcccacaaaacaagtggcatacaagctgcactggtgttaccataacgctgaatgttgaccaacactttgtccatcgatacaccgacacgcttggcaacggcctcgatgattcgcaaattggcttgatgactgatcacgtaattaacatcattctctgtcaaatggttgcgttccatcagtttgacacaatcatctcccattgccgttacggcataacggaacaccgtacgaccctcttgataggtgtaatgaaggcggtgatccaccgtaaaacgcgatgaggggcacactgatccgcccgctttcacgtgcaggaaaggcagtcccttaccgtccgtgcgatgataagagtctatcaatccgacattttcttcggtagtgccttcaaccaaaacggctcccgctccgtcgccgaacagcggacaggtagcgcgatcctgatagtcggttatagccgacatcttgtctgcaccaatgacgatgatacgccgatgacgcccactctgaatcatattgcacgccacatcgaaggcgtacataaagccacagcacgccgcagagaaatcaaacgcgaacgcatttttcagtcccagcttacccaaaacgatggaagccgtagaaggatgaatataatccggcgttgtcgttgcaacgataagagcgtctatactatcgggatctgcacccgttttcttcaacagcagcttggccgctttacgcgccatataagacgttccgaggccttcttctgtgagaatacgccgctctttgatacccattctcgtggtaatccactcgtcgttggtatcgaccatacgcgataattcctcgttattgaggacgtaatcgggtacatagccagcaacgccagtaataatcgcgttgatcgtagccattattcagcagcttccttaacgatagccaccttacctctgtactgtccgcaggtgggacaaacggtgtgatagatgtagtaagagccgcagttagggcataaagcaacgtgggcgcaacggctttgtcgtgcgttcttcttttcagtgtacgtgtcttcgactgtcttcttttaggatgtgccattttgttttattcttttaatattgtttttaattgttccaaaccgctccatcgcgggtctgtcgattcttcatcaagcccattgctacttcgggtagccgtatgctcagcgagcaattcaatcatagcaggattacatttgccaggtatatgcacgtgcttgatagggattgacaatgcaacaaactcgtaaatgatccacgaaaggtcgagtattcctttgtcctcgggcacaatcaggagatcattttcctctgaatgcgtctcacccaacttgacaacgagtcggttatcagtattgatcggctgctccatatcatcgagacagcgatcgcaggggatgtgtatgctgcctactatgtgcgaatcgagttcgaaaagagcaccggtcttgcgtatagacagcactacacacaattcgcctcgccgcatttcaggcgcgtttatcacctcaaagtagttgtcgtcaagctgaaattcacagctgttaagcccttctttcagctctttcaaatctatttttaaagcttctaaactacacatttgggttgcaaagttacgaatattttccgataaaaggtaataaatgaatgaaaaaatctaatttcttaattctattctgaacgtggttccgtgtcccggttcagattctttcactcgaatcttgccgtggtgatagtcttcgactatccgtttagccagcggcaatcccaatccccaaccgcgttgtttggtcgtgaatccgggacgaaaaacgtgccggacgtctttcttgcggattcccttacccgtatcggtaacatctatcaacactctgtttccgacctgtattatacctattataatagtacccgtaccatccaaagcatcgacggcattcttgcaaaggttctcaatcacccattcaaacagttgcacattgaggttcacagtcacctcttcggacggcagacgcaactcaaaacacaccttgtcggacgtgcgacgcgacatataatcaaccacatgagctatcaattcattcagatttgcaggcacagactcgggcgttgatccgatcttcgagaaccgatcggcaatcagttgcagccgtttcacatcactgtctatctccggaatgagttcatcctgcggataacgctcacgcaagatctccgtccacgccatcagactgcttatcggtgtgcctaactgatgagccgtttctttggacaatccagcccaaactctattttgttcggcccgtttcgacgtaagcaaagcaacgacagctgccacaatcagaatgataaccgcaccgagttgaacgaacggatagacaactgaaagcttcaacattcgcgagtcgtcataacaaacttcaatataatctttccctgccgtcccatcaatgtcgatacgtatgcagcgcccctctgcccgaagtcgcattccgatggccgcaacctgccgcagtctgtcggcagacgagtctgcgggtatatccaaattacgaaaagtttgcacgtttcccgcccgatccatcacaataaccggaatcgtggtattaccgttaagcactttcaacaccaagtttagatcagtccattcatccgcattattcagcgtattcattgcttctgcccacacctccatcttcttacgctcctcttgttccaagtcactgatcaggaaatgcgccaccgctaatgaggctaccgctacgaaaacggtgcccagaacaagcagaatcttgatttgatgaatacggtctgtccattgcataacatcaaacaaacgtacagcccctgcatatattgtgttgcaaatcgacttcttataaaagtgagaaatcaacaaaaacatttgcaagtttcatttcttttaacgatatttgtagccgagaacaacaaagaataacgacaaacaatcaacttaaaaatcatattattatgaacaaaaccaaaatgattgccattggatttgccggcgttgtaactgtcatcagcgcttggctgttggccaacggatttacgaactttaaaaaagatgccccgactatcaacgtaaccggtatggcagagaagcaaattacgagtgatttgatcgtgtggaatatcaccgtcaatgccgaagatgtttctcggagcgatgcattctctgcgtataagaaaacagcaaaactgctgagacgctatctcaacgaccacgggattcccgacaaagaaatctcgactaatagcgtggacatctctaaactgacaaaacaatattatgattcggatgcaaaacaatattactctgtggacaagggatactctgcctcacagactttcactgtcagttcacacgacgtgagcaatgtagaacgtgtttaccagaacatttccgagctgtacaatcagggtatttccttttcaagcagcacaccgtcgtattattataccaagctcaacgagctcaaaatggagatgcttggcaaagcaagtgccaacgcttacgagcgcgcacaggtaatagccaaaggtagcgaagccactgtcggccctctcatttcgtcctcgatgggcgtcttccagattgtagggctcaacagcgatgaggaatacagctggggcggaacgttcaacacgacaagcaaagagaaagttgccagcatcacggtgcgtaccacttacaaggtaaaataatccactcagctcccccattcagcgcctcacacattgccttttgcaacgtgtgaggcgtctctttatcctaatccctccacaattaacggttaatcaccgcataagtaacagttaattgcacgataagtaaccgttaatcatcgtacgaataaccgttaatcgcaatacacttaacagggttccgtaagatattgataataagaaagataagcaaataaaaagggcgagtcaccccgcccgaatgttttcacaacggaataatccttattgtgattagctaaaaaacggtacaaagaaaacaaattattttgattcttgcaaatattttagataaaattttactatatttgcagcatcacatcgaaaaatcagacaattatgaaaaatatcttggggttagatctgggaaccaatagtatcggctgggcgctgatcgacaatgaatcgcatagaataatcaaatcaggcagtcgtatcataccgatggatgccgcgacaatgggcgactatgaaaaaggaaacttgaaaaaaggaaacttgaaatcggcagcttcgaaacgaacatctttccgaggaatgcgaagactctatgagcgggccaagctcaggcgggagcgattgctaagggtattgaatattctcgctttctgcccgaagagtttcgtcgacaaattgatttcgagcatcatcccggccaattcatagacgggaaagaacctttaattgcctatcaccacgatgaaaacggacagagagtgttctcatatatgtgtgctttcaaggaaatgttgacagacttccgggcaacccaaccggaacttgtcagagatgggcggcgcgtaccttatgactggacgatttactatctgcgccataaggcattgacacaacctgttaccaaagaggaattagcgtggataatactgaacttcaataccaaacgtggttactatcaactgcgtagtgagagtgaagaagttaccaccaataagaacgaggaatatgcagaattggaagtagtgagcgtagaaaagaccggtgaagataagaaacgagccggctactactggtatacaatcacttataacaacgaagctgaacagaagataacaagcacaatacctccaagacagataggagataaggtggaactgattgtcaccacagcccgggataaggcaggagagactaagaaaagcgttcgttcaccgaaagaagatgactggacactgatgaaaaaacgtacagaacacaatattgaagaggaagaatgtacagtcggttcatacatttatcagcatattttagctgatcccacggtgaaagtacgtggaaaattagtacatacaatcgaacgaaagttctataaaaaggaactgaaacagatattgaataaacagaaagagtttattcccgaattgcaggataccagtttgtacgaggcgtgtatcaaggaattataccgtaataacgaggctcatattcagtctattgccaataaggattttacagatttgtttgtcaatgatatcattttctaccaacgtccgttgaaaagcaaaaagagtaccatcagtaattgcccgtatgaaagctattattataaaaacaaagagacgggcgagcttatccgtaaacccattaaatgtattgcaaaatctaatcctttatatcaggaattcaggttatggcagttcgtacataaccttcgtatctataagaagagtgaagaagtaagcggaagattacagacggacgtagacgtgacagatagatttctgaccactcccgatgattatgccaaactcttttcttggctgaatgaccgcaaggaaataaagcaaaaagaattattgagatatgaagccttcggactttccaagtcttatggcgattatcgatggaacttcgtagaagacaaacaatatccctgcaatgaaacattgcatgaaatcaaccggcgaatgaaaagtattctttcagacaaaaaactttcatcggaggcctatcagcagctgtggcacattctttattcaatagacgatcctattgaaatacgaaaagccctcacttcatttgcacaaaatcagaaaataaacagtgatgattttgtgaatgccttctatcaatatgtacccgaaaaaaccaagagttacggagcatattcagaaaaagcaattaagaaactgctgccgttgatgcgtagaggaagttattgggcgatcgggaatatcgatgaaaagactcgtcgacgacttgataatattatcaatggagttgcagatgacagcatttccacttgtactcgcgaaaagctgaacaatctaacggatatcacgatgtgcaaggtatgccactttggcaagcctgttacgccgtctatgatcgccactcggaagctgcggacacaacaaaatgggaacaaccggatgacatcgatacttatcttagcacagaattgaaacagcattcgttgcgtaaccctatcgtagagactgtcatcagcgagacattacgtgtggtgagagatatttggaaggcctacggtagaccggaagagatacacgttgaattgggacgaaacttgaagcaagatgccaaaagtcgtaagcaagatgcaatacgtatggcagaaaacgagcagacgaacctcagaatacgcgctttgttacaagaactttccaatcccgaatgtggtgttgaaaacgtcagaccacattctccaagccagatggaactcttgaaaatttatgaaaatgaagttttacagagtaccgataacattccggaagagatcagtaatatcatcaaggatttaggaaaaacggatcccaagaaacgtccaagcttatcggatattactaaatatcgtttatggcttgaacagaaataccaatcaccctatacaggacatattattccactgtccaaactatttactcctgcttatcaaatcgagcacgtaataccgcaatcacgctatttcgacgactcaatcagcaacaaagtgatttgtgaagccgaagtaaataaggagaaagatcgtatgttgggatatgagtttattataaataagggcggcagcattgtcaaaggaagtttcgggcaagagttcaaaatctttgataaagtgcaatacgaagactttgtcaaacaacgttatgctcataataagactaaaatgaagaaactgttgatggacgatatccctgacggattcatccaaagacaattgaatgacagtcgatatatgagcaagaaaattatcagtatcttgtctaatatcgtaagggaagacggtgaaaaagaggcaacttcaaagcatatcatcgtgacgtcgggtgccatcaccgacaggctgaaaaaagaatggggcataaaagatgtatggaacgacatcattgcgccacgtttcaaacggctgaataaactcacggacagcaataattacggaatggaaacagagaaagaaggaaggcaatattttcaaatcaacgttccgatagaactttctgcgggattcagtaaaaagcgtatcgaccaccgtcatcacgcaatggatgccatcattatcgcctgcactacgcgcaatcacgtgaactttctcaacaacagtaccgccgcatctgatcggaaagacatcaggcgtgatcttcaacatactctatgtactaagaccaagactgacagcaacggcaattatgtatggagattcaataaaccttgggatacctttacgcaagacacacgccaagagttggagggaatcattgtcagtttcaaacaaaatctgcgtattataaataagatgtccaactattatcaacactatgtcgatggtagaaagactatcagccgacaaaataaaggtgacggttgggctatacgtaagtcattgcataaggcaactatatcgggaaaagttaatctgaaaagaagtaaaacggttggttttaaagaagcactgaatgattggtcagccatcaaagacaaaacatcgaaagctattttgcagaagattattgctcaatataaaaactacgatcctaaaaccatatttaaatatttcaaggatcgcaactttaaagtagagggtaaagattttagtaagcttgaagtttactataatacatcagataaagaaccgatgtctgcacaccgtgtcaatatagataccacttttgatgagaaagaaatacgctctattacggatacgggaatacaaaaaataatgctgaaacacctccatacttacgatgatgcgcaagggaaaactcatccggaggcagctttttcacccgaaggaattgagaagatgaatcaaaatatccgaacgctgaacggtggcaaggatcataaacccattttcaaagtaagaaaagcagagactttggggatgaagtttgctgtgggtgaacgtggacataaagataagaaatgggttgaagcggataaaggtacgaacctcttctttgctatttatgaaagtgaagaaaacaaacgatcttatagctccattcctttaaatgaggcaattgacagattgaagcgaggagaaaacgtaactgatgaacgagatcagaatggaaataaattgctattcgttctctcacctatggatttagtatatgtaccggatcccgatgatgctcatatcgatgaggtgaaaggaaataacaatatatttaaaatggtatcgtgcacaggaacagaatgctattttgttccagaaacttatgcgaatgtcatctgcaaaggaaaagagttaggatctttgaacaaagtagaatcttatgacggaattaacatcaaaaagagttgttacaaaataacagtggatagattggggaaagtgagaaagatatttaaaggttaggcatatgataaagaaaacattatactttggcaatcctgcctatctgtcgctcaaaaataaacaactcgttatcaagataccggaaattgaacggaataaagagttgcctgaaataatacgcaaagagtctgtcaggactattccgatagaggatatcggagttgtcgtattggatcataaggagataacaattactcaatcggtaattgcagcattactcgataacacagtagcttttatcacttgcaatgataaacgtatgccgacaggaatgctcttaccattgcaagggaatacgatacaaaacgagcgattcagaaatcaactcaacgcctctttaccattgaaaaaacaactatggcaacaaacaataaaagcgaaaatcgaaaaccaagcatttgtgctccatcgcaatactgggcgctctatcgctaatatgatgaaaatggcaaaagacgtacgcagtggtgatcccgataattacgaagcacaggcagctgcatattattggaaaaacatatttaagaatcaaccgaatttcgtgcgtgcccaggaaggagaatcaccaaacaacctcctgaattatggttatgcaattcttagagccatagtggccagagctttggtaataagcggtttactccctgtggcaggaatccatcaccacaaccgctacaacgactattgtcttgctgatgatataatggaaccatatcgccctttcgtagatcaattgatcattgaaataatgaaaaatcaggatattcccgagactttaaccattgacttgaaacaacaaatgttgtctatccctgtacttgatgtcaggatttcaggaagacgaagtcctttgatgattgctgtatctcaaacgacagcaggattggcaaaatgttttaatggagaatcaagaaagattgcttatcctgaaatagaatgatcgacagattcaatgaatacagagttatgtgggtgctcgtcttttatgatcttcctaccgaaacgaaaaaagagcgcaaaatggcagcgaaatttcgtaaagatataatgggggacggcttctcaatgttccaattctccatctatgtacgccattgtgccagtatggataacgctcaagtacatatcaaaaggatacaatcaatcctaccagaggcagggaatgtcggtattatgtgcatcactgacaagcaatttgcagatattaagatcttcttttgcaagaaagaaaaaagaccgaatgcacctggtcagcaacttgaattattctaaaaacagaatgtggaaattcaatttatcatagaatctccacattccaatacaacaattttttctttctgtaaaatcaacaataagtccttatcccacagtatattatacaaactatattgttgtttaccccacaaaggtactaattttttagctaatcacaaccgcatcttgcaggagacacgcgacctctggattgttgtttaccccacaaaggtactaattttttagctaatcacaactaatcataactaacaaaattcattatacaattgttgtttaccccacaaaggtactaattttttagctaatcacaacatgttcgggcataatcaaaattaaacgtatattgttgtttaccccacaaaggtactaattttttagctaatcacaaccattatgaggtgatgattgagagtaagactattgttgtttaccccacaaaggtactaattttttagctaatcacaacctcgtgctcgaatttatcatcaagcacattattgttgtttaccccacaaaggtactaattttttagctaatcacaacataaattcgcgcctgcagtaagtaaaggctattgttgtttaccccacaaaggtactaattttttagctaatcacaacaagacacgcagtacacttcctgcaagaggcattgttgtttaccccacaaaggtactaattttttagctaatcacaacattgataatacatatattaactatttat

SEQ ID NO: 744 - DNA, 15715 bp, synthetic construct
  misc_feature 1..15715: note = Synthetic
  source 1..15715: mol_type = other DNA
tgttaagcctgtagctagcgttcatcctgagccaggatcaaactcttcattgtaatataatgtttttgttttctctgtttatatgctcaagactacctgttatttattagagtaattgacggtttgttttaaacctttgttacttacatgccctgtttccagtgcagtgcaagtcccttgtacttctctacaaaatagttttatgtaatttctttcaaagaactctttgctgtcgcggtggtgagtggtgtaccgctcgtcccgtttagcgagtgcaaaattacggactttttccattcccaccaaatgttttcgcaattatttttcaagaaaaaattgcgcgaaaaggacaaggcgctaaaagacaacgctttgcgccctgaaaaatttttcgacttttttcggtcgacaacacggcaaaggtaggaaacgctaagaatatggcaaaaatatattctggaaattgctgggttttatgccgaagaacatggtttcggaaggaaccctgaacataattaagagcatttcgcggccaaacagtgtttgctggagtatcaagaatgagcggattctcacaatatggaccacagtatctttgcgttttatgcaaacgtaaagaatatctatgggggctattaaaacaaggtccgctctaattatgatttgaacgatagctttttcatatataatgaatgaacaacaggactgccccaacaagacatgcgccattctgctacaacgttccgaagtcccctgtataaaaacgaagtgacttcgtgaatttcacgaagccactcgaaatgttttcacaacggaataatccttattgcgaattgctttcaattagcaagggcaaagtaaacaaatatttttcagaaagcaaagccttttcacaataaattcactacatttgtaaatgtttctatacagagggctgttttagaataccaggtaggcccgtacaacaactcatttttcttaaaagctaccaggtgttatggatctccgacgcataagcaactatgtattttgtattcctcacaccatgtagccgccaacagtacataccctttcaaaactggacataataggacaccccttaaccgattcaccacacataaaacacaaccatataatatcatgacaaagaacacaaggaacatcattggcctggacttaggaacaaatagtattggctggagctggattcaacagctaatatcacctacctcaacgcaaccttcagaatatctttttgacggaactcctattattaggatgtctggcagccgcatcattccgatgcctggagatgtcactggaagctttgagcgaggcgaaaccatctccaagaccaaagacagaacagctaagcgcatggctcgccgcatgaacgaacgctttcaattgaggcgtgaacgtttaaaccgcgtgctaaatattatgggctttctgcccgagcactatgcacgcgctcttgaccgctacggcaaattaaacgaagaaagcaacaccaccatcgcatggcgaagcaaagaagacgggaagaatgaattcatattctatccgtccttccttgaaatggcatctatttttaaggagcgccacccagatatccaacgcattcctttagactggaccttatattatctccgcagcaaagctctacaccaagccatcaccaaggaggaattgtcatgggtgttacatagtttcaatcagaaaaggggctactaccagccgcgcaaagacatcacagaaaaagaaaagaccaagaagattgaatacatcaaagacatcgtccgctccgttgaagacactggagaaaagaccaaaggcaaaaaggcatataaagtgaccttcgacaatggctttaaattcatcagcacagaagccgaagcccccttatgggttggccgcacacgcgaagtcattgtaacaacatcactcgacgccaccggtgcccccaaacgtgacaaggaaggagatattatccaaagcgtaaaagcccctgaagaaaaagactggactctgaaaaaaatccgcaccgagaaccacatcgacaagagcaaactgaccgttggtgaatacattcttcaaaccctgcttgaaaaacctgacacaaaaataaagggggcacacgtcagcaccattgaccggcgcttttacatacatgaaatcaatgccatattaaaagttcaagaaaaataccataaagaactaagagacaagtctctctacgaacagtgtacccaagcactatatacacaaaacgaggtaaggcgcaacatcatcgccccatggagcatgtcagacctgctcattaaagacatattgttttaccatagacctctcaaaagcaaaaagtctcaaatatcagaatgcccatttgagtttcataactatacagacaaaaacggagcatcacaccgacaaggcatcaaatgcatcccaacgtcacatccgctttttcaggaataccgcatttggcaattcatagccaacctgcgcatatacgaacgtgagcgttttgacaacggcaagcaccttatcaatgaaaacaagacatcggaatttctaacgagcgagaagaaagaagaattgtttgaatggctggcagaaaaagattccgtgagccaaaagaccttactgggccacattggactgaaggttgaacattatcactggaatttccccgaagagaaaacctatccctgtggggaaaccaggcatctaattcaaagcagactgaagaaagctaacctgctgaaatccttctgttcattggtgcctgaaaaccaaaaaaaggagtttgaactcaaattatggcatatcctctattccgtcagcgactacaacgaactacgcaaggcgttagagacatttgcaagaaaaacagggttcacacgcgaagagcaagacctctttgtggaatttttttcatcttgccctcccttcaagaaagtctatggagcctacagcaaaagggccatcgccagattactgccattgatgcgcctcggaaaatattggcacgaggagcacatcgattccgcaacaatgaaccgcatcgagcatctcatctctggagaagaatgcaacggcattgacgtccgcgtccgcgaaaacatcgccaagtttggactcaacgaatccatagaacaatatcagggactcccacaatggctggcatgctatgtcgtttacaaccggcattcagaagcatcagaagtcacaaaatgggaatctcctgaagagttggacaattacatcaaggctttcaagcaatattccctgcgaaaccccatcgttgagcagatttcgcttgaaacactgcgcgtggtgcatgacctctgggcagaaatccaaaaagaaggacaaacgattgacgaaatccatttggaaatggggcgcgaccttaaaaacacagccgaggaacggtccagaatttttagaagaaacagcgagaacgaagataccaattttcgtatcaagcttctgttggaagagttttacacaaacgaagaagacatggaaggcatacgcccctactctccttcgcagcaagaactcctgcgcatctacgaagaaggcgtttggcagcaggaaaaagagattccgcaagacatcaaagacatcaaaaagaaactctcgagcgacaaggacatcaacgagatcacgcacagcgatgttcaacgctatagaatctggatggatcagaaatactgctctccatacactggcaatccgattccattgtcgcgcctcttcactcccgactacgaaatcgaacacgtcattccgcgttcacgatattttgacgactcctataataataaggtcatctgcgaagccgctgtcaacaaagacaagaacaaccggcttggcatggaatacatcatggaggccggaggaaaaacaattgagctcggcaacggaaaaaacgttcaagttctgaaggaaagagaatacgtagaactggtcaacgaggtctttaaaaacaacacacgcaaacgcaacatcttgctggctgacgaaattccagaggatttcagccaccgccagttgaacgacacgcgctacattgcacgcttcatgaaaggcatcctgtcgaacatcgtgcgcgaaaaaaacgccgatggcacactggaactggaggaaacttctaaaaacctgattgtttgttcagggcgaatcaccgaccgcatcaaacaagactggggactaaacgacgtttggaatcatatcatcacgccgcgttttgaacgactgaaccaaaagacctcatccgacaactttggagaatacgtgtgcaaagaaggcaagcgttatttccaaacgcgtgtgcccctcaatctgcaaaagggcttcaacaaaaagcgcatcgaccatcgccaccacgcaatggacgccattgccatagcatgcgtcaatcgcagcatcgtcaactacctaaacaacgctgctgccaaccaaaccgaacgtgaagaccttcggcgtgcggtatgtatcccagaaagaaacggacaaaccaaacgccagctccgctcgccatggcgcaattttgcaaaggacgcagaaaacgccctgcgacaaatcgttgtgagcttcaagcaaaacctgcgtattctcaccaaagccaccaacagctacgaatgctttgacaccacctcgggcaaaaaaatccgcagacatcaagtaaacgaagagcactacgccgttcggaaaccgctacacgaagattttgtctatggcgaagtcatcctttcaagcatcgcctcagtcaattttaaaaaagccctgcagaaagcgaacaggattttagataaacgcctgaaggacaaaatctttgagttacgcaagctctacagctatagcaacaaacaaatagaggagcatctaacaaaggtgtgcatcaacaccccggaatggaaggactatgatttcaaaaagataaacatccgcattctttccaacgatgaaggtgccacccacattgttgccatacgaaaaccgcttgacgaatcctttgataaggtcaaaatcaacaccatcacggacactggcatccaaaagattctactcaaccacctaagccgatacgccgaagacccgaagaaagccttttcgctggaaggcatcgaagacatgaatgccaacatcacatcgctgaacggcgggaagcaacatctgcctatatataaggtgagggtctctgaaaaagacaacggcggctattaccccatagggcaaaaagggaatcgctcaaaaaaatatgtcaccacagccaaagacaccaacctgttttttgctgtatacgcagacagcaatggcaagcgcagtttcaagaccattgatttgcgcacggccatcgaatgcaagaagcaaggcctgtccgttgcccccagcgtgaacgagaaaggagaacaactgcttttcacgctctctcccaacgaccttgtatatatgccgtcggaagaggaagaggctaacggatttgccatcgacaataatctcaacaaagagcatatctataaaatggtaagtaccgacagtaatcgatgctttttcattccccacactgtggcagacttcatatccagaggcgaagaatacaatagacacaacaagattgaactcacagaagacagacgcagcatcaaagagcattgcgttcctctgaaagttaaccgcctgggtaaaaaaacactctaaagaatctagcaacaagactgcaattgtaattcaaacagatgattacaattgcagtcttatgcttttaaaaccttacgatcatgataaagaaaacgctctattttggaaatcccgcctatctgagcctgcgcaacaaacaattggtcatcaaaatgcccgctgtggagaggtccaaaaatgttgctgacatcatccgggcggaatcaatcgtcacaaagcccatagaagacttgggcgttgtggtgctcgaccaccagcaaatcaccatcacgcaaggcctgctggaagcgctgcttgaaaacaatgtcgccctaatcacgtgcaactcccgaagcatgcctgtcggcctgcaactgcccctctacggcaacaccattcagaacgaacggtttcggtcgcaactcgatgcctccaagccgctgcaaaaacagctgtggcagcaaacgatgaaagcaaaaatagaaaaccaagcctgcgttcttagaaataacacggaaaccgaaacacgatgcatgtttgtctgggccgaatccttgaagagcggagaccccaccaacatggaagcacgggcggccgtttattattggaaaaaccttttcctcaaggaatgcgccggcttcatccgcgaacgggaaggcatgcctcccaacaatcttctcaactatggctatgccatcctgcgtgccgtcattgcacgctcactcgtttgcagcggcttgttacccactttaggcatacaccaccacaaccgatataacgcctattgcctggcagacgacattatggagccatatcgtccgtatgttgatgaactggtattggaaattatgcggagcggcattgaatacagagaattgacaacggctttgaaggctcaattgctaaacatcccaacattggatgtctatatcaacggcaaacgcagtccactcatggtggctgctacaatgaccaccgcctccttggccaaatgtttcagcggcgaaatacgcaagattgcctatccgtcaatctctacgagttgattatgaaacgtttaaacgaatatagagttatgtggattttagtgttctttgatttgcccacagagacgaaaaaagacataaaggaatatacaatattccgcaaattccttctggacgatgggtttacgatgtttcaattttcaatctacatacgtaactgcgccagcagcgagaatgccgcagtacataccaaacgaataaaatcacgccttcctccacatggaaaagtaggcattttatgtataaccgacaaacagtttgcaaacatggaattattctttggagcgaaggctcaaaaggctcaagcggagggatttcaactggaattgttctaaaaaacagaaagaggtagaacagagaaaatccatcgtcatttctcgttccacctcttctatgacaaacttttcttttttctatttatcactataacttattgatttccttatcataagacgaatcaagctgtttgtcataggacaaagttactaatttgaaagcaattcacaacgagcgaaagtatatcctcagagaaaacctgctgtttgtcataggacaaagttactaatttgaaagcaattcacaacgtggaacgtcttcatgcccgagaagatatagctgtttgtcataggacaaagttactaatttgaaagcaattcacaacgtttctcattattattctattaataaccggctgtttgtcataggacaaagttactaatttgaaagcaattcacaaccaccgaattgtttgttcgcactgctcctctgctgtttgtcataggacaaagttactaatttgaaagcaattcacaacacgccaaaattacaaatataattgcaagtgccaacataatcattttcttaatatcccaagaagtttgaaatataaccaaacctcataggaaatcctatatctgttaatgaactcgatagtcgcctttcgcattggttcctgattgcgcaagacaaactccgtatctgatttcattcggtcgtacaacgcccttgtagttccctccataggaactttcttaacaaatgtactgtcagaagaacgaaactccatcccgaaacgatgtacgatagaatccgttattacttcatagacttcaatgtaagtcttacccgaataagaataacgagtgcctgacctataaacatacactccttctttaagagccacagtatcttgtttcagtttgtccggcactttatcctgaccgtagcatacaaccgaaaccaacaacgccattacgaatataatctttttcataatcctatattttaaggaagtgggattgctcccactcccgatttattttacttgtcctcagaatttgtttctttcttaggtaacttaatccacttgtcaagtttcaacagaccaatttccttaccgagaactattcccttatccacagatgataccgtctgagttttaagttcaccactcacgtaaatcattatcctatcgcccacttgcaaatcggcttcgtagagtaagtcatgtggagcaacaatacccaccgcatcgtacaccatgcacagaaccctcgcattatgcgccgtattttcaagcgcacgtttcttgtactcaactttccagtcaatttcaatcgggttcttgataagttcaacatccgatatttcaccagccgcgtatttcattatctgtgacatcgcccgcttctcataaaatagcaggtactccatcaagaacggcacggcatcaatccacttatcatccacctcgattttatcaccgacaagaatacctactttcttatgctccggaagcaacgtacccgtaaacgaactgcggctgtttgtcataggacaaagttactaatttgaaagcaattcacaatagttatacacgcatattccgcacctatggctttttgtcatgattcaaattacccatttgagagcaatttagaactaacattcacctcataccacactgctgcctgtgccatcgcgtccttgagggcttctaaaaactgcttgtagtactcctgcgtgatggtgatatgatgctctgggtgttgtccgtcgtggtcgccactcgccagatggatgatgaagaatgtgcggtctgtgtcgtgatgcgccaccatacctcgcttcttcaaaatcgccatagtgcgctcaaagtctgccggcgtggtaggcaccacctgaagaacgctccagggatattcctgtgccgtgagaagtatttgcccttcctgctcagaaagcaggaaggaataaattgtttttgatgttaccataggtttaagtttttcgtgcaataaagttattcactgcaccttagtaagggttaagggatgttctataaattagttttaatggagattctttatttaggattgacttggccgcttttacagttctcactcgcatcttgctgtatttcaaagactcacatagctcgctatgctcgtctttgaaatacaacaatctgcttcgcgataaatgtaaaatcggctcaagctaatttatataacaccccttaaaaactacttgaactattactaaactgttcagcgctggacaaagttaccattttacaggcaattcgccgctttttctttcagttttcccgtcgttttgcagactgcttctcaaggctgtccatccccttctccgtcaatatataatatggagcagaaatgtgtccctgtttcagtagcaatccttcttttgtcaagcgactcaatgttctctgggccgttgaacggctatagcctgtcagagattgaaaaacagcgcggtccaggaaacggacgttctcagaattgaagaaatcgcgaacacgctgaagaatctccgaatccgtcaagacgcagaatacgtaaggcactttcgttgagcgcttgaaacgcacatcgtgcattttcttccgcaatcccacttttggtctgaaagcaatgtttctcacgtaaagatcccgcgttactttcttgtcatttctgtctgcaattttgcgatggcaggaaatcatcggactaaaatagcccaatcccggaatctccacgttggttccgcacgagagtttctctgcaacgacattcaccaaggcgtccataaccgccacgatgtcggtcgaagtgacggtgcaacgattttgtaccgtttcatacaattgctccggcgtaaacttaccggcattcgccactacgggataatagcccactggcgattcttctgtgaagcgtggcagctcacgcaatgaaaatgaaataattgacatggtttaagattagtgttaggtttgataattgtctgggatgtcattcttcacctccctggggaagtaacgcgccatcgtctgcaacgatgcagggcgaacgcgcggaaggaaacaggaatacagcgctgaaaatcatcctgaatccttttctttcgacacgctccttatgtttgacagcgaacgcgggacgagacgcaaccgaatctgggacgagagacgaccgaatctgggacgaggcacgaccgaatctggggcgagaggcgctgacaagttgagagagcgtggcgcggaggattatttgacgctgcaaagatagggcattatcgtgacagaccacggcaaaaagaaacttggagtgttaaaatgtagtgtcaaagtttctgttcagcaaattctgaggagtctgccagataaaatctcagaataagccaggaaagagagagggaaaggaattatgagaatggggatggttttttcttgcccgtttcaaggtgcactgtggaaattagcatacaacacgccttgtctttcccaaaacacggagatgagaagtagcgagatgtatgttttaacattaagagtggcaattttaagattaaaggtgtttgtcctgtcacaagaaattccgaacttagcaacggtaagtagatgttcagaattattttataatatgaaagcagcgaaagagcagtttgatatgatagaatcgttttgaacacctgctaaacaggcaaacactaaaataaaccttgctccgacttccccactccactgacggggagggcgcaacaaacaaaatctgaaaccaatgaaacaggaaggatatgtgcagaagcaatttggcatcaagaccaagcgattctgccagacactcgacttgaaggatgagccagagctcattgctgcatacaaacaactgcacgacgaagaccacgtttggagagaaattcttgacggcatcaaagaagaggggattctcgaaatggagatttatctgctggagaaccgcctgtttatgatcgttgaaacaccagaggatttcaattggaatgattcgatggagaaactggccaaacttccgaagcaagaagaatgggaagcactgaccgggagataccaaaagacgaaaagcggtgccacttcttcagagaaatggcagcttatggagcggattttccacctatatgaatagggcggattattccgcgtttcacgtttaaagcggaacgccacgtgatgcaacatcaaacgacggcagaaaaacgtcttgagaactttcaaggatttgccaacaggatgctctgaaacggcctcttcggacaaaaccaagagtaattatatggtcttcgttttcgccaataccaaaacattttattcaccccattaaccactacgaccatgatgtaccaactgccaccattgccttaccctaaggaggcactttcaccagctatcagtgcggaaaccattgacttccactacgggaagcattttcagacgtacgtcaacaagctcaacgaactgatcaaaggcacgctatatgaggatatggaactgccggaaatcatctgcaaagcttctggcgctctctacaacaatgccgcacaagcctggaaccacgatttttatttcgaacaactgtcgcccaccccgacggagatgagtccgcgcctcagcgcccttatcatgaaatcgtttggaacgattgagaaattcaaggaagagttgttgcaaaacgccacgacgctattcggagcaggatggacatgggtcgttttgcacgacgacgaaaggctgaccattgagaacgaatcaaacgcaggaaacccgcttacacgcggattgcgccccatcatgacgctggacgtgtgggagcatgcttattacatcgactaccgcaacaacagagcggaacatctgaagcagatttggggcttgattaattggaacgttgttgaagagagggcattctgcaacgaatgcaacgtctatatataataggtgttccaaacttcgtatttgagaatgccccatgatccattgaccgcgggtttaccatgactcgcggtcattttgatggattctccttccgtcaaccccgcatttcttgcatcgcaaatcacaaaatcagcgctttattttgtctatcagacatttctttgtatttttgcccaacaatacaaaccgatgattgctaaacatatggaaaatccaatacagataatgaaatcggctgcagacaacatcagagtattgtctgtcgcaatggtagaaaaagctaagtcaggacaccccggcggcgccatgggtggagctgactttatcaacgtactctactccgaatttttggtctttgaccccaacgaaccgacatgggaatgccgcgaccgcttcttccttgatcctggccacatgtcgcccatgctctattcggaacttgcactcatcggacgcttcagtctttcagaattacagcagttccgccagtggggttcgccaactcccggacacccggaagtttatttcgcccgcggaattgaaaacacctctggtccgctcggacagggacacacctacgctgtcggtgccgccatcgctgcaaaagcgctctacgcccgcactggcaacccaggattcaagcgtgaaaagatttacgcctacatctctgacggcggcgttcaggaagaaatatcacaaggcgcaggacgtattgccggacacttgggcctggacaacctcatcatgtttttcgacgccaacgaaatccagctctcaacagagacttcggaagtgatttctgaagacactgccatgaagtatcgcgcctggaactggaacgtcatcgaaattgacggcaacgactgcgaacaaatccgcaaagcgctcaaagaggctaacaaggaaactgcgcgcccaacgctcatcatcggacacaccgtcatgggaaaaggtgcccgcaaggccgacaacacgagctacgaacgtgactgcaaaacgcacggcgctccgctcggcagcgatgcctataccaacacggtcaagaacctcggcggtgatcctgagaatccgttcgtcatccgccctgaagtggccgaactctatgaaaaccgacgcgccgaactgaacgaaatcgttggcaaactgcgtcaggaagaaaagagctgggctgaaagcaatcctgaaaaggcaggacagctcaaggactggctcagcaacaaattgccaaacattccttgggacagcttgaagcaaaagccaaattctccaaccagaaatggttcttcagcctgcttgtctctgctttcagaatatgtgcccaacatgattgtcagctctgccgacctctgcaactcagacaaaacggatggtttcttgaaacacacgacggtgatcacacgcaccaactttgcaggcggattcttccaggctggcgtttctgaactgacaatggcatgtgtctgcatcggtatgacgctccacggaggtatcatcacggcaatgggaaccttcttcgtgttctccgactatatgaaacctgccatccgtatggcagctctcatggaattgccagtgaaattcgtctggacacacgatgccttccgcgtcggcgaagatggtccaacgcacgaacctgttgaacaagaggcccaaatccgcttgatggagaaactcaaaaaccacagcggcctcgacagtgtacgcgtattccgcccatgtgatgttcacgccaccaccaagtgctggcagatggccatggagaacttcagcacgccgacggcacttatcttcagccgccagaacgtcaacgatttgcccgaaaacacgaactacgatggcgtaaaattcggtgcctatgaagttgttgctgaagaaaatcctgatgtcatcctcgttgcttctggttcggaagtaagcacattggctgaaacggccacgatgctcaaagaagacggcatcaaggcacgcgttatcagttgcccaagcgaaggtctgttccgccgccagacaaaagaataccaagagaagcttctcccgaagaacgccaagatattcggcctgacagctggtcttcctgtaacctttgagggtttggttggtgcaaacggcaaggttcacggccttgagagcttcggattcagcgccccctataaagtgcttgatgagaagctgggctacaccccgcaaaacatccaccaggaagttgttgatttcttaaagagcaacgactaagaaactggtttcataccaaaagaatatgtaatctatcattagggtggctcttccatacaacgaacggagccaccctaatataagtaaaggtaagcagacgcgaatggtttgacaaaacgcctgctgcgagtttggctgactaaatgtagattcaacaaatccaaggatctgccctcacccacaaccgttatccatcatcaccaggacgccacaagcgcctcataaaacatttttcattatgctcccaattggactggcaagcgaccacgccggatttgaactcaaacagttcgtcaaaaaatatcttgacgaaaaagggatgccatataaggactatggcacctatagcgaagaaagctgcgactaccccgactttgcacacgcattggcaagaggcatcgaaaacggagaatgcgaaaaaggcgttgccatctgcggtagcggcgaaggcatttccatgaccctgaacaagcatcagagcatcagagctgcccttgtttggattcctgaaatcgcacacatgacacgcctgcacaacgatgccaacgttttggtcatgccaggacgctacatcacaagcgaagaggccggaaagatcatggacgaatttttcaatacggactttgagggcggcagacacatccgcagaatagaaaagattccagtctgaacggacgaagggataagtcacgccttttcatcttgtagctttcaaaatttttaattgacagaaggatgtaacgccaaatggttgacagaaggcacaatacgccgtcaagaaaaaaacgctccctgctctgactttgcaatcgcaaccgacattcaacgccggccggaaatttaaaacggcataaagactggcaataaaacatatttacagtcttcaaaatgttgcggaacttgcttttttacccttacaaaggcaaaaaacagagctgtaagtttctccaaaccaattgaaaattatatctttgcacccgatttcacaaagaggtttaacacaataaaaacaaactacagctaagatgactaaagcagacatcgtaaattcgatttctcagaagactggcattgacaagccaaccgtgcttaacattgtcgaagcattcatgacatctgtcaaagaatctttggcaaacgaagaaaacgtttaccttcgcggattcggcagtttcattttgaaaaagcgtgcccagaaaacagcccgcaacatttcaaagaatacaaccatcatcatccctgaacacaacatccctgcattcaagcctgccaagacttttatgcacgaaatcaaataaacatacaattcacatttataaccgtctaaaaacataacactatgccaagcggaaagaagaaaaaaagacataagatgtctacgcacaagcgtaaaaaaagactgagaaagaatagacataagagcaagtaagcacttagcctttctcaaaaagagatgtgccaatatggaaaagagtacaaaaagtgc

SEQ ID NO: 745 - DNA, 15426 bp, synthetic construct
  source 1..15426: mol_type = other DNA
  misc_feature 1..15426: note = Synthetic
atgaaaatgtcgctaatgttgttcttttaagaacaaaaacattcggggtttgtttctattttcggaatatattttttatttttgcaaaaagaattcgtacaaatgcaacaacgaatgaataaaacaataatttaatacctatgctcattacgattattatccttgtactgtccgcagtattttttgtaaatggcaagatacggtcggatcttgtggctctttgtgctttagtggctttgttgatttttcagatattgacgcctgacgaggctttgtcggattctccaattcggtcgtcattatgatggtggggctgtttgtggttggcggagcgatttttcagacgggacttgccaaaatgatcagttcacacattctgaaattagcgggtaagagtgaattgaaattattcttgcttgtaatgttggtgacttctgctatcggggcttttgtgagcaacacaggtacggtggctctgatgttgcctatcgtggtcagtctggcagtcagtgccaacatgaatcccagtcgtttgcttatgccgttggcgtttgccagcagtatgggaggtatgatgacactgattggtacgccgcccaaccttgttattcaaaatgcgttgacttcggccggttttcctccgctttcgttcttctctttttttccggtaggattatttgtgtggcagtgggtactttggtgttgcttccgctcagtaaatggtttctttcgaaacgggggaaaacggagacgacaatgttcattcgggcaaatccctgaaacagttggtgaaggaatatgggctatccagtaatttgttccggttgagggtggtcggtgactcccggctgcatggaaagacgattatagagttggatatccggcgcaagtatggattgaatatactggaggtgcgtcgtggggatatgtcacaacaccgcttcctgaaaacaattactcagaagctggccgatcccggtacggttcttcagaaagaggatattctgtatgtgacgggggattttgagaaaataaagttgtttgccgaagattatctgctggagatgctggacgagcatactaccgaagaagcgaaaaactcagcaattcattgatttttatgacataggtattgctgaaatcgttttgatgccttcctccaatctgataaaccagacgataaagggggcgggctttcgtgataagtttaatgtgaatgtactgggtatccgccggaagaaggaatatttgttgcaggacttgggcaatgagcggattcatagcggggatgtgttgctggtgcagggtacatggaacaatatcgcccggctgagcaaggaagatgccgactgggtggtactgggacaaccgctggccgaggctgcgaaggtcacgctggattacaaagcaccggtagctgcggttatcatggtgctgatggtggctatgatggtgttcgacttcattccggtagctccggtgacggcggtgatgattgcgggtatcctgatggtactgacaggatgtttccgcaatgtggaggcggcttacaaaaccattaactgggaaagcatcgtactcattgcggccatgctgcctatgtcgctggcattggaaaagacaggggcttccgaatacatttcgaacagtctggtcagtgaactgggaacatacggaccgttggcgctgatggcgggtatttatttcactacttccctgatgacgatgtttatcagcaacacggctaccgcagtgcttctggctcctatcgcgatgcaaagtgcaacacagataggggtaagtcccgtaccttttctctttgcggtgacactgggggcaagtatgtgtttcgcttctccattctccactccgcccaatgcgctggtgatgcccgccggacaatatacctttatggattatgtaaaggtagggctgccgttgcagattattatgggcattgtcatggtgctggtacttcctttgctgtttcctttttaagttgtttataatatatgatgccgatgacgtccgctataaaccatccgataggaatagaccaccagattccgatgaccccgatggcaggaatgccggcaagccaataggaaagggctacacggttcccaacgataccactgtgagcactacggacattcccggcatacgatggcacgataatatccgtataacaggaacaaaatcccgattccgcaataaaacgctccctcgatgcgtaaataactgataccgatgttcagaatttccgtttcgtgggggcggacaaaatcagcatcaatggtttggcgaataaaaagaccagaatggaaatgaccagagagaagagaacggtggtaatcaaggcacttttcactcctttgcggatccgttcctcttttctcgctccgaagttctgggcaataaaggtggaaaaggcatttccgaattcctgtaccggcatataggcgaacgagtctatttttattgctgccgcaaaggcggccatgactacagtgccaaaactattgaccaatccttgtaccatcagaatgcccagattcatcaccgactgttgtacacaggtcagtgcggagaacgaagtgatctctttcaggcagtgacggtcgaaatgcaggtcgttgcggtgtaatctcagttcggggtatttcacgtaggcatatcccataattcccaaagcggatactccctgtgcggctaccgtggcgatggctgctcccttgattccccaatccaactgcaagataaagaataaatccagcccgatgttcagtacaacggaaaccgccagaaaccaaagaggagtaacggcatctcctatggcacgcagtaatgccgcatagaaattatagataaaggtaaagccgattccccaaaagataatccacaagtaatcatacatcatgccataaatatctttgggaatctgcaataacctgagaatgggatgaatccagacgaaagccgctatatttagaatcaatgttactgtaccgatcagcagggcggatacatagatgttacggcgtagggaatccgttcgtccggctccatattgcaaggaaaaacggttccgcttcccatggacaatcccagcaggatggaaatgaggaaaaccatcagcgtataggcggaaccgacggcagccaatgcgccggaacctatacattgtcctacaatcagcgtgtcggctatattgtaacactgttgtagcagtgagcctataatcataggtaaggtaaaacgtagcagagtgccggtgatacctccctgcgtcaagtctattttagataacatgatgcgtgtctgttcgattcaatttcttatttattttgaaatttattgcgaaggtagggaataaaatatcaaacaacaataaagattgtctatttaatacccggaatgttctttctccttaaaaagagttaacttgataatatttccataggaaacttttttattataagaaatatcatgtatgtttgcataaagtttccattggaaaatattaaatcaaataaaatagtttaattatgaagtatatagtaataggaggcgtagcaggaggtgcaactgctgccgcacgtatcagaagaaacacggaacaggcggaaatcattttgttcgagaagggagaatacatttcgtatgccaattgtggtctaccttattatataggaggtgtgattgcggagcgggaaaaattgtttgtacagactccggaggcttttgggaaacgttttaacatagatgtgcgtacccggtccgaggtaatagccatccattctgccgagaaaacagtggatattcgtacttccgacgggaaaacttatacggagagttatgacaaattattgctttctccgggtgcgtcgcctgttcgtcctcccttgccgggcattgacaatgaagggatttttaccctacgtaatgtgaatgataccgatgctatcaagagttacttgcagcagcataaggtgaaacgggcggtaatcatcggggccggattcatcgggttggagatggcggagaatctgcaggaagccggtgcggaagtggcggttgtagagatggcaaatcaggtcatggctcctattgatttctctatggcttctttggtgcacgagcacttgttgcagaaaggagtacatctctatctggaaaaggcggtggcttctttcgaacgcacggtcaacggactggaggttgttttcaaatcgggcgaaaggctgcctgccgatatggtgttgttatccatcggggtacgtcccaatacctcattggcgatagaggctggactggagataggggagatgcgcggtattaaggttaatgattacttgcagacttccaacgagcatatttatgcggtgggcgatgctatcgagttccgtcatccactgactgatagaccgtggttgaattatctggcaggtccggccaaccgtcaggcgcgtattgtggcagataacatggtctttggaaataaggttacatacgaaggggctgtcggtacttccattgccaaagtttttgatatgactgtcgctgcttcggccttccggcaaaacggttgaaacaggcaggcattgattatttgtcggcaaccatccattccggttcccatgcgggatattatcctgatgctttacagatgtccattaaaataactttctctcctgtgaatgggaaattactcggagcgcagattgtggggtataacggagtggacaaacgtattgacgaattctcgcaagtgattaagcataacggaactgtttatgacttgatggctttggagcaggcatatgctcctcctttctcttcggctaaagatcctgtagcagtagccggatatgtagccggaaatatactgagcggaaagatgaagcctctttattggcgcgaattacaggctgccgatttgagtaaagttacgttggttgatgtccgtactcccgatgaatttgcactcggtgctttgaaaggggctgtcaatattcctttggatgatatgcgcgaaaggatggaagagattcctcaggataagccggtctatttgtattgtggagtagggttgagagggtatttggcttctaatatattgttacagaatggttttggggaagtaaagaatttaataggaggtttaaaactgtataaagcggcaacggctcctctgcccgagccggaggagttttcaaattctggctcttcaagttctgattcttcaaaagttgatcattctgaacacagtaaagattctgctggagcttatactattgcctcttccgtcattccttctatgaaagcaataaaagtggatgcttgtggcatatcttgtcccggtcctatcatgaaactgaagaagagtatggaagaactggcggacggcgaacgtttggaaattgtcgctacagatgccggttttccccgcgatgccgaggcatggtgtcaaactaccggaaaccgttttgtttcagtaaattcaggagcaggaaagtatcaggtaattgttgagaaaaatactccgcaatcttcttcctcggaagtttgccgggaggataaagggaaaacttttattctgttcagtgatgacctggacaaagttttagctacttttgtactcgcaaacggtgcggcggctacgggaaagaaggtaaccatcttctttactttctgggggctgaatgccatcaagaagctggacaaacctgtggtgaagaaagatatctgggggaagatgttcggcatgatgctgccttccagttctttaaagttgaagttgtctaaaatgaatatgggcggaatgggagctaggatgatgcgatatattatgaataagaaaaatatcgattcattggaatctctgcgtactcaagccattcagaacggagtggaatttattgcttgccagatgtcaatggacgtaatgggtgtgaaacgtgaggaattgctggatcatgtgactattggtggagtggcaacttatatgaaccgtgccgaacaggcgaatgtaaacttgtttatttaaatttgcatggagaaaataaaatcaatatgtgtcatgagagagctgttcaaggctctctctgaacttgaaacccgcttaatggaacaatatgaagtgtcattgaatgaggcaatggcactttgttgcattggcggagatacgctgacggctagtgtgatatcggaaaacacaggtctgtctgcttcgcatacctctaaggtcatccgttccattgaagagaaagaattaatcgtccgtaatttgggggataaggataaacggcagatgcattttactttatccgataaagggcatgaatgtttggaagcgctgaaagcaaatgaaatagaaataccggaactattaaagccattgtttaaataaacccttctcttttccatttgtttattccggatatgaaactggagaaatggaaaacaagtggaaggagtggagcaatctgcgcaaatggcaaatatggaaactgaagctgattgatgcccgtctgtatttcgtgagcatattcgtggggctgcttacgggactggttgctgtgccttatcactatcttctctggtatttctttgatgtgcggaaaacttttttcacggcgcattatccgtggtattggcatgtattgttgttttttatcttatgggggattctgatctttgtcgcttctttggtaaaacgtatgccattgatagccggtggtgggattcctcagacacgtgcggccaataacggtcgtatccgttatgagcatccttttaaagactggtagctaaattctgcggaggggtgttggctctcagtgcggggctgtctttgggacgcgaggggccgtctgttcagatagggtcttatataggaacacttatctctcgttggggacatattctgaaaggggaacggaaacaattgctggctgccggagctggtgcgggcttgtctgccgcttttgctgctccgttgtcttcttctttgttggtgatagaatccatcgagcgttttgatgcacctaaaaccgctattactaccttgttggccggcgtggtagccggaggagtggctagttggatgttccccacgactccttatcatctgattagtgcggtcgttcctggtttatcttttatccgtcaggcggagctttatattatctttgccgcccttatggctgtcattgcaaagttttattcgctcatcgttcctttctttcaagaaaggatacctgccatgaaactctccattcctgtcaagatgttgtatttattaaccatagcttatgccatatcgttaacagagacgaatctgacaggtggcggagagcagttttgatgatgcagggaatgaatggaactcatgatatccagtggcttactatcatgatgcttattcattttgtttttacgctgttttctctttcttcaggtttgccgggaggaagtttcattcctaccttggttacgggaggattattgggacaaatcttcgggttggtattggtacaacgcggatggatagggtatgagaatgtgagttatatgatgctgatcgggatggtggcttttttggtggctgtggtgcgtactcctttgactgctattgtcctgataacggagattaccggtcatttcgaggtgttctatccttccattgtggtaggtggattgacttattatttcaccgaattgttacagataaaaccttacaatgtattgctgtatgacaggatgttccgtagccataatccggagtcttccgaagaggctggtgctcgctatcatctttttgtcgagataatggatgggtcttattttgacggaaaggaagtggatacattggctttacctaatcattgtatcattcgtagtatacatcggaatcgtaaaaacttacttcctcaggggcaaaccctggttcccggtgatcaagtggagatagaaatagatgcgcaggatatagaaaaattatacgaaccgttagtcagtatggcaaatatctattaaaagatgagtctaaaaaagcccccgttaaaggacgagggcaacctaaatgttttcacaacggaataatccttattgtgacttgcttcaaattagtattgcaaaactatgaaataaatatgtaaaggacaagtgattattagaataatttgataactttgaaaagttttgataaaatagttgtcttatgaaaaatatagtgggtcttgatttgggtaccaatagcataggttgggcagtagtaaatggaagtgtcaatgacgatggaagtgaacaattggttaagatacaagcttcaggaagtcgcatcatacctatggatgcagctatgataggagattttaataaaggtaattccatatctcaaactgctgaaagaaccagattgcgtggagttcgtcgtttaagcgaacgatatctgcttcgcagagaacggttgcatagaattcttgatatttttaggatttttgccttttcattttgctcaagatttagataggcatggtaagatagttaagggcaaggaacctaaattggcttggcgtaagaatgaagctggtcagtttgaatttatattccaagattcatttaaggaaatgctggaggattttaagctaaattatccgaatctgataacagatgataaaaaagtaccttatgattggactatctactatctccgtaaaaagggattgacttctaaaatttcaaaagaagaattggcgtggatattattgaattttaatcaaaagcgtggatattatcaattacgtggtgaggaagaggaggaaaataaggataaattggttgaattctatgctcttaaagtagttgcagtagaggattccggagaaaaaaagggaaaggatatttggtataatgtgcatttggaaaatggatgggtgtatcgaagaacaagtaatatgtctcttgattgggttggaaaaactaaagaattcaattgtaactacggatttagagaaggacggaacgcctaaaaaagataaggaagggaatgtaaaacgctcttttcgtgctcctaaggaagatgattggtcattggtcaagaagaaaacagaagcggatattgatcaaactcataagacagtaggtgcctatatttatgatacgcttttaggaaatcctagtcagaaaattcgtggaagactggtgagaaccattgaacgcaaatattataaggaggagctgaaactgatttggagaagcagaaggagtttcacctggaattgcaagacagagcattgtatgctgcttgtattgaagaactatatccaataaatgaagcacatcggaataatgttggtaatcgggattttacttatttgtttttagaggatatactcttttatcagcgtcctcttaaaagcaaaaaatcattaatagacaattgtccttatgaggagaatcagggtcttgataaggaaacgggagagataaaatcttttcctgtaaaatgtattgctaaatcacatccgttgtttcaagaattccgcttgtggcaatttataataaatctgcgtatttataggaaagacctggcacaagatgtggatgttacaaatgagttattgaagacagaagaagattatgttgctttatttgactggttgaatggtaaaaaagaaattgatcaaaaggcttttttgaaatatccggtttttggactgaaaaaagagatagagaattatcgttggaattatgtgcaagacaaaccttatccatgtaatgaaacccgttcattgatgttggcgaggctggagaaatgtgatatttctattgaattcctgacaaaagagaatgaggaagctttatggcatatattatattcggttgaagacaagaatgaaatagtaaaagctttgcagaaatttgcggataaacacgacctgaatgcttcttttgttgatgtgtttcagaaattcccaccttttaagaaagaatatggttcctattcggcaaaagcaattaaaaaattattgcctttaatgcgtatgggaaaatattggagtgagaattcaatagataaaggaacgcgtgaacggattgataagataataacaggagaatatgatgagaaaatagaaaatagagtgagggagaaagcaattcatcttgctgatgtttctgatttcaaaggtttgcctctttggttagtgtgttacattgtttatggtcgtcactctgaagcaaaagaaataatccagtggaaatctcctgctgatattgattcgtatttaagatcttttaagcaacattcattgcgtaatccaattgttgagcagattattattgaaacactacgtgttgttcgtgatatttggaaacaagtgggaaatattgatgagatacatgtggagttggggcgtgagatgaagaatccggctgacaagcggaagaaaatgacacagcaaatgtctgaaaatgagaataccaacttgcgtatcaaatatttgctcacggaatttttgaatcctgaatatgaggttgaaaatgttcgtccttattcgccaagtcagcaggatattttgcgtatttatgaagagggtgttttaaatagtgtttccgatttaccggaggaaatatcggatatattgaaaaagtttacagaaacagacttgaagaagcgtccttcaaggtcagaagttttgcgttacaagctttggctggaacagaagtatcgttctccttataccggtgaagtgattccattaggtaagttgtttacgcctgcatacgaaatagagcatgttattccccaatcatgttattttgatgattcttttagtaacaaggtgatttgtgaagcggaagtcaataagcttaaaagcaatttattgggacatgagtttatagtgaagcatcatggggagatagtggaacttccttttggaaaaaagtaaggatcttcactgtggatgaatatgagcaatttgtgaaagataactattcgcgtactcgtagtaaaatgaaaaaacttttgatggatgatattccggaggagtttgttactcgtcagctgaatgatagtaggtacatcagcaaagttgtaaagtcccttctttccaacatcgttagagaaaaaggagaggaagaagcaatttcaaagaatgtaattccttgtaccggaggagttacggatcgtttgaagaaagattggggaataaatgaggtttggaataaaattatacttcctcgttttcaacgactcaatgagttgaccggcacaaataaatttacaactaaaaatgttgggattcaagaaattccgacaatgcctttggaattgcaaaaaggttttaataagaaaagaatagatcatcgtcatcatgcaatggatgccataataatagcgtgtgcaaataggaatattattaattatttaaataatgagtcggcaacagctaaggctgaattatcccgatatgatttgcagaaaatgctgtgtgataaagctaagactgataataacggtaactataaatgggtgatcagaaaaccgtgggcatcgtttacacaggatacatatttggctttggaaaatataatagtcagttttaagcaaaatttgcgtgttataaataaagctaccaatcgcttcttgcattataatgaagaaggcaaaaagatctttgtgaaacagggaaaaggggacaattgggctatacgtaaatccatgcataaagatacggtatttggagaagttaatttgcgtaggataaagactgtagctttaaatgaagcgatgaaaaatcctcaaagcatcgttgtgaaagacttcaagagaaaattattggaactttggaatttaggatttgacgcgaagagaataaagaagtactttgaagataatagagaaacttggagtgatataaatctgtctaaaatagaggtttactattttagtaagatactaaagatcgattctttgctactagaaaccgctggatactagttttgatagaaagaaaatagaaaataatattactgatacgggtatccaaaaaatattgttacgtcatttggaactgaaagataataatccggatattgctttttcgccggatggcattgatgaaatgaatcgtaatattattcagctgaataatggaagtatcatcagcctatcattaaaattcgttggtatgaacaggctgataagtttgcagtaggtcaaacaggtaataaatcttctaaatttgtagaggctgcgaaaggaacaaatttattttttgctgtatacgagtcgaatattctagataaaaagacgaatactataataaagaaaagaaattatgctaccattccattgaatgttgcaattgaacggcaaaaacaaggtttacctgttgcaccggaagatgagaatggtaatgaccctatttttgtattgtcacctaatgatttggtttatcttcctactgatgatgaattagctaatggtattattgcccagcctttggataggggaaggatttataagatggtaagttcctcaggtgaacaatgctttttcataaaacatattgttgcgaatgtactagttgacaaatttgaattttctcctttaaataagatggagcgggctttaactggtgaaatgataaaaatgatatgtatacctataaagttgatcgtttaggaaatgtcttagaatcaagtagttcatataaaaaataatatattcttattttatggaagaaaacaaaggacaaattcttttatatcaaacggtagatggtgagtcaagaattgaagtaacactatgcaataatacagtttggctgacattagatcaaatggcagaattatttcaacggaacaaatcaacgatttcacgccatataaagaatgtttttgagagtggggaattacaggaaagttcagttgttgcattttttgcaacaactgcttctgatggtaaaatatatcaagtggcttattataatttggatatgattataagcataggctatcgggttaaatcttaccgtggtgtgcagtttcgaatatgggcaacacaaatactaaaagagtatttaataaagggatttgtaatgaatgatgagctgttgaagcgtgcaggtggtggaaattattttgatgagttattatcacgcatacgtgatattcgttcctcagaaaagatattctatcgtaaaattcttgaaatttatgctttgagcatagattatgacccaagtactgagtctactcgattgttttttgccacggttcaaaataaaatgcatttttcagtacatggacatacggctgctgaggttatttacggtcgtgcagatgcagggaaagattttatgggattaactaattggacaggagcagtgccaaagcggaatgatatagaatatgctaaaaattatttgacagatgatgagttggatacattaaatcgtattgtaagtttgtatcttgactttgcagaattgcaggctaaaagtcatactcctatgtatatgaaagactggattcaaaaattggatgatttttcttagattgtcaggaaaagaattgttacaacatgctggtactatttcggctgaattagcaaagaaaaaagcaaatcttgaatatgatgaatttaagaaacgcattagtaatcagttatctcctgtagaaatagatttcattgaaaatttcgaaaaagagcagaagaaattgcgaggtaagtaatatattaacctttaaaatatgatactatgataaagaaaacactttattttggtaatccggcttatttgtcattacgaaataaccaattagtcataaaacttccggaagttgagaaaagtgattcattgccggatatctttaaagaacaatcggaaataacgaagccgattgaagatataggtgtcgtagtactagatcataagcaaattactatcacttccggtgtattagaatctctattagagaataattgtgccgttatcacttgtgatagtaaaagtatgccagtgggtttaatgctccctttgtatggaaatacaactcagaatgacgtttccgtcaacagttggatgcatcattgccattgaaaaagcaactttggcagcaaacaattaaggcaaaaatagataaccaagcatctgtattgagagtttgtgtaggtgaagaaatgaaatgtatgcgaatttgggcgaatgaagtgaagagtggtgatccagagaatttggaagcacgtgcggctgcttttttttggaaaaatttatttgcagatattattggctttactcgtgacagagaagggatttctcctaataatttattgaattatggttatgctatacttcgtgctatcgttgctcgtgctttagtggcaagtgggttgcttcctactttagggatccatcatcataatcgttataatgcatattgtttagctgacgatgtgatggagccatatcgaccttatgttgatgaattagtatttagtttagtgaaattgtatggtgcaaatttggaattaacaaaagaaataaaatcacgtttgcttgttattcccacattggatgtacgtattaatggtaaacgtagtccgttgatggtggctgtcgctcagactacagcttctctatataaatgtttttgtggagaaattcgtcgtattagttatcctgaacgataatggaccgttttagtgaatatcggattatgtgggtactagtattatttgatttgccaacggaaactaagaaggacaagaaagcttatactgattttagaaaaaatctacaaaggatggctttacaatgtttcagttttcaatttacgtccgtcattgtgctagtagcgagaatgcaactgttcatataaatagagttaaatcttttttgcctgaatatggacaagtgggaataatgtgtatcactgataaacaatttgctgctattgaacttttttatggaaagaaactacaaggtgtaactactccaggacagcaattggaattattttaaaaataagaaatcccgtctgaaacgggatttcttattagataacaactttgtttttaattcctgaatatgtgtgtaactaattggtaattagtttgtaacatatattctgttgtttccaatggtatcaaagatactaatttgaaagcaaatcacaacccctcctagccaaatcactaataatttcttgttgtttccaatggtatcaaagatactaatttgaaagcaaatacacaaactttgtataaaacatcagcttgtacagaatgttgtttccaatggtatcaaagatactaatttgaaaagtcaaatcaacaactctaatcggtacatgtgcgtttgaaataagttgtttccaatggtatcaaagatactaatttgaaagcaaatc

SEQ ID NO: 746 - DNA, 14741 bp, synthetic construct
  variation 14317..14334: note = n is a, c, g, or t
  variation 2447..2448: note = n is a, c, g, or t
  source 1..14741: mol_type = other DNA
  variation 4045..4221: note = n is a, c, g, or t
  variation 2024..2039: note = n is a, c, g, or t
  misc_feature 1..14741: note = Synthetic
  variation 13852..13853: note = n is a, c, g, or t
  variation 12108..12118: note = n is a, c, g, or t
  variation 9358..9400: note = n is a, c, g, or t
  variation 8244..8303: note = n is a, c, g, or t
  variation 2180..2291: note = n is a, c, g, or t
ggcaaggtgttcaaggaagacacggacatcgtgccggtcatcatcgatgacacgccttcctatatgccgtgtgacggcgacaacgcgttccgtgtcgggccgaaaaaacgacgaataaaattacttgttattcaacaattgtcgatgcgttttggtgtttgcgacatatttttcaagataccatttcttgaaagcgtcagcatcggcaggataataactccagtggtccagtctgttccaaagaattgccttaatgccaataggtgtgccgtcctcttcgtaagggagcagattcggtaaatcgtatcgctttgtatagtattcgacacacttttgtggtgtaggattgtttgtcaaaacaaatctaacccacgcctcctcatatccccacataaggctatctattccttcaggcggttctttctcgccgttgtaataacggcaatccaatatcaattcttctcgcgtcataccaaagacaaagttacttctttttttcgttttacgaagcgaatcaaaagttttttgtgcatttcttactaattattttcaagccgaaatccgtctggaataagacaaaaaaagtgcaacgggcaaaatgccccgctgcactttttcttcagtcgggatgactagattcgaactagcgaccccacgccccccagacgcgtactctaacctggctgagctacatcccgattgctaaagcgactgcaaaattacagccttttttttaatctgcaaactttttcggaagttttttcttttttttgcgttttttattgcaaaaaatatcgtaaaaaacgcctttttccctttgtcaagtcaagattttttcgtaactttgtttgttaatcggtgcaggatgcgcctaaagatggcacaagcatcgtaaactattgaattaaagactattaaacaatatggcagaagaagatttcaacgtaaacgaagagaacgaatacagtgcgcataacattcaagtgctcgaaggcctcgaggctgtccgcaagcgtccggcgatgtatatcggcgacatcagcgaacgcggacttcaccaccttgtctatgaggtggtcgacaactccatcgacgaggctttagcgggctttgccaagcacatcgacgtgacaatcctcgaagataattccatcaaggtaatcgacgacggacgcggcattcccgtggatttccacgaaaaagagcaaaaatccgccctcgaggtggtgctgactgtgcttcatgccggcggcaaattcgacaaaggctcttacaaggtttctggcggtctgcacggcgtgggcgtttcttgcgtcaacgcattgtcggactatctccgcgccgaggttcaccgcgacggcaaagtttacgttcaggaatacgcctatggcaagccgacgagcgaagtcagagtggaaggcgaatcgtcacataccggcacatgtatcatcttccaccccgatgcgtcgatttttactgtcaccgaatatcgctacgaaactctcgcaacacgtttgcgcgacctcgcgtttcttaacgccggcatcacactgtcaattaccgacctccgcactaaggacgaagagggcaactgccgcagcgaaaaattctattcagagaccggcttgaaagagttcgtccaatacatcgaccaaaaccgcccgtcgattatcaacgatatcattcatctcaacaccgaaagccaaggcgtgcctgtagaagtggctttaacttacaacggcgactggaaggaccgcatctattcttatgtcaacaatatccacaccatcgaaggcggcacacatgtcactggtttcaaaaccggacttggcaacaccctcaaacgctacgccgaggacaacaaactcactgagaaggcgaaagtggaaatcaaggcagaggactacatccagggccttacggctgtgatatccgtaaaagttatggagcctcaattcgaagggcagacgaagacgaaactcggcaacagcgaagtttccggtatcgtgaaccagatggtgggnnnnnnnnnnnnnnnncaacaggcaaagaccattgtcgaaaaagtggtcactgcagcccaagcccgtgaggcggctttgaaagcgcgtaagaacattctccgcaagtcgccgctttccggaagcggactacccggcaaactttccgactgctcgtcnnnnnnnnnnnnnnnnnnnnnnnnnnnnnnnnnnnnnnnnnnnnnnnnnnnnnnnnnnnnnnnnnnnnnnnnnnnnnnnnnnnnnnnnnnnnnnnnnnnnnnnnnnnnnnnnaaaatcctcaacgtcgaaaaagcacttgaccacaaagtgtttgaaagcaaggaaatcaccaatatgttcaaggctctccgcgtgtcgctcagcgaagacggccgcgacgtcagccttgaccgcctcgcttaccataagattatcatcatgaccgannaccgatgccgacgtcgatggcgcccacatcgccacacttttgatgacattcttcttccgccgcatgccgtctattatcgaaaacggcttcctttacatcgccacgccgccgctttacaaatgttcgcgcggcaaaaatgaggaatactgctggaccgacgctcaagtgcagaagtttatcgacgctcacggagccggcacgaaagtgatgcgctacaaaggtctcggcgagatggacgcgcccgaacttcgctacaccacgatgtcgcccgaacatcgcatgctcaagcaagtccacatcagcgacgcccaagaggccgacagaatattcacaatgctaatgggcgaagatgtggggccgcgacgcgacttcatcgaagccaacgccaactacgccaacatcgacgcttaacaataatttcgaggcacgcccatttgcgtgcctctttaattcacaaatataagacaataatatggctaaatcgtcatcacgcaaatcgcccaaagaacttcaccaactaatcactgattatctctcacatcagggcaacaacactttcaactatcgccaagtggctttcgccatcggtgcgggcactgccaaacagcagcgcgccgttgccatgatgcttgccgagatggcattcgacgggttaatcatcgaaacgactccgggcaaatataaactcccatcaaaatccaacgtcgtcgaaggagtcttctcccgacgctccaacggcaagaatttcgtaattatcaacgagggtgctcctgacggcgaagagaccgtttatgccgtcgacgacagcaaatccatgcacgcactcaacggcgaccgtgtgaaggtaattatagccgccaaccgtcgcggagtgacaactgaagccgaagttgtggaaatcatcgagccaaaagagcagacatttgtcggaacgctcgacgttatgcgccaattcgcctttctcaaaaccgactcgcgctatctcgcaagcgacatattcattccgcgcaaatctcttcgcggaggcactacgggcgacaaagccgtggtgagaatcacttcgtggcctatggactcgaagaatccccatggcgaagtgcttgacattcttggccgttcgggcgacaacgattgcgaaatccacgccatcctcgccgaatacgacctgccctaccgctatccagaaaacgtggaaaaagccgcaaataatatcaaccccggtatcacacccgaagaaatcgcccgacgcgaggacttccgtaaagtgacaactttcactatcgaccccgccgacgccaaggacttcgacgatgccctgtcgttccgccgtcttgaaaacggcaatgtcgaaatcggtgtgcacatcgccgatgtgacccactacgtcacacctggctcgataatcgaccgtgaagcggaagaacgcgccacgtcggtctatctcgtcgaccgcaccgtgccgatgctgcccgaacgcctctgcaacttcatttgctcacttcgtcccaacgaggagaaactcacctactcctgcgttttcgaaatggacaacgacgccaacgtggtcaagagccgcatcctccgcactgtcatctgnnnnnnnnnnnnnnnnnnnnnnnnnnnnnnnnnnnnnnnnnnnnnnnnnnnnnnnnnnnnnnnnnnnnnnnnnnnnnnnnnnnnnnnnnnnnnnnnnnnnnnnnnnnnnnnnnnnnnnnnnnnnnnnnnnnnnnnnnnnnnnnnnnnnnnnnnnnnnnnnnnnnnnnnnnnnnnnnnatgcttctcgcaaaccgcaccgttgccacacgcatcggcgacaataaaaaggcaaagccattcgtctatcgtgttcacgaccaccccgacagcggcaaactctccgaacttgcttcgattgcagccacattcggacacaagttgaaaacagaaggttctatgcgcgaaatcaaccgctcgctcaataaaatgctcgaggacatcaaaggcaccggcgaggaaaactttatttcaacccttgccatacgctcgatggcgaaagccgtctattccaccaacaacgtcggccactatggtctggcattcgaatactacacccacttcacctcgccaatccgccgattccccgacatgatggtgcaccgactcctcacccgctatctcgacggtggccgcgccgtggcgaaagaccgtcttgaaggacagtgcaaacactcgtcagagatggaacaaactgccgccaacgccgaacgagcatcaattaagtacaagcaggtggaatatatgtcggattatgtcggctatcaatacgatgccatcatcaccggcgtaaccgagtggggcctttatgttgaacctatcgaaaataaatgcgaaggacttgtgcctatccgtagcctcgccaacgacgtatatgacttcgacgaaaagagttatagcctcgtcggacaacgtaaccgcaagaaccgctatcgcctcggcgacgtcgtcagagtgaaagtggcgcgtgccaacatcgaaaaacgcctgctcgactacgaacttgtcgacggatactccgacgttaacgccgaacgcccgatggtgcctcccgtcagagaattcaactacaagcgatataaaaaagccggaaagaacagaaaatccaaacgtcgctgaccatgataggaaaaatcgaacttaatcgcataaaaatccgggcctatcacggagtatatgcccaagagcgtgtccgcggcaacgatttcgaagtcacggtccacctctcctacgatatggcgaaagccgccgaaaccgacgacattctcaacgccgtggactatccgagagtgatggaaatagtccgtaacaccatgtcgcgcccggcgcggctattggaaaacgtcgcaggccgcttgaaggacaacattctcgccgaatttcctcaggttgtcagcggcttcgtaaaagtcacaaagttgaatcctcccgtaaccattcccatgcgcgccttcgccgtcaaaatcgaatggtaatatatgggaagtttcgggcaattttagtaattttgcggtcatgaaggaaaatatcacatctatagccggcgaagaacgtgccgtactcgtgggccttatcacgccccaacaggacgaggcgaaagcccgcgaatatctcgacgaacttgctttcctcgccgacactgccggtgcggcatccgtaaagacattcgtccaaaaactcgattaccccaacccacgcacgttcgttggcaagggcaaacttgacgaaatcgccaaatatgtggaggaaaatgaaatcgacctcgcaatcttcgacgacgacctttccacaaaacaggtgatgaatatctccaatgccctccacgtcaaggtgctcgaccgcacgaatcttatcctcgacatcttcgcacgcagagcacagactgccacggctcgaacacaagtggagttggcgcaatatcaatatctgttgcctcgactaacaagaatgtggacccaccttgagcgtcaacgaggcggtatcggtctgcgcggccctggtgaaacgcaaatcgaaaccgaccgccgtatcattctcagccgcatagccctgctcaaagagcgcctgaaggaaatcgacaatcaaaagaccatccagcggaaaaaccgcggcaaaatcacgcgtgtggccctcgtgggttacacaaacgtgggaaaatcgacactgatgaatgtgctcgctaaaagcgacgttttcgccgaaaacaaacttttcgccaccctcgacaccacaacgcgcaaggtggtcatcgataatctgccgattctgcttaccgatactgtaggcttcatccgcaaacttcccacccacctcgtcgaatcgttcaaatcgactcttgacgaagtgagaggtgctgacgtaatcgttcacgtggtggatatcagccacccgaacttcgaggagcaaatcgacgtggtgaaccgcacgctcagcgacctcggtctgccggaatcccacatctacgtcttcaacaaaatcgacgcatttacctatacgccgaaagatgaagacgacttgacgccgagaactcgcgaaaacattccgcttgacgaactcaaagcgtcatggatgggtaaaatgcacgacaaatgtgtgtttatctctgccaaaaagcagacgaacatcgctgaacttcgccgcctcatctacgaaaaggcaaaggaagtccacacaaagcgttttccttacaatgattttctattccaacactacgacgacctcgatggaaatgaggaatgagtaattagaaattagtaatgcccttcgggcgttcaaataattagcacaaatgagaaaaagcataattttgattcttgcggcagtggccttagcctcctgtgccgacaaatggcaacttaacggcaaaatcgacggctcggccgatgaaacggtcatagttcaaaactcaaacaacggcatgtggtggattctcgactccgccaaaactgacagtgaaggccgtttcaccatctctcatgcccctgccggacatcccgacatctatcgcctcgtctatggcacgaatgtggtgtatttccctatcgacagtgtggaaacaattacgctcaacgcgtcgaaggctaatttcgccaacgattatgctttttcgggctcgcccgatgcggaggcgatgatggaagttgaccgcaaaatctacgccgcggtggcaaagtcaagcgccgcagaggccgccgttgactcactgctgaaacgcgacctctctcaaacaatcgtcgccaatcccgcgagcctaacggcatactacattataacccgccaaatctcaggcaaccagattttccgttccgacaaccgccgcgacctcagtatcatcggggcggtagccaacgctttctccgaacaacgttccaacgacccgcgcacgaaatacctcaccgaactttatttgtcgaacaaaaaggcgatgtcgacaggcaaagtcgtatatgccgacgaatcgcctttgattgaaatcaaccttcgcgacgaaaacggcaaagaacaaagcctcaaagatttggcatcaaaaggaaatgtcgttgtgctgaacttcacaacctacgaagccgaagagtcaccgattttcaacatcgaacttaacaaagcctacgaacggtttcatcctcagggaatggaaatctaccaagtggcagtcgatgtcgacgactacacttggcgccagtcggcagtgaatctgccatggattaccgttcgcaatccgcaagccggaggagcgcagaacctactcaactacaacgtgcaggctatcccgacgacattcatcatcaaccgcaaaggcgaattggtgaaacgcgttgatgacataaaaaatctccaagcggaaatcgccaaagtgatgtaatttgaccgtcaactgactttaaatctaccgacatgaaactcagactatttactttgatggcagcagttgtcatctcgagcacatatttagtggcccatgaaatcataaccggcactttagagagcagtgaccgctactatcccggcacaaaacgtgaagtgaaaatatatgttcctgacgcatacgatgccgcaaagccggcatgcctttatttagggctcgacggaattttgtgcaatgcgccccatgtcatggacagcctcatcgcagcagggaaaatgcccgtcaccattggtgtgtttctgcaaccgggcgtaattaccgacgcgtcgggcaaggtggtgcgatacaaccgcagtaacgagttcgacatgccaagccccgtcttcgcaagttttatnnnnnnnnnnnnnnnnnnnnnnnnnnnnnnnnnnnnnnnnnnnnnnnnnnnnnnnnnnnnaccgacggaatgatattcggacttagcagcggtggcatagcggccttcacagcggcatggcaccgccccgatttgttcagccgcgtgttcagcggagtgggcacattcgtggccatgcgaggcggcaacgacattcaagcgattgtccgcaaaagcgaaccgcgaccgttgcgggtgttcctgcaagacgggacaaacgacatttggaacgcccttttcggccactggtacgaaggcaacagaatgctcgccaccgcactcgactttgcggactatgacgcacgctacgactggagcgactgctatcacggggttaaacgcgcaagcgaggtttttcccgaagtaatggaatggatgtggcaaggatggcccgaagcgccgaaggccggcatcacccacaacaatctgctcgacactttattagtcagcggcagcgagtggacacccgaacgcttcaaatcgccgaaaaaggcgaaagtcgaagccaaatatcccgacggctcgtttgtagtccgaccacatgacggcactaaccgactttggcaatacatcatcaaagacggcaaagagactttcggccaaccgttctattggttgcacagttacgacaattcgatgctacaagtcacggcaatggcattcgacggcgcgggagatttatgggttgtcaccgatgccggaatccagatttgcgaccaaaacgggcgtgtcaggggcatcatcatgcttccgaaaggcgtagttgccgcagaaatattacgcatcggcatagacaacggcgaagtgagtcttttcacagccgacaaacgctatcgtagggcatttaaaaccgtagcccccaccccgtcggtcactcccaaaagccaaggacaaggctaaaacaattcacatctaggctcacacagattccacagataattatctcacacaaagtcactaagccacaaagaaaatctctaaggagtatggggagtataggagttctctaaactttaaactctccctctctaaactttatttggcacggctttggcacgatttggcacggcaaatcnnnnnnnnnnnnnnnnnnnnnnnnnnnnnnnnnnnnnnnnnnnatcgtgccaaaaatccaagtaagcctttttttgtggcacggacatgttttatgcaatctgcatgaataaatatgcattcggagcgagaaggaatcgctaagtttggggagttggggagtaaataacaaacaacaaattttattctttaatcaattttgcaatacaaaaaaatcccaccgttaaggacgatgggaacctaaagtaaatcacttcggaataatccttattgtgagtgcttacaatttagtgcttcaaaattattaaaattttggcacttgaaaaacttttcttcgaaaaaaatcgttttttctatttattttttattcctttgcataataatccttaaaataaaccgtaacgaaatatgaaaaaaatcttaggtcttgatatcggcaccaatagcattggaagcgcacttgtgtcgattgacgaaaacccttcaaactcaaaattagtatattcaggttgtcgaatcataccaatgcccgacgaccaaatccagaatttcaacaaaggcagtgtcgagtctgcggcttccgcccgaactggattcagaagtatgcgtcgctgcaacgaacgccacattttgcgtcgccaacgccttcataaagtattgaatgaactgggatttcttcccgagcactatgtcgcaaaaatcgatttttcaaatggaaaaagtgatttcttaaaggatgaagagccgaaaatcgcatggcaacctacagccgacggaaaatatcgtttcctctttatggattcttatgccgaaatggtggctttgattaaggcaaaacatcccgatttcggaaaaatccctctcgactggactgttttttacctccgaaaaaaagccctcacacaaaaaatctccaaagaagaactcgcatggattcttctccacttcaacacgaagcggggctactatcaacgcggtgccgatgaagaagatgacaataagacctacgaatgtctgacggtcaaggacgtggaaaaggccgatgttgaccgtcgtggcgaccaatggtataatgtcactttcgagaacagcgacttggtttatcccacaaaatccgccgaaatacgcaatctaataggacaagaaatcgaactgattgtcacacgagagccacaaaaagacggaactataaaagtttcatttccaaagccaagcaaaaaagactgggtattgaaaaagaagcgcacggaatcgctgattgaaaacggcaaaacgactgtgggcgaatttattctcaatgccttaattacaaatccccacacgaaaattcgtggcaaactcatcgccacaatcgaacggaaatattaccgtagcgaactcgaaaaaatcctgcaaagccaaaaagagtatcatcccgaactttccgaccgctcgctctaccaacgttgcgtcaaactcctctatgcgaaaaacgaatcgcaccgcagcaatataatctcccgcgacttcacatatttgtttgtcaacgacattattttctaccatcgccccttaaagagcaaaaaatcgctcatcgataattgcccctttgaagaaaaccgcgtaggagaaaaggctttccctgtcaaatgcgtggcgaaatccaatcctttctaccaagaattccgcctgtggcaattcatttcaaacttgaagatttatcgccgcgtcgacgactgtgacgtgactggcgaatatctcgcatcgcctgccgactatgccgaacttttcgactttctcaacgacaaaaaggaaatctcacaaaatcagattttcaaatgcggcatcttcgggcgcggtgtaagttcgaaaaacttctattggaactatgccgacgacgataaaaagaaattcccctgcaacgaaactcgcgccctcatcgtcaacgccctaaacaaagccggcgttgccgacattgaaaaacttgatttgccggccgacaaatcgggcgaaaccacatggctctaccgcctttggcatcttatctactccgtaaccgacaaagagcaatatgaaaaaggcctcgcctctttcgccgacaaattcctttccgacagcgacaaaaaagatgctttcgtggaatcgtttgcgaaaatagaacctttcaaaaacgactacggcgcttattccgaaaaagccataaaacgactacttccgctgatgcgttgtggcaagtattgggatttcgacaaaatcgactctgcgacgaagtcacgcatcgccaatatcatcaacggagttgacgacgagtcggtttccgaaaaagtcagggaagaatgcaagaaaaacggccttggcgaagaagcaaacttccaactccttcgcccatatcttgccacttatatcgtctataatcgtcacgctgaagcgaaatcgaccgacaagtgggaaactcccgacgaactcgacaactttatccgctcgttccgaaacggctcgatgcgcaatccggtcgtcgaaaaagtcattctcgagaccctgcgcgtcgttcgtgacatttggcggaaatatggcaaaatcgacgaaatccacgtggaactcgggcgtgaaatgaaattaccgaaagacaagcgtgaacgcattttcaaacaaaacctcgacaatgaacaaaccaacctgcggattaaggctttgttgactgaattcttaaatcccgaacttgaaattgaaggtgtccgcccattttctcccaaccaccaagagcggctaaatnnnnnnnnnnncctgccgaaatttctggcattatccaaaagttcgctgaaagcgacgtgaaaaaacgcccgtcggcaagcgacatcaaacgctacgccttgtggctcgaccaaaaatatgtgtctccctatacgggcaaaacaattccgctaagccgactattcaccaccgactatcagattgaccatattattccacaagcatttttcttcgacgacactcttaacaacaaagtgatttgcgaagccaaagtgaatagcgataaaagcagccgtttcggccgacaattcatccaagaattcgagggtcgcacaatcgaactcggtggcggcaaaactgccaaaattctatcactggaagaatacgacaaattggtcgccgagacgttcaagaacaaccgacgcaaacgcgacaaccttatgtgcgaagaagtgccggatgaatttgtttcaaagcatcttaacgacactcgctacatcactcgcattgtgatgcaacttttgtcgaacgtcgtccgcgtacgtgacgagcgcggaaatctcgaacctgaagcgaactctaaaaatgtagtgccctgcaatggtgaaatcacatcccgaatgaaacttgattggggaattaacgacgtttggaacagtatcctcgctcctcgctacgaaaatctcaaccgcaaatatgccgaaaggatggggctcgagtcatcgaatcacttcggagagatggtcaatggtcatttccaaattaatatgcccctcgagtatcaaaagggattcaaacccaagcgtatcgaccatcgccaccacacgatggacgcaatcgtgattgcctgtgcttcgcgcaacatcgtcaactacctcaacaactcaaacgccaatcagcgcaatgagcgacttgacctaagggcagccgtttgcttcaagaagcccgacacaaattctaatgggtacaaatgggtactcaaaaagccgtggcccacattcaccgaagacactaagcaggctcttttgcaaacaattgtcagtttccgccaaaacattcgagtgcttacagcctcgactaatttcttcgactatatcgccgaaaacggcaaaaaagcgcgaaaaaaacaatcgtcggaaaatcattttgcaattcgtcgccaactccacaaggacacagtagccggtcgagtgaatctccgctcgattaaagaagtaaaatttgccgccgccctcgacaatccttcgagaatcgtcgacaaagaattgcgttcgtttgtgaaaatactcctcgggcaaggtcttagcaaggccgccgttgagcgggatgttgccgataggtttgccgacttcaaccccaagaaagtcgaagtctatgtctattccgacgaaaccgacacgcctatgattgccaaccgtttgacgctcgacgattctttcaacgagaaaaaaatcaaaaccgtcaccgataccggcattcaaaagattcttctcaaccacctgcgccgacatgaaggcaagagcaaagaagccttctccactgaaggcattgccgaaatgaacaacaacatcgtttcgctcaacgacggcaaattccatctgcccatctacaaagttagatgctcggaaattatgggcaacaaatttgccattggtggcggcaaaaaatcaacgaaattcgttgaagccgccaaaggcactaatcttttctttgctgtatatgtaaacgaagaaggagaacgttgcgaatttgttgatatacccttnngagttcgccaccattccgttgcggacagtcgttgaccgcctgcgtcgtaacctttcgcccgctccagatgtgagtgaaaaaggcaaccgactgcttttcacactctcgcccaacgaccttgtttatgttccagataatggcgaagatgtgtcaacgctatctgcagacactattgacaggaacaaaatatttaaggtggtaaaatttactggagaccgcatattcgttatcccatcatcattgtcaagagcaattgtttctgatagtcagattggactatatgaatttaattctctcaatattgtcgaactttctcccgagggcatatcaataaagaaaatttgtattcctttgcagactgacaggctcggaaatatttcattaaaataatcaatttgaatgggattgccaacaatgtggtaatcccatttttattatttttgatatcatgataaaacaaaccnnnnnnnnnnnnnnnnnngttgggattgaccctacaaagatactaaattgtaagcaaatcacaacttgatatgttttcccataatataaaagtgtgttgggattgaccctacaaagatactaaattgtaagcaaatcacaacgataacaagtaattagttacattttttgtgttgggattgaccctacaaagatactaaattgtaagcaaatcacaaccgttatatcttgttatcattgccacttgttgttgggattgaccctacaaagatactaaattgtaagcaaatcacaacattgattgtcgccgtttctacggctttttgttgggattgaccctacaaagatactaaattgtaagcaaatcacaacgggagcgaaatttttagatagtgtaggcttgttgggattgaccctacaaagata

SEQ ID NO: 747 - DNA, 13313 bp, synthetic construct
  source 1..13313: mol_type = other DNA
  misc_feature 1..13313: note = Synthetic
gctacagatttgcaatgaatataataataaaaaggattattaactagtatttccgcttatcattcctttcggatatttcgtagtttagtgggaatagtgtacatttgcgggagtaaaaagtgaatggaatgatgagacgatatatcaccactttgatgttggcttgctgcatcggaggatatgggcaagaaaagaagcaagccacctttgtaccaccttttgactttcctcttacattgagcggaaacttcggagaaatccgttctaatcactttcacggcggattggattttaaaacgggaggagtaatcggtaaacctgttcgtgcattggcagaaggctatatttcacgtatccgtgtgacgaatggttcgggctatgtacttgatgtctgctatcataacggttattctactatcaatcgtcatttgagcggttttatttcccctattgccgaaagggtggaaaaactgcaatatgaaaatgaaaactgggaagtagagattatccccgaaccggatgagtatccagtaaaagcgggacaacaaatagcatggagtgggaataccggctattcattcggaccgcatcttcatttggatgtttttgaaacggagacgggagattatgtagatcccatgccttttttcaaaacgaaaataaaagatacgcgtgctccgaaagcggacggcataatgttttttcctcaacttggtaaaggagtagtggatggtaagcaagaaaataaagtgattcttccgaacaccggacgtccggtggaagcatggggtgtgataggtacaggcatcaaggcgtatgactatatggatggagtgagcaatcattacggagtgtattctgtagtgcttacagtagatgagaaagaagtattccgcagtactgtcgatcgtttctcacaagaagaaaaccggatgattaactcttggacttgcgggcaatatatgaaatccttcatcgagccgggaaatacattacgtttattaaaggcatcgaacactaatcgtggtttggtgactattgatgaagaacgcgattatcgcttcttgtatactctgaaggacgtttttggcaatacttctaaatatagtttcacggttagggggcgaaaacaaccgcttgagccattgcaacatcgcgaaaagtatttctttgcgtgggataaggtaaactatctgcaagagccgggtttgaatctggttgttcccaaaggaatgttatatgacgatgccccccttaattatcaagtaaaagctgatagcggtgctgttgcgtttacatatcagttaaatgacaaaccgattccgcttcatgcaagctgtgaattgcgtattggcttacgtagaaagccaataactgatactacaaaatattatgtagtccgtgtcaccccgagaggaggaaaatatagtgtcggtggaaagtatgaagacggatacatgaaggcatctatttgtgaattgggaacttatacggttgccattgacacaattccgcctgaaattattcctgttaataagaagcaatggggaagaaccggaaagattgtctatcgtttgaaggacaaaggaacgggtattgcatcctaccgtggaacgattgacggcgaatatgcacttttcggacgaccgaatattgtgaaatcgtattgggaatgtgtacttgatccgaagcgtgtgaagaaaggtggaaaacatatcgttgaatttacggtaactgattattgcggaaatgaaaccgtatcccgtgaaagttttatctggtaaattattaaaagaaaatcatatatgaagaaaagacttattttttgtgctgctctattcctggcggcagtggcggatactttcgcctgtactaatttaattgtcggcaagaatgcatcgactgatggttcgactatcgtttcctattctgccgactcgtatggcctgtttggagaactttatcactatcctgctgctacatatcctaaaggaaccatgttgaaagtgtacgaatgggataccggtaaatatttgggagaaatcgaacaggcacgccagacttacaatgtagtgggtaatatgaatgaatatcaagttactattggtgagacaacttttggcggacgccctgaattggctgattctacaggaattatcgactatggaagtctgatttatattggcctgcaacgttcgcgtacagctcgcgaagcgattaaggtgatgactgatttggtacagcaatacggttattacagtgaaggggaatcttttaccattgccgacccgaatgaaatttggattatggaaatgattggtaaaggtcccggtatccgtggagcagtatgggtagctgtacgtgtgccggatgactgtatctcggctcacgccaaccaatcacgcattcatcagttcgatatgaacgacaaggagaattgtatatactcgccggatgtcgtatcttttgcccgtgagaaaggctatttcagtggtgtgaataaggatttcagctttgccaatgcgtatgcaccgttggatttcggagcccgtcgtttctgtgaagctcgtgtgtggagctatttcaataaatttacagataacggtaaagattatcttccttatatagaaggaaagactaatactccaatgcctctttttgtgaagccgaagcataagctttccgtgcaagatgtaaaagacatgatgcgtgaccattatgaaggtacgcctctcgatatttccaatgatttcggggcaggtctttacaagactccctatcgtctttctcctctgaattttaaagtaggcgaccgggaatatttcaacgaacgtccgatttccactcaacaaagcggctttgtatttgtagcgcagatgcgtgccaataaacccgatccgataggtggtgtgctttggtttggagtagatgatgcgaatatggcggtgttcacacctgtttattgctgtgcaactaaagctccggtatgttacacacgtgtggacggagctgattatatcactttctcatggaattcggctttctggattttcaattgggtgtctaatatggtttatccccgttacagtttgatgattgatgatgtacgtgcaactcaaaaagaactggaaacgactttcaataatgctcaggagggcatagaagaaatggctgccagacttttggctaaagataagtctgctgcagttgaatttttgacgaattataccaatatgacggctcagagtactttcgatacttggaaacaattaggcacattcctgattgtgaagtataacgacggagtagtgaaacgagtaaaggacggtaagtttgaacgtaattctatcggacagcctgccggtgttattcgtccggggtatccgaaagagtttctggaagaatatgtgaagcagacaggaaaaagatatgaagtgccggaataatagttgttttagttgttattaaatcatatataatgtccacatcatttctgctttgcgggtgatgtggatttttattatgttgataatcagtaatgtatttgccatgtatttgtccattccaaatatttggattcttttctgctgctgcctatctttgccttattctatttcaaacaccaactactatgcgaatcatctttattatatattacttgcttatcacattactctttgtttcttgccaagagtcatcatctgttgaagtagagagggaaaagatagcctctctgttacagaagggtgacagttgccgtcaggttggtaatgaggaaaattcaatagctttctattatcgttcgttggaattagctaagcaaacgggagaacaattgttggaagcggctgctagtgatcgtctcggaattgtttatttatatcgtgaactttattatgatgcacttgatttatttcggcaaagtgcgtcgatttatgcattgacgggagaaaatatccggttggcattggcattgcgtaatatagggcgtacgaacttggtgttgcatcattccgatagcatagcctgttattatgagcaggctattgaggtggcttcccgcttggaagataagaagttactgcatactatatccaaagaactggaagctatctattcaaaggcgggattttacgattattcacctcgtctgatgttgaagtgtttggatagcgtatctgatgacgatttttccaatttgcttgcaggggagtactatatcggtatgaataatgccgaagaagcgagaatttggttgaagaaagctgttcagacgagcgatatgtatatatgttcgagtgcatatcagcttttatatgaaattgagaagagaaccaatcatccggacattgccgttaagtatgccgaatattatatccagtgtaaagattcgcttgataaacagatttcggtttcttcgacgattcgtgctttaggacagaattatgaaaaagaacgtcttaaatgggagaatcagcaattgcagaatgagcaacttcgaaagcgtatgtattatttgatcattctgtcaatttcatgttgcttgctggtagtagggttggttttgtattatcgggagaagtggaagaaagagaaggtattggctggtgttatgaaacgtttacgtgacaatgagcgtcaaatagagaattacacagctgtaatagaaaagaataggcgtattatcagtgatttgaaaggaactcagcagaagaatgcgttactgttacgtgaagaaaagaacaaatctataaattatgagaatctgcaacatgagaatttgttgttgatgaaacaactgcatatattgcattccgatagggaaggattgttacagcaacttcaaatgggaaccaactcatctatttcttcacaacggattaccgctttcacacaactttggctattgaaaagtgaaccttattatggaatcatagagacacaagaagaatggaaccgattgtttgaactcattgacctgttttatgggaatatttccgccagactgaatggttgtgagttattgagagagcatgacagaagaatctgttatttgcttcatgccgggcttgacaattcagctttagggatattattcaatatagataatacttctgtgactaaatccaagcaacgtataaagaaaaaactgggactgggccctaacgatgtgctggaaacatttcttaatgagaataaaaaatagtatatagattgtttcactttaaatataaaacagccatgaaaagactattatttacctttttagctttatgccttgccgttgcaggttcggctcagtcggggcagatgacttccaaactgccgactattgatatcactaaggaatatccgaaaaagaaattagtattgcaagatattgcaactgctgaatacattccgctggaaacatcggataaagtgttgctggacggagtggctactctgcattgttcatttaccgaacactatataacaacgtataatgccaatgaagggcaaatcttcgtattcgacagaaaagggaaaatatgccatacatttaatcataaaggagggagtggggaagaatacaactatcctttgcagttacgcttggacgaaaaggctaaagagttgtttctgcttgacatatctaataaaatacaggtctattcgatagagggaaaatacaagcgttctttgtctatccccaaagatgtacggattgaaattatgtacaattgtgatgagcaacatctgttgggttacgatagttatatgttggatagaaaagataaacagcccaatagtcgtccctatttactgatttcgaaaaagaacggagctgtttcccgccttccggtaactatccacaaacgtgtgggaaaacgcatttatattactcaagggggacagacggctaccgtttcaatgtctctctatccgttagcaaatagcggttcggagtttatctttgcagatttggcaggtgatactgtttattcttattataatcataagttgaccccgttgtttgtacgtactccgaaagcagatgcttccgagccaagactcgttatgcaatgttatgccaagattgggaactatctgttaatgtcgactgcattgaaaaagtatgaaccggggaaaacttcgtttgatactaaagaatttgtttatgatacggttgagaagaaagtatatgatttggaatttgagaatcaagactattcgcccgcccgttcaatgcgaatgggaggcgtattatcggcattacctgaaaaatgtgttttcgattcgtgggatactgaccgtttattggatatgttggagaaaggaaagttgacgggaaacttgaagaaggtggcggagaagatgacagtagatgataatcctttactcatattgtacaaattcaaatgaaacgtagatgaagattatatggttctttttctccttgtgtctgctggtaggatgtaaacgttcggatgtggcggtatcggtggaacaaacgttgccggtgatagatttgaatgttgcttatcctgaaaagaaactggatttggcagaggtggcgagtcctgaatatattcctttgtatacagtcggggcggattcattggatagatatagtctgacttcagcgagtgtttcgccccattgggtagtagcttataattggcagcagacaattatggtttttgaacgggcaaccggaaaacttcgttatcgttttaatcatcagggacagcaaaaagaacaatattattatatattctcggtgtttgtagatgaagaacgtgaagaaatatatgtagtcggttcagttttcaaaatccaggtttatagcctgtccggcaactataagcgtacgttgaatcttccctatgatatgtctttcgaacaggtgtttgattatgataaagattcattgatatttaacgacggaagggaagatgtagataatcctgtccaaaaaggaacttattattatttaatgtcgaaaactgacggaggaatgcgtcctttgccttttcatgtaaagtatcgtattacgaaccgctttcgcatccgactaaggaatggagacaggcaaggggtaatttcctgtatgttttccgtaaagccattgttgaagaatggtgatgaagtgatattatccgaattttccaatgacaccgttttctcttatgggaaagaaggagcgaaacctttgttggtacgtactccggctccccgttctacttttcctttgaagttaatgtcagtttcagcttgtagcaggcgttttctgtttttggatgtgatagagaaagtgtatagacggaatatcaagaagttggacggagactcgtttgtctacgattaccgcgaaaaggagatctttactccggtattggtcaatagtgattttatccctgaactgccggttgagatagataatatgaacggaagttttccgaaatatgccggtgcgtcttctattcattcccgggagtttatgcagtactatcggaaaggaaatttacaggggcgggcatgtgaagcggcctcttgcttgacaagagatgatatttatgttttagtgctgtatcattttaactgaatagagccggtaaatgtattcttacggttattattttgaggaaaaatgtaggatttataaacttattattttacatttgtgtgctcaagaaatagatagtaataattcattaaccaataaacaataatcgaaatggaaaatcaggaacttattaaacaggtcactgaaaaagccgaaaaatggttgaccccggcatacgatgctgaaactcaggctgaagtgaagcgaatgttggaaaacgatgataaaaccgaattaatagaagcattctacaaagacctcgaatttggtaccggtggtttacgcggtatcatgggcgtaggtagcaaccgtatgaacatctatacggtaggtgccgctacacaaggtctttctaattatttgaagaagaactttaaagatctgccgcagatttctgttgtggttggtcacgactgccgtaacaacagccgtttgtttgcggagacctctgccaatattttctctgccaacggtatcaaagtatatctgttcgacgatatgcgtcctactcccgaaatgtcttttgctatccgtcacctcggttgccagagcggtatcatcctgactgcttctcacaacccgaaggaatataatggttacaaagcatactgggatgacggtgcgcaagtactggctccgcacgataaaggtatcatcgacgaagtaaacgctattgcctctgctgctgatatcaaattccaaggcaatccggatttgattcagattatcggtgaagatatagacaaagtttatctggacatggtgaagacagtttctattgatccggaagcaatcgctcgccacaaagacatgaagattgtttatactccgattcatggtacaggtatgatgttgattccgcgtgctttgaagatgtggggatttgaaaatgtgtttactgttcccgaacagatgattaaggacggtaacttcccgactgtcatctctccgaacccggaaaatgccgaagctctttctatggctgtgaatctggctaaagaaattgatgcagacctcgttatggcttccgacccggatgcagaccgtgtaggtatcgcttgtaaggatgataaaggtgaatgggtgctgattaacggtaatcagacttgtatgatgtatctttactatattctcactcaatacaaacaactaggtaagattaaaggtaatgagttctgtgtgaagacaatcgtaactacggaacttatcaagaagattgctgataagaataacattgaaatgctcgactgctacaccggattcaaatggattgcacgtgaaatccgtctgagtgaaggtaagaagaaatacattggaggcggtgaagagagctatggtttccttgccgaagacttcgttcgtgataaagacgcggtatcagcctgctgcttgattgcagaagttgctgcatgggcaaaagataacggtaagtcattgtatcaattgttgctggatatctacgtagaatacggattctctaaagaatttactgtgaacgtagtgaaaccgggcaagagtggtgctgaagaaatcaaagctatgatggaaaacttccgtgctaatcctccgaaagaattgggtggttcgaaagtgattctgagtaaagactataagactttgaaacaaacagacgataaaggtaatgtaactgctattgatatgccggaaccgtctaatgtcctgcaatatttcacagaagacggcagcaaagtttctgttcgtccttcaggtacagaaccgaagatcaaattctatatggaagtacaaggtgaaatgggttgccgtaactgttatgcttctgccgagtctgctgcaatggaaaagattgaagcagtgaagaagtcattgggtatctgatcctatttcttctgatagttcagaataaataataaatagcgcctccatagtcttttcgaagattgtggaggcgcttctttatattgtcctgcatctgtttcccactattcaagccggtttagtacagttctttcatttcctttgcattctttaagtcccctttctaatcattcttccgggaatcttgttgtattggcatcatctcaatttaagcacgcaggctacggatatacacacttttgttgatgctttagagtgatacgctaagtttcattttcgtaagttgttcgtttgtagtttgtgtgtatttcgtggtctgctttttggtatccctatagtacaatttttgggtcataaagatataaaaaagcccccgtaaaaggacgagggcaacctaatgttttcacaacggaataatccttattgtgatttgcttcaaattagtttagcaaagataatgaaataatttggtatatcactttttttgtaggaaaaaagtgatatatttgatggaaattgtaaaaacacacaaatatgaaaaaaatattaggattggatttgggaaccaatagtatcggatgggctgtcgtctgtcatagcgatacggacggacaaactgaacgtaaatggattgaaatggctggtagtagaataattccgatggatgctgctattctcggtgattttgacaaagggaattccaaatctcaaacttcagagagaacaggctttcgtggaatacgtcgattgcgagaacgtgttctgttacgtagggaaagattgcataaggtattaaaacttataggatttttgccacaacattatatcgatagtcttgattttagtaatcattcgggcaagtttcaattaggtactgaggttaaacttccttggaggaaaaatgaaataggaaaatatgaatttctttttcagaattcttttaatgaaatgctggcagattttgctaaaaaacaacctgagttagttgcaatggggcgaaaggttccttatgattggacaatttattatttgcgaaaaaaggctttgagtgagaaaattactaaagaagaactggcatggattcttttaaactttaaccaaaagcgaggatattatcaattgcgtggtgaagaggaagaagaaaaaaagaatagattggaggatttttatgcgttgaaagttgtagaagtagaacaaacagacgataagaaagggaaggatatttggtataatgttcatttagagaatgggtggatatatcgtcgaagtagtaacgttccattggattggaaagataaaattaaagaatttatcgtaacgacggaactaaatgaagatggtaccccaaaagtggacaaagatggttgtgtgaaacgttcttttcggatgcctaaagaagatgactggaagttgcttaaaaagaaaaccgaagcagatattgaaagaagccataagacaataggatgttatatttacgatactttgcttcaaagcccccagcaaaaaataaaaggaaaattagtccgaacaattgaacgtaagttttataaagacgagttgaagctaattttggataaacagcaagcttttcacccggagttgcaagatagagaattatataaagcctgtcttgatgtactttacccaatgaatgtggctcacaaaaacaatgtggctaatcggggatttgtttatttgttcatggaagatatccttttttaccagcgaccgctgaaaagtaaaaagtcactgattgataactgcccttatgaagaaaatcaatatatagatgtgactacaggtgagattaagaaggcgccaattaagtgcattgcaaaatcgcatcctctctatcaggaatttcggttgtggcaatttattgctaatatccgtatttatcaaaaagagaaaaaggtggatggcaaattattgacggatattgatgtcactacagaatatttaagttcgaaagatgattatgtagcgttgtatgaatggctttgcgttcgaaaggaaatagagcaaaagacttttcttaagtatcccgcatttggcttgaaaaaggagattgaaaattataggtggaattatgtagaagggaaatcatacccttgtaatgaaacccggagtttgattttacattatttggaaaaagcaggtatttcttcaacttttttatcaacaaagatcgaagaatcgctgtggcatatactatattctgtagaggataggattgaattagaaacggcattacgaacatttgcttctaaatatcagctatcatgtaactttgtggaagtattcaagaagtttccaccttttaagaaagagtatggtgcgtactctgcaaaggcaataaagaggcttttgccattgatgcgaatgggaaaatattggaaagtggatgctattgatggaaatacggcagaacgtatagagaaaatactttctggagaatgtgatgagaaaatacttaagaggagttctataaattaaaatattgtagtacagttgtttatatggttccaagagcgtaaatttgcagaaaataagaattttataatgaacaagttatcccgataccgtaagcttcgttataatcaactatttgagtcagagaatcgtgaattgcgtttgaatgaaatgggcaatcctcttgaagtgttgtctcagtatgttgattttgagatctttcgtcctactcttgaatcagccctttttaccggagagcgcaaaagtaatgccggtcgtccgccgatagactgtgtgctgatgttcaaggtcttgtttcttcagcgttattatggtttgagtgaccatcagatagagtatcagatagttgaccgtacgagtttccgcaagtttcttggtattgaatgtgttgacgatgttcctgacgagaagacggtgtggaagtatcgcgaactcctgacaaatacaggcgtttatgacaagcttttttcggaatttcatagtttcatggaaagtaagggtctgcaatttaatgagggtcgcatcattgatgccagttttgttattgcccctcgccaacgtaacacccgtgatgaaaatgagcagataaaacagggagcgggtgataagttgtggaatgacaatccccacaagaagtgccacaaggatgtagatgcccgctggacaaagaagcgtgatgagactttttacggctacaagcagcatactaaagttgagaaacgcaataagatcatactttcttatgataccacgtcggcagaagtgcatgattccaaaggctttgaaggactgctggatgaaaaagacgaaggcaaggacttgtatttggacgccggttatgtcggacaagaggagattgtaaaacagcataagatgaatccgataatttgcgaaaagggctaccgtaaccgtccgcttaccaaggagcagaaatcagacaataggaaaaaatccaagacacgttgccttgtcgagcatgtattcgggtttgaggaacaaaccatgcgtggacttgtggtgcgtacagtagggcttattcgtgctaaagccaatgtagcactcaccagtcttgtgtataacatcagtcgttacacgcaaataatcaggctgaaacctgagttgttggggtgaattatgcctgcacatccaatttttacaacaaacacaagttaattattgtaaaaattggggggggtagaaaatattcgctaaatttgaaagactaaagctcacaaattgggcagttaaagagttctgctgtctgatacaagaggataaattgaattgatagaactcacctatatatagtagctacatcattcagataattactcgtctccaccagactattctt

SEQ ID NO: 748 - DNA, 12719 bp, synthetic construct
  source 1..12719: mol_type = other DNA
  misc_feature 1..12719: note = Synthetic
aaaatcaaaacttttttcaaaatactaatgcagttaacccactgaaaaatagtgggtacgctgtattggtggtttacaccgcattgaacatctcatctctggagaggaatgcagcggcatcgacgtccgcgtacgtgaaaaagtcgccaaagccgggctctgcgaatccatagaacaatatcaaggtctccaacaatggctcgcaaactatgtcgtttacaaccgacattcagaagcgtctgaaatcaccaaatgggaatctcctgacgaattagacaattacatcaggtccttcaagcaatattctctacgcaatccaatcgttgagcaggtttctcttgaaacgctgcgcgtggtgcgtgacctatgggctgaacttcaaaaagaaggtcaaacgattgacgaaatccatttggaaatgggacgcgacctcaaaaacacagccgaggaacggtccagaatttttagaagaaacagcgagaacgaagataccaattttcgtatcaagcttctgttggaagagttttacgcaaacgaaaaagacataaaagacgtgcgcccctattctccctcccaacaagagctcctgcgcatctacgaagagggcgtttggcaacaagaaaaagatattcctcaagacatcaaggacatcaagaagcgaatctcgaacgacaaggatattaaagacatcacgcccaacgacatacaacgctacagaatctggatggaccagaagtattgttctccatacacaggcaaaacgataccactgtcccgtcttttcaccaccgactacgaaatcgaacacgtcattccgcgttcacggtattttgacgactcctataataataaggtcatctgcgaagctgccgtcaacaaagacaaaaacaaccgactgggcatggaatacatcatggctgctggaggaaaaacgattgaactcggcaacgggaaaaacgttcaaattctgaagaaagaagaatacgttgaactggttgacaaaatctttggcaacaacacgcgcaagcgcaacatcatgctggcagacgaaatcacagaagacttcaaccatcgccaattgaacgacacacgctacattgcgcgattcatgaagggaatcctatcgaacatcgtgcgcgaaaagaatgccgacggtacattggaaccagaggaaacctcgaagaatctgattgtttgttcaggccgaatcaccgaccgcgtcaagcaagactggggactgaacgacatttggaaccatatcatcacgccgcgatttgaacggctgaacacaaagacctcatccaacgattttggagaatacgtgtgcaaagatggcaaacgttatttccaaacgcgggtgcccctcaatctgcaaaagggcttcaacaaaaagcgcatcgaccatcgccaccacgccatggacgccattgccatagcctgcgtcaatcgcagcatcgtcaactacctaaacaacgctgccgccaaccaaaccgaacgcgaagaccttcgccgtgtcgtgtgcattccagaaagaaacggacaaaccaaacgccaactccgttcaccatggcattgttttgcaagagacgcagaaaacgccctgcggcaaatcgttgttagtttcaagcagaatctgcgcgtcgccaccaaagccacaaacagttacgaatgttttgacaccgcttccggcaaaaaaatccgcaaacaccagagcaaccgtgaacactacgccattcgaaaaccgttacacaaagattccgtctacggcgaagtcatcctgacaagcatcgcctccgtcaatctaaaaaaggctctgctgaaagctgacaggattttagacaaacgcctgaaggagaaaatctttgagttgcgcaagctctacaactatagcaacaaacaaatagaggagcatctgacaaaggtgtgcatcaattgtccggaatggaagaactacgatttcaaaaagattgccgttcgcattctttccaacgatgcagatgccacacacattgttgccatacgaaaaccgcttgacgaatcctttgataagatcaaaatcaacaccatcacggacactggcatccaaaagattctgctcaaccacttaagccgatacgccgatgacccgaagaaggctttttcgccagaaggcatcgaagacatgaatgccaacatcgcatcgctgaacggtggaaagcaacatctgcctatatataaggtgagggtctctgaaaaagacaacggtggctatttccccatagggcaaaaaggtaatcgtccaaaaaaatatgtcacaacggccaaagataccaacctattctttgccgtttacgtagactcaaaaggcaagcgcagttacaagaccattgatttgcgcacggccatcgaatgcaagaagcaagggctgtccgttgcccccagcgtgaacgagaaaggagacaaactgcttttcacgctttctcccaacgaccttgtatatatgccatcggaagaggaagaagccaacggattttccatcaaaggcaatctcatcaaagagcatatctataaaatggtaagtgccaacgacaatcgatgctttttcattcctcacactgtggcggactttatatccaatggtgaagaatacaatagacacaacaagattgaactcacagaagacagacgcagcatcaaagagcattgcgttcctctgaaagttgaccgtctgggtaaataaaacatactaaaagatctggcaacaagactgcaattgtaattcaaaacagatgattacaattgcagtcttatgctttttaaaaccttacgaccatgataaagaaaactctctattttggaaatcctgcctatctgagcctacgcaacaaacaattggtcatcaaaatgcccgcagtggagaaatctcaaaatgttgcagacatcattcgagcagaatcaatcacaacaaaacccattgaagatttaggagtggtggtgctcgaccaccaacaaatcaccatcactcaaggactgctggaagctctgcttgaaaacaatgtcgccctgatcacctgcaactcccgaagcatgccagtaggccttcaactccctctctatggcaacaccattcagaacgaaagattccggttgcaaattgacgcttccaagccattgcaaaaacagctgtggcagcaaacgatgaaggcaaaaattgaaaaccaagcctacgttctcaaacacaatacagaaacggaaacacaatgcatgtttgtctgggccgactgcttgaaaagtggcgaccccaccaatttggaagcacgggctgccgtttattattggaaaaacctttttcatcgagagttccctaacttcatccgcgaacgcgaaggagtgcctcccaacaatctgctcaactatggctatgccatcctgcgtgccatcattgcacgctcactcgtttgcagcggcctgttgccaactttgggcatacaccaccacaaccgatataatgcctactgcctggcagatgacattatggagccatatcgtccctacgttgacgaactgatattgagaatcatacggagcaacaccgactacaaagaattgacaactgcgttgaaagcccaattgctaagcatcccaatattggatgtcaacatcaacggcaaacgcagcccgctcatgatcgcagcaacaacaaccaccgcctctctggtaaaatgtttcagcggcgaaatacgcaaaattgcctatccgtcaatgtcaacgagttgattatgaaacgtttaaacgaatatagagttatgtggattttagtgttctttgatttgcccacagagacgaagaaagacataaaggaatatacaatattccgcaaattccttctggacgatgggtttacgatgtttcaattttcaatctacatacgtaactgcgccagcagcgagaatgccgcagtacacatcaaacgaataaaatcacgccttcctccacatgggaaagtgggaatattatgtataacagacaaacaattttcaaacatggaattattttttggcacgaaaaccccaaaagttcaagcggaaggggttcaactggaattattctaaaacaagaaagaggtagaaccgagaaaagcctttaccatttctcattctacctcttctatgacaaactttttctttttctatttgtcactataacgcattgatttcctttacataagacgaatcaagctgtttgccataggacaaaattactaatttgaaagcaattcacaacatattaacgacggccgtttacaacgccctggctgtttgccataggacaaaattactaatttgaaagcaattcacaacaaaaacgatatagagtttttggaaaagcaagctgtttgccataggacaaaattactaatttgaaagcaattcacaactgaattttctaagtaatactcctgtattttgctgtttgccataggacaaaattactaatttgaaagcaattcacaacatgaaaaagatttattatttggaaattggagctgtttgccataggacaaaattactaatttgaaagcaattcacaacatactttgttcgattcccttttagggcttggctgtttgccataggacaaaattactaatttgaaagcaattcacaacgtacaaaacaacatcaaagctttgcgtcctgctgtttgccataggacaaaattactaatttgaaagcaattcacaactaaagaacgattcaacattggatgccaaaagctgtttgccataggacaaaattactaatttgaaagcaattcacaacggtcgggatgacttgcaacacgctccaggggctgtttgccataggacaaaattactaatttgaaagcaattcacaacaccaccacggaagaaatctccaccgccagtgctgtttgccataggacaaaattactaatttgaaagcaattcacaacccttgaagtaaatgaattcaaagacggtctgctgtttgccataggacaaaattactaatttgaaagcaattcacaacttggagaagatatttcaccagcggcagagtgctgtttgccataggacaaaattactaatttgaaagcaattcacaacgagtttttgagcctccgtgagtgctgattggctgtttgccataggacaaaattactaatttgaaagcaattcacaacgagagccacgtgttgatgtcagagaacaccgctgtttgccataggacaaaattactaatttgaaagcaattcacaacgatttagccggagtaccttataacataccagctgtttgtcataggacaatgttactaaattgaaagcaattcacaatagttatacacacatatttcgcctttagctttttgtcatgattaaaataaccctttcgagagcaatttagaactaacattcacctcataccacactgccgcctgtgccatcgcgtccttgagggcttctaaaaactgcttgtagttctcctgcgtgatggtgatatgatgctctgggtgttgtccgtcgtggtcgccactcgccagatggatgatgaagaatgtgcggtctgtgtcgtgatgcgccaccatacctcgcttcttcaaaatcgccatagtgcgctcaaagtctgctggcgtggtaggcaccacctgaagaacgctccagggatattcctgtgccgtgagaagtatttgcccttcctgctcagaaagcaggaaggaataaattgtttttgatgttaccataggtttaagtttttcgtgcaataaagttattcactgcaccttagtaagggttaagggatgttctataaattagttttaatggagattctttatttaggattgacttggccgcttttacagttctcactcgcatcttgctgtatttcaaagactcacatagctcgctatgctcgtctttgaaatacaacaatctgcttcgcgataaatgtaaaatcggctcaagctaatttatagaacaccccttaaaaactacttgaactattattaaactgttcggcgctggacaaagttaccattttacaggcaattcgccgctttttctttcagttttcccgtcgttttgcagactgcttctcaaggctgtccattcccttctccgtcaatatataatatggagcagaaatgtgtccctgtttcagtagcaatccatcttttgtcaagcggttcaatgttctctgggccgttgaacggctatagcctgtcagagattgaaaaacagcgcggtccaggaaacggacgttctcagaattgaagaaatcgcgaacacgctgaagaatctccgaatccgtcaagacgcagaatacgtaaggcactttcgttgagcgcttgaaacgcacattgtgcattttcttccgcaatcccacttttggtctgaaagcaatgtttctcacgtaaagatcccgcgttactttcttgtcatttctgtctgcaattttgcgatgacaggaaatcatcggactaaaatagcccaatcccggaatctccacgctggttccgcacgagagtttctctgcaacgacattcaccaaggcgtccataaccgccacgatgtcggtcgaagtgacggtgcaacgattttgtaccgtttcatacaactgttccggcgtaaacttaccggcattcgccactacgggataatagcccactggcgattcttctgtgaagcgtggcagctcacgcaatgaaaatgaaataattgacatggtttaagattagtgttaggtttgataattgtctgggatgtcattcttcacctccctggggaagtaacgcaccgttgtctgcaatgatgcagggcgaacgcgcggaaggaaacaggaatacagcgctgaaaatcatcctgaatccttttctttcgacacgctccttatgtttgacagcgaacgcgggacgagacgcaaccgaatctgggacgagagacgactgaatctgggacgaggcacgaccgaatctgggacgggagacgaccgaatctggggcgagaggcgctgacaagttgagagagcgtggcgcggaggattatttgacgctgcaaagatagggcattatcgtgacagaccacggcaaaaagaaatttggagtgttaaaatgtagtgtcaaagttcctgttcagcaaattctgaggagtctgccagataaattctcagaataagccaggaaagagagagggaaaggaattatgagaatggggatggttttttcttgcccgtttcaaggggcactgtggaaattagcctacaacacgccttgtctttcccaaaacacggagatgagaagtggcgagatgtatgttttaacattaagagtggcaattttaagattaaaggtgtttgtcctgtcacaagaaattccgaacttagcaacggtaagtagatgttcaaaattattttataatatgaaagctgcgaaagagcagtttgatatgatagaacagttttgaacacctaccaaacaggcaaacactaaaataaaccttgctccgacttccccactccactgacggggaggacgcaacaaacaaaatctcaaaccaatgaaacaggaaggatatgcgcagaagcaatttggcatcaagaccaagcgattctgccagacactcgacttgaaggatgagccagagctcattgccgcatacaaacaactgcacgacgaagaccacgtttggagagaaattcttgacggcatcaaagaagtggggattctcgaaatggagatttatctgctggagaaccgcctgtttatgatcgttgaaacaccagaggatttcaattggaatgattcgatggagaaactggccgaacttccgaagcaagaagaatgggaagcactgactgggagataccaaaagacgaaaagcggtgccacttcttcagagaaatggcagcttatggagcggattttccacctatatgaatagggcggattattccgcgtttcacgtttaaaacggaacgccacgtgacgcaacatcaaacgacggcagaaaagcgccttgagaactttcaaggatttgccaacaggatgctttgaaacggcctcttcggacaaaaccaagagtaattatgcggtcttcgttttcgccaataccaaaacattttattcaccccattaaccactacgaccatgatgtaccaactgccaccattgccttaccctaaggaggcactttcaccagctatcagtgcggaaaccattgacttccactacgggaagcattttcagacgtacgtcaacaagctcaacgaactgattaaaggcacgctatatgaggatatggaactgccggaaatcatctgcaaagcttctggcgctctctacaacaatgccgcacaagcctggaaccacgatttttatttcgaacaactatcgcccaccccaacggagatgagtccgcgtctcagtgcccttatcatgaaatcgtttggaacgattgagaaattcaaggaagagttgttgcaaaacgccacgacgctattcggagcaggatggacatgggtcgttttgcacaacgacgaaacgctgaccattgagaacgaatcaaacgcaggaaacccgcttacacgcggattgcgccccatcttgacgctggacgtgtgggagcatgcctattacatcgactaccgcaacaacagagcggaacatctgaagcagatttggggcttgattaattggaacgttgttgaagagagggcattctgcaacgaatgcaacgtctatatataataggtgtgtcgaatttagttgtactgtcaaaactggggaacgtatttctcaaatccccataagccaacgaccgcgggtttgccatgactcgcggtcattttgatagattctccttccgtcacccccgcatttcttgcatcgcacatcacaaaatcagcgctttattttgtctatcagacatttctttgtatttttgcccaacaatacaaaccgatgattgctaaacatatggaaaatccaatacagataatgaaatcggctgcagacaacatcagagtattgtctgtcgcaatggtagaaaaagctaagtcaggacaccccggcggcgccatgggtggagctgactttatcaacgtactctactccgaatttttggtctttgaccccaacgaaccgacatgggaatgccgcgaccgcttcttccttgatcctggacacatgtcgcccatgctctattcggaacttgcactcatcggacgcttcagtctttcagaattacagcagttccgccagtggggttcgccaactcccggacacccggaagttaatttcgcccgcggaattgaaaacacctctggtccgctcggacagggacacacctacgctgtcggtgccgccatcgctgcaaaagcgctctacgcccgcactggcaacccaggattcaagcgtgaaaagatttacgcctacatctctgacggcggcgttcaggaagaaatatcacaaggcgcaggacgcattgccggacacttgggtctggacaacctcatcatgttcttcgacgccaacgaaatccagctctcaacagagacttcggaagtgatttctgaagacactgccatgaagtatcgcgcctggaactggaacgtaatcgaaattgacggcaacgactgcgaacaaatccgcaaagcgctcaaagaggctaacgaggaaactgcgcgcccaacgctcatcatcggacacaccgtcatgggaaaaggtgcccgcaaggccgacaacacgagctacgaacgtgactgcaaaacgcacggcgctccgctcggcagcgatgcctataccaacactgtcaagaacctcggcggtgatcctgagaatccgttcgtcatccgccctgaagtggccgaactctatgaaaaccgacgcgccgaactgaacgaaatcgttggcaaactgcgtcaggaagaaaagagctgggctgaaagcaatcctgaaaaggcagcacagctcaaggactggctcagcaacaaattgccaaacattccttgggacagcttgaagcaaaagccaaattctccaaccagaaatggttcttcagcctgcttgtctctgctttcagaatatgtgcccaacatgattgtcagctctgccgacctctgcaactcagacaaaacggatggtttcttgaagcacacgacggtgatcacatgcaccaactttgcaggcggattcttccaggctggcgtttctgaactgacaatggcatgtgtctgcatcggtatgacactccacggaggaatcatcacggcaatgggaaccttcttcgtgttctccgactatatgaaacctgccatccgtatggctgctctcatggaattaccagtgaaattcgtctggacacacgatgccttccgcgtcggcgaagatggtccaacgcacgaacctgttgaacaagaggcacaaatccgcttgatggagaaactcaaaaaccacagcggcctcgacagtgtacgcgtattccgcccatgtgatgttcacgccaccaccaagtgctggcagatggccatggagaacttcagcacgccgacggcacttatcttcagccgccagaacgtcaacgatttgcccgaaaacacgaactacgatggtgtaaaattcggtgcctatgaagttgttgctgaagaaaatcctgatgtcatcctcgttgcttctggttcggaagtaagcacattggctgaaacggctacgatgctcaaagaagacggcatcaaggcacgcgttgtcagttgcccaagcgaaggtctgttccgccgccagacaaaagaataccaaaagaagcttctcccaaagaacgccaagatattcggcttgacagctggtcttcctgtaacctttgaggggttggttggtgcaaacggcaaggttcacggccttgagagcttcggattcagcgccccctataaagtgcttgatgagaagctgggctacaccccgcaaaacatccaccaggaagttgttgatttcttaaagagcaacgactaagaaactggtttcataccaaaagaatatgtaatctatcattagggtggctcttccatacaacgaacggggccaccctaatataagtaaaggtaagcagacgcgaatggtttgacaaaacgcctgctgcgagtttggctgactaaatgtagattcaacaaatccaagaatctgccctcacccacaaccgttatccatcatcaccaggacgccacaagcgcctcataaaacatttttcattatgctcccaattggactggcaagcgaccacgccggatttgaactcaaacagttcgtcaaaaaatatcttgacgaaaaagggatgccatataaggactatggcacctatagcgaagaaagctgcgactaccccgactttgcacacgcattggcaagaggcatcgaaaacggagaatgcgaaaaaggcgttgccatctgcggtagcggcgaaggcatttccatgacactgaacaagcatcagagcatcagagctgccctcgtttggattcctgaaatcgcacacatgacacgcctgcacaacgatgccaacgttttggtcatgccaggacgctacatcacaagcgaagaggccggaaagatcatggacgaatttttcaatacggactttgagggcggcagacacatccgcagaatagaaaagattccagtctgaacggacgaagggataagtcacgccttttcatcttgtagctttcaaagtttttaattgacagaaggatgtaacgccaaatggttgacagaaggcacaatacgccgtcaagaaaagaccgctccctgctctgactttgcaatcgcaaccgacattcaacgccggccggaaatttgaaacggcataaagactggcaataaaacatatttacagtcttcaaaatgttgcggaacttgcttttttacccttacaaaggcaaaaaacagagctgtaagtttctccaaaccaattgaaaattatatctttgcacccgatttcacaaagaggtttaacacaataaaaacaaactacagctaagatgactaaagcagacatcgtaaattcgatttctcagaagactggcattgacaagccaaccgtgcttaacattgtcgaagcattcatgacatctgtcaaagaatctttggcaaacgaagaaaacgtttaccttcgcggattcggcagtttcattttgaaaaagcgtgcccagaaaacagcccgcaatatttcaaagaatacaaccatcatcatccctgaacacaacatccctgcattcaagcctgccaagacttttatgcacgaaatcaaataaacatacaattcacatttataaccgtctaaaaacataacactatgccaagcggaaagaagaaaaaaagacataagatgtctacgcacaagcgtaaaaaaagactgagaaagaatagacataagagcaagtaagcacttagcctttctcaaaaagagatgtgccaatatggaaaagagtacaaaaagtgcggctttgcttattggcacattttatattttcaaacacaggacatttcccgccgtgtttcctctccctcacaagagaaacggcctcgcccagcagggagaagctgaaagctaatgcggagacagacaacggcagactgtccagaaatgcactacaatgacaagcgaagtaatcgtagatgtccaacaaaaagacatatccatagcacttcttgaagacaaacgacttg

SEQ ID NO: 749 - DNA, 11974 bp, synthetic construct
  misc_feature 1..11974: note = Synthetic
  source 1..11974: mol_type = other DNA
tttgaagcgttgctaattgttgggggtttgcggtggctaaagctgttttgtggtggttctttatatagtatagtcttttggtatgtcgatgatactgttttgaatggtgtattcttttttataaatgttgtttcttgaatgctgcgcgtgagggatagtagtggaaagcccacagcccgacgaaggaggtgcgaggacttgtaacggatagcccgacccgaggaggaacgacgacggggcacgcccaaaaaattaaaaattaaaaaacataccttatatatgatacttgttttatggggtttggggatctaagtttataaacttgtggggaaatattaaaagtaggatatttgtcgtttaaaaatagatagaaaggcaagattattttgtggattttatgaagttgttattgtctgaagtgatagtgggttattttggattgatttcttataaaaaaatatttaatccttgtgcgtttcttaatttcgtatttattaattgaatttaaaagccgataaatgaaaaaagtactacttgccgaagatgattttgattttgctgatgttttaaaacaatatctggagctatataattaccatattacttgggctaaagacggggaagaagccttactcctatttgagaatgaaactttcgatatttgcgtgtttgatatcatgatgccaaaaatggacggttttacactagcccaaaaaataattgatatgaatcctgaaacaccatttgttttcttaactgccagaaaactcaaagaagacaaactaaaaggattgcaattgggtgccgatgattatattgtaaaaccttttgaagccgacgaattggtcttgcgattaaacaatattttgaaaagaggcgagcaaaaaaatcaaacaactttttcaggcgatgaaatagcaattggcaattatatttttgatccgaataggttagaattaaagttaggtaatcatacacaaaggcttacagtaaaggaagttgctattattttgttttttctaaaaaataaaaacaaacgcataaaacgaaatgatattttgcaacatatttggggaaatgacgatttcttttcaggaagaagtatggatgtttttataagtcgaattagaaaatatttctctagcgacaaccgaattactattgaaagtattcgcaatgtaggtttagaatttaagattataacctaaaaaaaagcagacctataagccggattctgttctcgatattactaacgataccttatcatttatctaggcttgcaattactcacaagctcaatctttctacccttcagcaacggacgagaagcccttaactaccgatatacttgaaatttcaccgcatagagtttacctggtttcactacagcattacctgtacatactttctgttgcacttgtcctaaccccaataaattggagccgacgggtgttacccgctatgcttctctctggtgtccggactttcctcccccaataaattggcgacgataaggcggtctgcgctgcaaaagtagtttttttaggagccaatcccgctatccgttgcaatcttttttcggcgaaaagcctcaaaaaggattttcactactatcggggctagggcattgcggtaataaaacaacattttttacaaaatacctaaataaaaaagcgaccctttagaggccgctttaaatgttttcacaacggaataatccttattgtgaattgcttcaaaattgtagtacaatactacaactttttttttatatataataaaaatgtatctaaataatatcaattatcttacatttatagttaaaaataaatctagacaactagaataattaaaatataaccaagtacaatgaaaaaaatattaggattagatttaggaacaaatagtattggatgggctttaacaaacaatgatttcgacaataaacttggtaacattgaaggattaggaagcagaataatccctatgagccaagatgttcttggtaaatttgatagtggcgtatctatctctcaaactgccgaaagaacaaaatacagaggaaccagaagattagtacaacgctttttattaagaagagaacgattacatagggttttaaatgttcttgattttctacctcaacattatgctgaagcgattgattttgagaaaaaatttggtcaatttaaacctgaaaaagaagaaaaattatctttttataaaaatgaaaatggcaaaaaccagtttatatttttagacagtcatcaagaaatgcttgccgaatttcaattaataaatactgatttaaaacaagttccgtatgattggactatttattatttgagaaaaaaagctttaactcaaaaaatttctaaagaagaattggcttggatattactcaactttaatcaaaaaagaggctattatcaattacgtggggaggaacaagaagataacaaaaataaacttgaggagtttcatactcttacagttgtagatgtaattgaaagagagaaaggaaaatcaggaatatggtataacgtgattcttgaaaacgggtggatttataagcgtgaaagcaaaattgcattatttgattggattggcaaacaaaagaattttattgttactaccgagttaaatgatgacggaactgtaaaactaaataaagacaacgaagaaaaaagaagttttagatctccaaaagaagatgattggggattggtaaaaattagaaccgaacaaacaataaatcaaagtgaaaaatcggttggtacttttatttatgatgcacttttaaaaaatcccaatcaaaaaataaaaggcgagttggtaagaaccatcgaaagaaaattttataaggatgaattatcaaaaattctaaaagcccaaattgcatttcatcatgaaatttttggagacagaaatctttataaaaaatgtattgatgaattatacagacataatgattcacacaaaaacaacattaaagacaaaagttttgagtacttatttttagaagatattattttttttcaacgtccgcttaaaagtaaaacctcattaattagtgattgtagtttagaatttgttcctattaaagacgaaaatggtattttagtaaaagatgacaatggcaaacaagttgtaaaacctttaaaatgtattgcaaaatcaaatcctatttttcaggaatttagattgttacaatttgtaaaaaaccttaaaatttacaaaaaagaaattgtaaatgatgttgatgtaacccatgattttataaaaactgaagaagatttagttgaacttttcaattttttaaatgataggaaagaaatagatcaaatttcacttatcaaacatttattaagacctttaaaattaaaaggtaaattattagatgcggaagttgcaaaattaagatggaattttgtagaagacaaaatttatccttgtaacgaaacaagaaatcagtttttgaatgccgttgcaaaaattgatgttgataaatctttttttgatgccaaaaacacccaagatttatggcatattttatattcggttacagataaaattgaaattacaaaagcaattaccacttttgccaaaaaacataatttacctgatgaatttataaccaatttttctaaattaaaaccttacaaaaaagactatggttcgttttctgaaaaagccataaaaaaattattaccattaatgcgctttgggagctattggaaggaaagcaacatcgatatcaaaacgttggctagaattgacaaaattcaaacaggcgaatttgatgaaaacatgagaactcgtgttcgagaaaaagcaattcatttaagtaaaacaacagattttcaaggtttgcctttatggttagcatcgtatattatttatgaccgacacagcgaagcaagtgatgtttcaaaatgaaaaactcctgcagatattcaaaactttttaaagtatgatttcaagcaacattcactacgcaatccaattgtcgaacaagtaattacagaaacattgcgagttgtaaaagatatttggcaacattatggcgatggaaaagaaaatttctttaccgaaattcatattgaattaggtcgagaaatgaaaaatgacaaagccactcgtgaaagaatgactaaaaaaatatcagaaaacgaaaatacaaacctacgcatcaaagccattttaacagaattgaaaaatgatggtcttaatgacattcgtccttattcgccaagtcagcaagagattttaaaaatttatgaagaaggagtttatagtagtgaaattaaaaaagaaaagttagaagaaattgataaaatcagaaagaatgcaaaaccaaccccttctgaaattatcaaatacaaactttggttagaacaaggctatatttcgccttatactggaaagctaattccattaagcgaactgtttacaactaaatatcaaattgagcatattatcccacaatcaaggttgtttgatgattcattatccaataaagtgatttgtgaatctgaagtgaatgaattaaaaagtaatatgaccgcttatgagtttatccagaataacgaagatagaattgtaatcttgactggaggtaaaacggttaaaatttttactaaagatgcctataaccaacacataactgcctattacagcaaaaataaaagcaaacaaaaacgattattgagcgaagaaatttctgaaaagtttatcgaaagacaattaaacgacaccaaatacatcagtaaaattgttaagaatctattaagcagaatagttagagaagaggaggagcaagaagtaacttcaaaacatattgtttccttaaatggttctatcacatcaagaatgaaacaagattggggattgaatgatgtttggaacaacatcattacaccacgttttgaacgtttaaatgcgctaacaaactcaaatgattttggacaatttgaactaaagaaagatgcttatggaaacaaagggaaacaaatatttcagaccacagtaccagatgccattgccaaaggttttactaaaaaaagaattgaccacagacatcatgctctggatgctttggtaattgcttgtgtgagtagaactcatattaattatttgaataatttaaacgcaagagatacagatgacaaagctgtaaaacatgaattgagaaataaattgtgttttaaaactaaaccagatagcaatgggaattataaatgggaattttacaaaccttggaaagacttcacgacagaggcagaagataaactaaatacgacaatcgttagctttaaacaaaacacccgagttatcaataaaacagtaaacaagtacacaaactataaggacgaaaaaggaaatttgaacattggaacaaatggattggttgaaaagaaaattattactcaaaccaaaggcgacaattgggcgattagaaaaccaatgcatgccgaaactgtaagcggaaaagtatttttaaaacgtatcaaacaaagtcctattactattgcaaatgcgattgaacaaatagaatttattgttgataaggaagttaaaaaacaattagcatctaaaatcaaacaatatccaaacaatatggtaggtttaaaaaaacacctcaaagcttttcctgtaatgattgatggcaaagtaattgacaaggttcaaatatatgaaactatagaggccacagccacaagaaaaacacttgacataacttttgatgaaaagaaaattgaaaaaataacagatactggtattcaaaaaattctattaaatcatctgaaacaagaaatgtatcaaaatgcaattcatgaaaatggcgaaaaaatccctgctcacgaagttgctttttcagaaaatgggttagatgaattaaataaaaacttaacaactttaaataatggtaaaaaacatcaaccaataaaaaaagttagagtttttgaagaaagtaataaatttccattaggagaaactggaaacaaaaaaaataaatttgttgaaactgctaaaggaacaaacttgttttttgcaatttatcaagatgatttaaacaataaaaaattcatcactattcctttaaatgttgtaattcaaaaccttaaagatggattatcgcctgtacctgataaatatttagataataaaactaaagttgagtataaattaactcaatttctatcccctaatgatctagtttatactccaacaaatgatgaattagaaaattcaaatcaaataaatataaataatttcaacaaagaccaagtgtgtcgtttatataatgtaaatgatttttcgggctatactatttattttacaccaaatcagtttgcaaaaaacattgctcctaaagaattagatacaagtttcgattctaaactttcaaaatcattagaaggtataacaataaaagaaaatttttggaaactagaagttgatagacttggaaaaataaaaaaaatcatccgatgataaaatatcaatgcaaaaatcaataggattgggctttagcctattcaacaaaaaattgataaaaaattaaaattgagataaattcaaattcatagaaatgggttttaaccaatttaacaatataaataatcgagatttactttagccaaaatatttcataaaccatttttaaatcgcaaaatatgataaaacgcacccttttttttggcaatcccgcttatttaagcaccaaaaacgagcaaattgtaatttcttatcccaacaaggagcaagaaaccaaaaccgtggctattgaagatattggcgtaatcgttttagaaaaccaacaaataaccattaccaatggtttgttagaaaaactaaccaacaacaacgtggcgttaattaattgcgaccaataccatttgcctattgggttgttaatgccgctcaacggacatacagaacaatcggaacggtttaaaaaccaaattaacgcttctgttccacttaaaaaaaacttatggcaacaaaccattagtgccaaaatcatgaaccaagcaggattgcttaaagaaaaaggaatcccgtgccgaaaaatggagctttgggcaaaagaggttacatcaggagatgcacttaatcacgaatctagagcagctgtattttattggcaaagcctgattacggtaccaaattttaccagaggacaaaaaggaattccgcccaataatttattaaactatgggtatgcaatactgcgagccattactgcaagagccattgttagttcgggcatgttacccactttaggtatctttcatcgcaacaaatacaatgcctattgtttggctgatgatattatggaaccctatcgcccatatgtagatttgatcgtgtgtcatattatagatacagaggattcatacgatgagctgaccatcgaaatcaaaaaacaattactcagcattgccacaattgatgtatgtatagatggcaaaaatagccccttgatggttgccatgagcagaacaacacattccttacaggaatgctttgcgggagccgcaagaaaaattttataccctatttatgtatgacgaacattacacccgtttaaaccagtatagaagtttgtggatattagtattttttgacctgcccaccgaaacgcggaaagagcgtaaaattgccagtgaatttcgcaagaaattattggacgatggtttttctatgtttcaattttcgatctatatgcggttttgtgccagcagagaaaatgccgaagtacacaccaaaagaataagaaatagtttgcccgaacatggcaaaattggtgtgatgcaaataaccgataaacaatttggtatgatggagcttttttatggaaaaaaacctgtagaaacagacaaaccttcgcaacaattagaacttttttgaaaaataggatttagaaatattagacctaccagaatatcaacacacaaacagaactgttttttaatttcaaaataagcatataaccaccaacatatcaaacgattaactcgcggtatgttggtaattataagctaaaatacaattttgaaagcaattcacaacaggattgctcctagtaataatatttttgcggttggtaattataagctaaaatacaattttgaaagcaattcacaacgtggtatgccactaacagctactacaagcagttggtaattataagctaaaatacaattttgaaagcaattcacaacggataaccatattttctaaatacatcgtgagttggtaattataagctaaaatacaattttgaaagcaattcacaaccagcatctttagcgtctttatattctttgagttggtaattataagctaaaatacaattttgaaagcaattcacaacaaaaacaatacggaaaagaatctattcagggttggtaattataagctaaaatacaattttgaaagcaattcacaacaacaaccatatccattgattatgtatgtaagttggtaattataagctaaaatacaattttgaaagcaattcacaacgctttagtcggcataaacgaaagcatatttgttggtaattataagctaaaatacaattttgaaagcaattcacaacttgctagaccaaaaaatgaacaattgtacagttggtaattataagctaaaatacaattttgaaagcaattcacaacggaactttaaaatacattccatttataaacgttggtaattataagctaaaatacaattttgaaagcaattcacaacgcacccgcaatgataccaaacaaacagatagttggtaattataagctaaaatacaattttgaaagcaattcacaactattttttgctaatgcaccataacgttaaagttggtaattataagctaaaatacaattttgaaagcaattcacaactaaactatctagttcttgctgatcttctatgttggtaattataagctaaaatacaattttgaaagcaattcacaacattatcaccaaaatcataaaccacaacatcagttggtaattataagctaaaatacaattttgaaagcaattcacaacgaagttgctctttatctgtttttaaaaaaagttggtaattataagctaaaatacaattttgaaagcaattcacaacactatctatactctctatttcttttttatgttggtaattataagctaaaatacaattttgaaagcaattcacaacggaaacgtaaatcacggtggatcagttacggttggtaattataagctaaaatacaattttgaaagcaattcacaactacctggtacgcttattagatttttacctggttggtaattataagctaaaatacaattttgaaagcaattcacaacataaagagtctgttcattagaagcagagagttggtaattataagctaaaatacaattttgaaagcaattcacaaccaaaaataggcttaattttttgtcaagcgtgttggtaattataagctaaaatacaattttgaaagcaattcacaactgttggatgaatcttcccttgtgagtacgcgttggtaattataagctaaaatacaattttgaaagcaattcacaactaaaagtagattcaaataaggtatcaataagttggtaattataagctaaaatacaattttgaaagcaattcacaacccatgagggaaaatgaaaaattctaaattagttggtaattataagctaaaatacaattttgaaagcaattcacaactgaaatcgccaaattgtgcttcccaaatgggttggtaattataagctaaaatacaattttgaaagcaattcacaactcagttagatttgccgtatactatttatccgttggtaattataagctaaaatacaattttgaaagcaattcacaacacaattaccttattcattaaattgaacaagttggtaattataagctaaaatacaattttgaaagcaattcacaacggaatcatttagcttgttttctgggggattgttggtaattataagctaaaatacaattttgaaagcaattcacaacgacctttctatattagaaacctcataatcagttggtaattataagctaaaatacaattttgaaagcaattcacaaccgtggcgataataatgttaagtacctcaatgttggtaattataagctaaaatacaattttgaaagcaattcacaaccggaattaggagaagggtctgttgggcaaagttggtaattataagctaaaatacaattttgaaagcaattcacaactattcaaagccgtaattatattgtaatgtgttggtaattataagctaaaatacaattttgaaagcaattcacaacctacgtcataatggctctcccagtcatcaagttggtaattataagctaaaatacaattttgaaagcaattcacaactgataccttcaatgcttattcaatgaataggttggtaattataagctaaaatacaattttgaaagcaattcacaacaaatgatgtattagtatctcttgttattctgttggtaattataagctaaaatacaattttgaaagcaattcacaaccattttttgaatcaactccttttgcgaaaggttggtaattataagctaaaatacaattttgaaagcaattcacaacaaaagacgaacaaaaggttcttttatctagttggtaattataagctaaaatacaattttgaaagcaattcacaacgcgaatgtacaacataaaacaacacaaaaggttggtaattataagctaaaatacaattttgaaagcaattcacaacataacgcgttattaaaagctattaattcgtgttggtaattataagctaaaatacaattttgaaagcaattcacaacgaaaagtcatttgttaataaggtaggtcgtgttggtaattataagctaaaatacaattttgaaagcaattcacaactacatttcatttgttacctcaatagtttcagttggtaattataagctaaaatacaattttgaaagcaattcacaacgcatgatgcaaatatgcggaatgatccaaagttggtaattataagctaaaatacaattttgaaagcaattcacaacttaactgaacaagcaagaaaagatttcaaagttggtaattataagctaaaatacaattttgaaagcaattcacaacgcaggtaatccgattattaaaaatcatagtgttggtaattataagctaaaatacaattttgaaagcaattcacaacgagggtcgtgtatatctttattcacgacttgttggtaattataagctaaaatacaattttgaaagcaattcacaactattaacgtgcggcttcttaatgaagaaatgttggtaattataagctaaaatacaattttgaaagcaattcacaactatatctctactacctgctagaatggacaagttggtaattataagctaaaatacaattttgaaagcaattcacaacaagaatatctacacccatttcaaaaaactggttggtaattataagctaaaatacaattttgaaagcaattcacaactgcagctgcttgtattccttgggcgtctgcgttggtaattataagctaaaatacaattttgaaagcaattcacaaccttatgtttcatctcttatgtttgggtgttgttggtaattataagctaaaatacaattttgaaagcaattcacaaccgcatagtttcaatactggggatgtacttgttggtaattataagctaaaatacaattttgaaagcaattcacaacagtgctaccttcgataattagcgcattaatgttggtaattataagctaaaatacaattttgaaagcaattcacaaccacaaatggggaatttgacgaaaacaaaagttggtaattataagctaaaataacccgttgggtgtaattaaattatttgatgacactatcccgcaaagtg

SEQ ID NO: 750 - DNA, 11089 bp, synthetic construct
  source 1..11089: mol_type = other DNA
  misc_feature 1..11089: note = Synthetic
ttcgttacttgatgagtgaacccggtagcgagggatatgccgcctctaaaggaggtatctattctttgacacatgcgttggccttatcgctctcggaatggcatatcacggtaaactctatcgctcccggttggatacagaataacaattacgaccagcttcgcccggaggatcatgctcaacatccgtccggaagggtgggaaagccggaggatatcgcccgtatgtgcttatttctttgtcaagaggaaaacgatttcattaatggcgagaatattacgattgacggtgggatgaccaagaaaatgatctatctcgactaaataaacatccgtatatgacacaaacatcgaatatagaaaccaaccgtcttgtgctccgtcctttcagcgaaagcgatgctcctgatgtttttgagagctgtaagaatccaaacctaggcaataacgcaggatggaaacctctcgaaacgatcgaagagactattgatgtactaaataccatatttatcggaaaagaaggggtttgggctatcgtatcaaaagagactcaacaagtcattggctccattggcatcattcctgatcccaaaagagaaaacccacatgctcgcatgctgggttattggctaaaagaagagtgttggggacaaggcttcacgacagaagcagtgcaatccgtattgaattacggatttactcaaatggatttacatttgatcacggcaaattgttatcctcacaatcaacgctcacaacgtgtattagagaagaatggattcgtatacgaaggacggcttcatcaagcagagctaatgcatactggacaaatagaggatcatttgtgctattatcttgaccatcattccttttcaaacaaaaacaatagtttatgatagtagtaacaaaagatttatatacgctcaggagttgggaaggtcaagatacggaatccttaaccttgcaccttaataacaagaagatctgggataactgtcgggatggattgcctcatccttatacaaaagaaaatgcccgctgcttcatcagccaagcacgagaaaaaactgaaatatcggatttctgcattgtggttcatggtgaggcaatcggcaatataggttttgtgagaggaacggatgtggaacgtttcaatgcggaagtcggttattggatcagtgagagatattggaaccaagggattacctctgaagcgttagccgatgcgatccagtattattttgagcatacggaggttattcgtatattcgccacggtgtatgaatataatctggcatccatgcgggtattagagaaagtgggattcaagaagactggcatcttccgaaaagcttgttacaaaaacggacgattcatcgatgcgcatcattttgagatcgtagcggagagaaattagttgggaacaaagacttataatccatttatgcaaataagacaattacaggtaaacgaatacgataaggcattaaccttgtctttggacgtgttcatccaatgtggcaagaatgacttcgacgaagagggattgaaaaccttcaagagtttcatttacaataaggatctggtaaatgagctaaccatttacggagcattcgagggtgagtcattaataggtctaatcgcgacaaaaaatgaaggaaagcatatctccttattcttcatcacgcctatgtatcatggaaaaggtatcggcaaacgattattcgaggccgctatccaagataagccagtctcggaaatgacagtcaactcctcttcctatgcaatcccaatctaccggaaattcgggttcgaaccaatctgcgaagaacaaactacacatgggatgaagtacaccccgatgaagcgaacgataacccgtccctccttcgaggacttcaatgagcttcttctgctttgggaagcgtccgtacgtagtacccatcatttcctaaaagaagaggatatcttattttataaagaacttgttcccggatatttcccattggtagaactttatatcatccgaaatgagcgaggaaagatcgccgccttcatgggcttaagcgatgagcttatcgagatgcttttcgtacatccggaagagcaaggcaaaggattaggtaaacgacttatccaattcgccttgcaagagacacccatccgaaaagtcgacgtaaatgagcaaaacacaaccgcacttcatttctatcagcatctgggattccaagtgataggaagagacgagacagattcctccaacaagccattcccgatacttcatcttcaagctacacttccttaaaaatttaaggtaatcgtgtagcctatcatgactatatgcgtagcctaacgaaggcattcttatcaaaaaacaggactagttacacataaaaaaagcccaccgataaaggacgatgggctagaacctaaatgttttcacaacggaataatccttattgtgatttgcttcaaattagtatagcaaagaaataaagaatatatttataaagcaagtatttcttgataatttattttatctttgaaaaaatcgttaacacaatactagtcatgaaaaaaatagtaggattagatttaggtacaaatagtataggatgggcattaatcaatgcttatataaataaagaacacttatatggtatagaagcttgtggcagtcgtattatacctatggacgcagccattttaggaaatttcgataagggaaattctatctcacaaactgcggatcgaacaagctatcgtggtatacgtagattgcgtgaacgccatctattaagacgtgagcgcctgcatagaattctcgatttactcggctttttaccaaagcattattccgattctctcaatcgctatggcaaattcttaaatgacatagaatgtaaattaccttgggtaaaagacgaaacaggttcttacaaatttatctttcaggagtcttttaaagagatgttggccaattttaccgaacatcatcccatacttatcgcaaacaacaaaaaagtaccctacgattggacgatctattaccttagaaagaaagcattaacacaaaaaatatcaaaagaggaactcgcttggattcttttgaactttaatcagaaacgaggatactatcaacttcgaggtgaagaggaggaaactccaaataaactagtagaatattattcattgaaagtagaaaaagtcgaagactcgggagagagaaaaggcaaggacacctggtataacgtacatttggagaatgggatgatttaccggcgcacaagtaatataccattggattgggaaggtaaaactaaagaatttatagtcaccactgatctagaggctgatggtagtcctaagaaagataaggaaggaaatataaagcgttctttccgtgcgccaaaagatgatgattggacattaattaaaaagaagacggaagcagatatcgacaagatcaagatgactgtcggcgcttatatttatgatacacttctgcaaaaaccagaccagaaaatacgtgggaagctagtacgtactatcgaacgtaaatactataaaaacgaactctatcaaatactaaagacccaaagtgaatttcatgaggaattacgagataaacagttatatattgcttgccttaatgagctttatcccaataacgaaccacgtaggaatagtatttccacacgagatttctgtcatttatttatagaagatatcattttctatcaacgtccactgaagagcaagaaatcattgatcgacaattgtccctatgaggaaaataggtatattgataaagagagtggagaaatcaaacatgcatccattaaatgtatagcaagtctcatcctctctatcaagaatttcgcctttggcaatttattgtaaacctacgtatctacaggaaggaaacggatgttgacgtaacacaagaattactccctaccgaggctgattatgtcactttatttgagtggctgaatgaaaagaaagaaatcgatcaaaaagccttttttaaatacccgccattcggctttaagaaaacaacttcaaactatcgttggaattatgtggaagataaaccttatccctgtaatgaaacccatgcacaaataatagctcgtttaggaaaagcgcatatcccaaaagcttttctttctaaggaaaaggaagagacattatggcatatattatattccatagaagataaacaagaaatagaaaaagccttacactcttttgccaataagaataacctaagcgaagagtttattgaacaattcaagaatttccctcctttcaagaaggaatatggctcttactcggctaaggcgataaagaaattgcttccattgatgcgaatgggtaaatattggagtatcgaaaacatagataatgggacaagaatacgaattaataaaattatagatggagagtatgacgagaacattcgtgagagagttagacaaaaagctattaacctaactgatattacccattttcgagctttgcctttatggttagcttgttatctagtttacgatcgtcactccgaagtcaaggatatagttaaatggaagactcccaaggatatagatctctatttaaaatcgtttaaacaacattcgttacgcaacccaatcgtggagcaagtgataacggaaaccttgcgtaccgtacgagatatttggcaacaagtaggccatatcgatgagatacatattgaattaggacgggaaatgaaaaatccggcggacaagcgtgcccggatgtcacaacaaatgataaagaacgagaataccaatttacgcataaaagcactattgactgaatttttgaatccggaatttggaatagagaatgtacgtccatattcccccagccagcaggatttattgcgtatttatgaagaaggcgtactaaatagtatattagaattaccggaagatataggaattatattaggaaaattcaaccaaacagatactctaaaacgtccaacacgctcggaaatactacgttacaaactatggttggagcaaaaatatcgttcaccttatacaggcgaaatgataccattaagtaaattattcactcctgcttatgaaatagaacatattattcctcaatcacgttatttcgatgattcacttagcaacaaggtgatctgtgaatctgagataaataaattgaaggataggagcctcggctatgagtttattaaaaaccatcatggagaaaaggtggaattagcttttgacaagcctgttgaggtactttccgtggaagcctatgaaaaacttgtgcatgaatcttattcacataacagaagtaaaatgaaaaagttactcatggaagatattccagatcaatttatagaacggcaactcaacgacagccgctatattagtaaagtagtaaaatctctgctttctaatatagtgcgtgaagaaaacgagcaagaggctatctccaagaatgtcattccttgtacaggaggtattaccgatcgattaaaaaaggattggggcatcaacgatgtttggaataagattgtacttcctcgtttcattcggttgaatgaactgactgaaagtacccgtttcacttctatcaataccaataatacaatatcccctccatgcccttagagttacaaaagggattcaataaaaaacgtattgatcaccgccatcatgcgatggatgccattatcattgcatgcgcaaatcgtaacatcgtgaactatctcaataatgtgtcggctagtaaaaacacaaagataacacggcgagatttgcaaaccctattatgtcacaaggacaagactgataataacggtaattacaaatgggttattgacaagccttgggaaacattcactcaagatacattgacagctttgcagaaaataacggttagctttaagcaaaatttgcgtgtgatcaacaagacaacaaaccactatcagcattatgaaaatggaaagaagatagtctccaaccaatcaaaaggggatagttgggctatccgtaaatcaatgcataaggaaacggttcacggagaagtaaatttgcgtatgataaaaaccgtatcatttaatgaggccttaaagaaaccacaggcaatagtagaaatggacttgaagaagaaaatactcgctatgctcgagttaggctatgacactaaaagaataaagaactatttcgaggaaaataaagatacttggcaagatattaatccatcaaaaatcaaagtctattactttacaaaagagacgaaagaccgctattttgcggtgcggaagcctatagatactagtttcgacaaaaagaagataaaggaaagcattacagatacaggtatccaacaaattatgcttcgacatttggaaactaaagacaatgatcccacattggcattctctccagatggtattgatgaaatgaaccgtaatattcttatattgaataaaggaaaaaagcatcagcccatttataaagtgcgtgtctacgaaaaagctgaaaagtttactgtaggacaaaaagggaataagcgaactaaatttgtagaggcagcaaaaggaaccaacctgttctttgctatctatgaaacagaagagatgataaggatacgaaaaaagtaatccgtaaaagaagttatagcacgattcccttaaatgtagtgatcgaacgccaaaagcagggactttcctcggctcctgaagatgagaatggtaatctacctaaatatatactctctcctaatgatctggtatatgtaccgacacaggaggagattaataagggggaagtcgtaatgccgatagatagggatcgaatatacaaaatggttgactcaagtggcattaccgctaatttcatcccagcttcaacagccaatttgatttttgctttacctaaagctactgcagaaatctattgtaatggtgaaaattgcattcagaatgaatatggtattggtagtcctcaatctaaaaatcaaaaagctataacaggtgaaatggttaaagaaatatgttttcccattaaagttgatagattaggaaatataattcaagtaggttcatgtatactaactaattagattttatcctatgattaagaaaacattttattttggtaatcctgcttacctgtcacttcgtaaccagcaattagttattaagttaccggagatagtaaagaatgatactgtgcccgaaagcttcaaacgacaatcagaaattactaaaccaattgaagatattgcagtgatagttcttgacaacaaacaaattactattacccagggtgtattggaagcattactagagaataattgcgcagttattacatgtgatggacgaagtatgccagtaggcctcatgcttccgctttatggaaacacgacacaaaatgagcgctttcgagatcaattagacgcttccttacctttaaagaaacaactttggcaacagactattcaagcgaaaatcaacaatcaagcatcagtattatgctcttgtaaaaacgaagaaataaaatgtatgcgaatatgggccaatgatgtacgtagtggagatcctgacaatttggaaggacgtgcagctgcttattattggaagtatctgttcggacacatagaaggttttacaagagatcgggaaggtatacctcctaataatttattaaattatggttatgctatccttcgtgctattgttgcacgtggactagtcacaagtggtatgttacccacattgggtattcatcaccataaccgatataatgcttattgtttagctgatgacatcatggaaccttatagaccttatgttgatgagcttgtatttggtttaataagaacaaagggtatatcacccgaaatattaacaaaagaatggaaagcatcacttctttctattcctacattagaagttaagattggaggtaaacgaagtccgttaatgatcgctgtcgctaaacaacagcctctctttacaaatgtttcagtggagagcaacgaagaatcgtgtatccagaacggtaataatcatggatcgatttagcgaatatcgtattatgtgggtgttggtattatttgacttacctacggaaacaaaaaaagaaaagaaagcttatagtgatttccgtaagaatctgcagcgtgatggctttaccatgtttcagttctctatttatgtgcgacattgcgccagccaagaaaatgcagaagtacacataaaacgagtaaaatcatttttaccagaacacgggcaaataggaataatgtgcattacagacaaacaatttgggaatattgagttgttctatgggaaaaaagtacaacctcctaatacacccggccaacaattagagcttttctagaaataataaatcccgtcataaaacgggatttattacattggaaacttttcttttttattttctaaccattctatcatctagttgatatacagcatataatacagattaagctgtttccaatggatcaaagatactaatttgaaagcaaaccacaacgacacgggttatgtgaacggccagcgtgtggctgtttccaatggatcaaagatactaatttaaaaacaaatcacaacgcaagccaaccgtcaccattcgccccaagactgtttcttgtggagcaaagatactattttaataaatacttaaccttcttcaactgatcctttactcggtaacaccctccgttatttttacaatcaattgttaaatcatttaataaattcatatatcgcatatctatccattcttttatcaatggggcacaaaagtaagtgaactagggaaactttgctaaaaagactataactttacggcagaaaagataaagagacaacaacaaagattgagaatggacctaaaagagagactatcaagccgctgtcatatagaggatatccatgagatattattttatgtacaagggaaccaagaacggaaagcagagctatacgatctgatattcgatccggatgatgccgttagttatcaagcgttatgggtctgtagccatttctcgaccaaggaaaacgaatggctatatgataaacaggatgagctgataaatgaagtgcttagctgtgagcactccggtaaacgacgcattctcttgaacctgcttgtacgacagccccagacgaatcccccacgggtagatttcctgaacttctgcctggaccggatgctttcagcgaaggaattacccggtgtgcaaacgctttgcatgaaactgggatatgagttatgccgccccatacccgagttgctacaggaatataagacactactcgatctggcggaacccgatttactacaaatctctttgcgaaccgtacataagaacatcttaaaaaaatacgataaaacatgagaaagattttcacactattcttctgtgccgcctccttggccacaggactagcgcaacaagaatcctattttaccaatcccgtgatccacggtgacgtagccgatccttccattatccggatcgaccagacttactatatcactggcacctcctcggaatgggccccctattatccggttttcacctctaccgatttggtgaactggcagcaaaccggacatgtattcgacgagaagccggaatggactaaatcctcattctgggctccggaatggtatcagcataaagggaaggtatatgtctattatacggcccggaagcaatcggataacatctcgtgcatcggtgtcgccgtggcggattcacctacgggcaagttcaaggattacggcccggtggtagagtttgggaaggaagcgatagacgcatttatcttggaggacaaaggcaaactttacatcagttggaaggcttatggattggataaccaacccatagagttattggcctgtaagttgacggacgatgggcttcgcctagacggaaagcctttcagcctgctgcgtgacgatgagcgtcaaggtatggaaggtcagcattggttcaagaaagacggatattactatatcatctactccgtgagaggctgttgcggcccgcagagcgattacgccgtatccgtggctcgctcgaaaaagctggaaggtccttacgagaaataccaaggaaacccgatcttgcacggaagcaaggaggttctctccatcggtcacggaacgattacgactacaccggacggacgcatgtattacctatgccacgcttaccagccgggaagcggcttctaccaaggtcgccaaccttacctgcaagaggtgagaatgggcgaggatcattggcctcacttcgtaaccggggaatacgcgagccgcacgcaacccatgccatttgccgagtccgcacaagtgccggtattcgatttctcggatgatttcaccggtgctaccttgcgtcccgaatggagttggaactatccttacacggatgtcaagaccgagatcaagaacggtaaactatctctatccggaacaccgaaacccggcgtaaagaccggagcggcactttgtttacgcccaacctccccggattacacgttggaaacagcgatcgtaaaccggaatgacagttggaaaggaatcacgatgtacggagacgcaaataacctaatcacctgcggatgcgctggagaccgtttgatattgaaatatatcctagaggggaaagaacatccattggccgatcttcctcttcccgcctcgcctttatatctacggatgaaagtgaccgacggtacgcatagcacgttctactggagtaaggacggacaagcatggaacgagatcgtcggcgaaactctctccgcaaaagagacccggtcgttgatccaatgggatcgtatctcccgtccgggattgtatcaagagggagatcctacggcatcggccatttacgcttattgtctattaaaaaatgaatgatggaatctaagtttcacacgtttgcccaaccgatacaatcgatccccttaccggaacgattcacgtatccttttcactatacaccgcatcctctatgcgtaatagcggctgaggagacgc

SEQ ID NO: 751 - DNA, 10574 bp, synthetic construct
  misc_feature 1..10574: note = Synthetic
  source 1..10574: mol_type = other DNA
aaggaaaacgcattattcgtccggcatacaagaatgtgttggaagaactggaatatgtgcctttgaaacagagataattggcaagcacggataacatgggtttacacggatttttctgtgaaattcatgttatccgtgtctgaagaataatatcatcgatggttttactgtcactttctcgcattttatagtctttttccacaaaaactatctaaaatatttctcctctctcgaattttctttaaatttgttagtgactaactaaatctaataaaaggaggaccgagtatggaacaacagacttttgacttattacttctgacaatgtctgcattagcggttgttgtttttgcagccctttattatgtacgtgccggctatggtatgttccaaacttccaaatggggaatttcgttaaacaataaactaggttggatattgatggaagcgccggtgtttttcgtcatgctctatttatggtggaatagcagtgtgcgttgtagcgctgtgcctcttgtctttttcctactctttgaactgcattatttccagcgtgcctttatattccctttcttgatgaaaggaaagagccggatgcctattgccattatgttgatgggagtggtattcaatgtgttgaatggttttatgcagggcgagtggcttttctatcttgctcccgaaggactttattcggatgcatggcttaatacttcttctttttgggcaggactggttctgttttttgcaggtatgggaattaatattcattcggacagtgtgatccgtcatttacgtaaaccgggcgatactcgtcattatttgccacagaaaggaatgtatcggtatgtcacgtcaggtaattatttcggagaattattggaatgggtaggttttgccgtactgacttgctcaccggctgcttgggtatttgttctgtggacatttgctaatttggctccgcgtgccaattcgattcgcaatcgttatcgagaagagtttggagcacaggctgtgggtggcagaaaacgaatgattccttttgtttattaaccgattagactataaaattataaaagtcatgatagattctaaactatttactccggcatccatcgggccgcttactttgagaaatcgtacgattcgttcggcggcttttgaaagcatgtgtccgggcaatgtaccttcacaacagttattggactatcatcgttcggtagcggccgggggagtaggaatgactacaatcgcttatgctgctgtagctcaaagcggtttgtcttttgaccgacagctgtggatgcgccctgagatagtgccggggttgaaagacataaccgatgccattcataaggagggtgcggcagccggtattcagttgggacattgcggaaacatgtctcataaaagtatttgtggggtaactcccgtaggagcttcttccggttttaatctttattctcctacatttgtacgcggtttgcgtaaggacgaacttccggcgatggcaaaagcttatggtcgttctgtcaatttagcacgtgaggccggctttgatgcagtggaaattcatgccggacatggatatctcatcagtcagtttctctctccttataccaatcaccgtaaagacgagtatggcggttcgttggagaatcgtatgcgttttatggatatggtaatggaagaggtgatgcaggctgcaggtagcgatatggcagtattggtgaaaatgaatatgcgtgatggctttaagggaggtatggaaatagacgagaccatgcaggtagccaagcggttggtgcaagatggtgcacaggcgttggtcttgagtggaggttttgtaagtaaagctccaatgtatgtcatgcgcggtgaaatgcctatcaaaacgatgactcattatatgaattgctggtggctgaaatatggagtaagaatggcaggcaaatggatgattccggccgtacctttcaaagaggcctatttcttggaagatgctctgaaattcagaaccgaaataaaggatattccgttagtatatgtcggtgggttggtttcgcgtgaaaagattgatgaggtattgaatcatggttttgaatttgtgcagatggcgcgtgctttgcttaatgaacccggttttgtcaatcgtatgcgtgaagaagaaaaagcgcggtgtaactgtaagcatagtaactattgtatagcacgaatgtacactattgaaatggcttgccaccagcacttgcgggaagagctgccggcaagtttgaaaaaagaaattgaaaaattggagaagaaataagtgtttatatataaaagcaagagtggaaaaatgagtaaattagctgttataaccggtgccgacggaggaatgggaaaggaaataactcgtgccgtagccgaggcagggtatcatgtcattatgttgtgttatactctttttaaaggagaagaacgtaagaatcagatgatattggaaacaggaaacaaggagatagaagtacgtcaggtcgatctgtcttctatggcgtctgttatcaatgttgcagacggactgttggggcgtggaaaacatattgaccttttgatgaataatgccggaacaatgagtactcatttgatgcagactgaagacgggctggaaagaacagtggcggtgaattatgttgctccttttcttttgactatgagattattgcctttgatgggaaaaggaagccgtattgtcaatatggtttcgtgtacttattcacttgggcatatcacgtccgattttttttcccgcgggaagtcaggtagcttttggcgtattcctatttatagcaataccaagttggctttgtggctgtttacgcgtgaactgtcggaaagggtgaaagacagcggaattacagtcaatgccgccgatccgggaattgtttctaccaatatcatccgtatggatatgtggtttgataaactgacagattggttttttcgtccttgcatccgtactcctaaagaaggtgcggcaacagctattcacttattgcttgatgaagaagtgtcggaggtgaccggacaaatgtttgcttcttgcaaaccgaaaaaagtaaaagataaatttatgaatcatccgcaggccaaacaactttgggaggacacggagaaatatatagagcagcttcgtttggaagagtcaattatataaatctccgagttgggggattgcaacaactgcggttagtgcctgtctttttgaaccgtttgttcagccagcatctgttcgcggctcttactttgagtgacgatgtacactcctaagaataccaatacgacggccagtccttttgccggtccgaaagtacccatgcccaataaaatagagacagaagtaccgacaatcggttgtacatagttatacatactgataacggtcggacgcaatgtcttttgtcctatcatcattaaaatataggcaaagaatgtgcctcccaagataacaaaaaggacgcagccccacgtggtggtggatatctcgttaaattgaatagccgaaacttcgtgataggagaatggaataaagcagatggcggcatatgtgaacatccatttcattaatgtgaagatattatatctgctgattaatcctttaaagatagccagataaaaagaaaaacttatctgagcagctaagcacaacaagtctcccggaatgcttccggccttatcatctgtggaaccttgactactcataatcaaagttaaagccccaatggagcctaagaagatgccgattactttctttccggttaccggttccttcaaataaatggctgcaacaatcatggttgcaatcggtgcggtggttgttacgatggaagcatcgatgggagaggtcagtgataacccgaacgtaaaacaaccttgattaaatacgatacccaatagtccggcaaagaacaacatcatcaagtcatgaggctttacttgttctttgggtgcgaaaatagatgcaatccaaaaacagactgctcctcccgtcattcgaaaagttgccagtgaaagtcctgaaattccgttctctaaagctgttttgccgataggagacattaatccccacattatggcagcgcccagcaatgccaaatgtcctttatacttctgaatagccatatcttttttaccttaaataacagtacaaatgtaggtgtttctttttatattttctatctttgctttatagtaaatttatataaaatgaaaaagcaggctgattatattaagcgtatcgagataaagcggctgtggggacgtaaagatatctcgtgggaacttcgccctgatgttaatattctgagtggggtgaatggaataggtaaaagtactattctgaacaggtctgtaaatagtttgagtgctttggaagggggggctttaagtaatggctctgcaccgggggtacattttgttttttctcctgaagatgctacgcaaattcattttgatgttatcagaagttttgaccgaccattgattcattccgagttgcttgaaaaaatggcggataagaatgtgaagacagagctggactggcagctttatcaattgcagcgccgttatttggattatcaggtgaatatcggtaatcgtattatcgagtgtcttacttccggtaatcccgaagaccagatgcgtgctgcccaaatgtcttatcctaagaagaaattccaggatttaatggatgatcttttcggagaaacgggaaagaagattattcgtcagagcaatgagattttgtttgaacaagacggtgatactttatacccttaccaactttcttcgggtgaaaaacagatattggttattttgcttactgtcttggtacaggacaagaggcatggagtgctgtttatggatgagcctgagatttctcttcatgtggagtggcaacaacgtcttatttcattaattcgtgaattgaatccgaatgtacagattgtactcacgactcattcgccggctttggtcatggatggatggcttgatgccgttaccgaagtgagcgatataacacaatgaatttaactaaacgacacggctatgggaaagagattatccgacaacctttcttctttatatatcggtgcggcgaataggttaaagcccaaaaaggcaagacgaaaaattgtggcttatgttgaaagttacgacgatgtctctttttggcgtaccctattgggagagtttgaagatgatactcgttattttgaagtaatgctcccttccaagaccactttggcgaaaggcaagaaatctgtattaatgaatgaactgggttcacagttggggcagaatatgattgcctgtgtagacagtgattatgattatttacttcagggtgctacccatacttcccgctatattatcaataataagtatgtttttcatacgtatgcatacgccatcgaaaactatcaatgttattcgggagctttgcatgaagtgtgtgtcatggctactttgaatgaccatccgttggtagattttgttgcctttatgaagatgtattcacagattgcctatccgctttttatttggtcggtgtggttttatcggaaacacatattatccgagttttcattgcttgatttttgttcgtttgtcaagttggatcaggtaagtgtttaccggcccgagcgcagtttggaaaatatgagccgtcgtgtaaggcggaaattgcaggagttggagcatcgtcatcccaaagcgataggagagatagaggcaatgaaagaggagttcgctcaattgggagtatatccggataatacttatatgtttattcaggggcatcatattatggatagtgtagtgatgaaactgttgacgcctgtttgtaatgttcttcgtcgtgagcgtgaggcggaaattaaagaacttgcagagcacgatatgcagttccataatgagctgacaagctatcagcgtcgtcagctaggagttgatatagtactccgcaagcatactagttataaagaatctccgctttataaaaggttggaaagtgatatcagacgctttttaaagcatattgattaatacttatctgttggttttcgatatagctttagcgataaagtgatcgatagaatactttccgggcccggctatgtacatcagaacaaataccacaagatagataaatgccagttctttgacagagaacgggtcattgccgtgaattacaaaaaatgccatgcccattgtgaaaatcataggaatcatagcaagacggtaaaggaatccgaagataaaagccagtgaacaggccagttcgccaaaaatggccaaaatgagagacatttggcttcctactcccaaaggatccgggaaactttcactcatggcatcgaagtttgcccatttttgtactccgtgagacattaataatataccgaataaaatgcgtaatgccaataatagtaatgacatggctgtgctgtccggttttgagggaaataagaatttataaataacaggcataaattaggcttttaaagtttatactatttatctataaaaacgtaaaaaacgaataattgttcattttattcttcggctgtctctttagggatggttatttcattgccgtctcttgtggcaatatagtgaggagacataatctcaatgcctgccttattgaagtaatcctgtatgttttggtgtagaacagaataaatggcggccattttgtctgcatcttttatataggcattaacctgataaaccggataccaatcacttaatgatgttttcagtacaaatggttccggatcggcctgtatttccggagtggccaaagtagcatcaataagtaactgatgtactttcctccaaggtgcatcatagccgatggttacttccgaatgaatgattagtccgtatgttcttgccgatttcgatgtacggattcgggttacgaaagccgttttttttcaccacatttcctgttgtctcgttcaacttgatacggtctcccagtttgaaggccttatataagtagtgataaagccttcaatgaaattaccgatgacagtactcgaaccgagtgagataatcaggccgacaaatacggaaatcccttggaacacaccggaatcagcccccggcaggtatggataaatcatgactatcataaaagcgtagagcaagaaccgtattatggaaagtcggcatggtccagtcggagtagaaaccgtttattttcagtctctcagagtcaatctccgttgccagataacgcaaaccttttatcacatacctgatggttctttgatgaaatgttttcactatatctgctgtttgtatatatttccgtcctaatcaatcaagcaatggaatcagttcctctgctttttcgatgatgtgtgcgggatgaagagcttcaagttctgttcgcggtctgaatccccaagccactcccacggcagtgactccggcattgtgtgccgtttgcatatcgacattggaatctcctacatacagcacttcttctttggtgactccggctgtggcaatgatatcatttacaatagaagggtccggcttggcaggtattccttccctttgtcccaatacttccacaaaatttatttcggggaaatagtgtgcaatcagtttccgtgtagcagcttgatatttgttggacgccacagctatttttcttccgtctttttgtaaagccagcaatagtgctgctatacccggatagggacgactaaaatccgcgttatgtttatcgtaataagggacaaactgagaacggatttttaaaatattttcttcgcttctttcgttttcgggcaatgctcgttcaaacagtttgttgattccgtttcctacaaagaaacggtaggcatccgtgtcatgaatgggatagccatagtactgtaaagcttggttggtagcggcagccaaatcagctattgtattcagcaatgtgccgtctaaatcaaatatcacaagtttcttcatatttgtatttcttttaaaggataaatataaaaagcccccgttaaaggacgagggcagcctaaatgttttcacaacggaataatccttattgtgatttgcttcaaattagtattgcaaaactatgaaataaatatgtaaagaacaagtgattatcagaataatttgataactttgaaaagttttgataaaaatattggattatgaaaaatatactaggacttgatttgggtaccaatagcataggttgggcagtagtaaatggaagtgtcaatgacaatggaagtgaacaagtggttaaaatacaagcttctggaagtcgtatcatacctatggacgcagctatgataggagattttaataaaggtaattctatatctcaaactgccgaaagaaccagattgcgtggaattcgtcgtttaagcgaacgatatctgcttcgtagagaacggttgcatagaattcttgatattttaggatttttgccttctcattttgctcaagatttagataggcatggtaaaatagttaagggtaaggaacctaaattggcttggcgtaagaatgaagcaggtcagtttgaatttatattccaagattcatttaaggaaatgctggaggattttaagctaaatcatccgaatctgataacagatgataaaaaagtaccttatgattggactatctactatctccgtaaaaagggattgacttctaaaatttcaaaagaagaattggcgtggatattattgaattttaatcaaaagcgtggatattatcaattacgtggtgaggaagaggaggaaaataataataaattggttgaattctatgctcttaaagtggttgcagtagaagattccggagaaaaaaagggaaaggatatttggtataatgtgcatttggaaaatggatgggtgtatcgaagaacaagtaatatacctcttgattgggttggaaaaactaaagaattcattgtaactacggatttagagaaggacggaactccgaaaaaagatagggaagggaatgtaaaacgctcttttcgtgctcctaaggaagatgattggtcattggtcaagaagaaaacagaagcggatattgatcagactcataagactgtaggtacctatatttatgatacgcttttaggaaatcctagtcagaaaattcgtggaagattggtgagaaccattgagcgtaaatattataaggaagagttgaaactgattttggataaacagaaggaattccatccggaattgcaagatagagcattgtatgctgcttgtgttgaagaactatatacaataaatgaagcacatcggaataatattggtaatcgggattttacttatttgtttttagaggatatactcttttatcagcgtcctcttaaaagcaaaaaatcattaatagacaattgcccttatgaggagaatcattgccttgataaggaaacaggagagataaaatcttttcctgtaaaatgtattgctaaatcacatccgttatttcaagaatttcgtttgtggcaatttatagtaaatctgcgtatttataggaaaggcttggcacaagatgtggatgttacaaatgagttattgaagactgaagaagattatgttgctttatttgactggttgaatggtaaaaaagaaattgatcaaaaggcttttctgaaatatccgctttttggactgaaaaaagaggtagagaattatcgttggaattatgtacaagataaaccttatccatgtaatgaaacccgttcatcgatgttggcgcgtctggagaaatgtgatatttctattgaattcctgacaaaagagaatgaggaagctttatggcatatattatattcggttgaagataagaatgaaatagtaaaagctttgcagaaatttgcggataaacacgacctgaatgcttcttttgttgatgtattccggaaattcccaccttttaaaaaagaatatggttcctattcggcaaaagcaattaaaaaattattgcctttaatgcgtatgggaaaatattggagtgagaattcaatagataaaggaacgcgtgaacggattgataagataataacaggagaatatgatgagaaaatagaaaatagagtgagggagaaagcaattcatcttgttgatgtttctgatttcagaggtttgcctctttggttagtgtgttacattgtttatggtcgtcactctgaatcaaaagaaatggtactgatatacatatctacactggaaaatcatagaaaggctggagtcgggaaatccccgaaccagtcttttctatttatttaacgtttcttccctgcatcccactcaatcacaatccactcccaagacataaacggactatccgatttttacgttttaagttcagtatcaatcattaaaaatactgaatatgaaattagacgaaaacattttgaaaacctgtcaaggacttgttatgaactgtaattgtaaggttcttatccttgatgtattgggtgaacatcgtgtattccttgtgaatgatgtacacctaaagacacg

SEQ ID NO: 752 - DNA, 8695 bp, synthetic construct
  source 1..8695: mol_type = other DNA
  misc_feature 1..8695: note = Synthetic
atgtaagaagaaaaaatcacaaacaaaaaaaacacataatcacaatgacaaaaaatgaaattattactttcgtagtgaagaaatttgatgagatgtcaaaaacacaatcagaacttcttattagtgtttttacctacttaaaccctgagttagaaacagttattcacaacagacacgacttggcttgtcatttagctgacaaatggtatactgataatattactaaggaagaagttgaagctgaatgggataaattttatgactattacgatgatgtcgatgggttgttccatgaagatgaaaatggttacctgatttaatgtttgtcataggacaatgatacaaatttggaagccattttcgattgcccaaaaagaaaacgacttcacaaacacaatgtgctgtaaagccgctttaaatgttttcacaacggaataatccttattgtgaattgctttcaaatttgcgatgcaaagttaacattttctctttttatctgcaaattttacaagaaaaataattatatttgcgcaaaatatcttatttttcaatcatcaactttttgctcatgaaaaagaaaaatatattaggattggatttaggaacgaacagcattggttgggcatggcttcaacaagatgacacagaacaaaccattcagacagaatatttgttgcaaaacaatcctacgattcgtatgtcgggtagtcgaattattcctacctctggcgatgtgattaatgattttgaagcaggaaaggccgtctctaagaccaaagaccgaaccaccttccgcatgacacgtcgcatgaacgaacgttttaaattgcgtcgtgaacgtttgaatagggtgctacgcatattgggtatgttgcctgcacattatgcacaacacgtagaccgctatggaaaacccgatgaagaaaaacaacccaaaatagcttgggaagtagcgcctgatggcaagtctaattttttgtttcaccaatcatttcttgagatggtgaaactctttggtgtacatcaacctcaactccaacgtattccattagattggactctttactatttgcgtcacaaggcacttacgcaacccattagcaaggctgaattggcgtggattttacatagtttcaatcaaaaaagaggctacaatcaaacacgtgatgaactgaccgaggttaacgaaaaagaaaagctagagtacaccaattcgaaagtggttagtgtgaaacttatagaacagaaaaagtcacctctgtacttggttacatttgaaaatggggtagctgttgaaactagtaaagtggatgcgccacaatgggtgggacaaatgcgttatgccataataaccactaaacttaacgatcttgggcagcccttgcacaagaaagatggcagcatagaccaaaaagttagtttacctaatgacgatgattgggcactcaataaactgcgcactgaaacacagatagatcaaagtcacaccaccgtgggaaactacatttttcaaacacttttaaaaaatcccgaaacaaagattaagggcgcacatgtttgtactatcgaccgaagattttatgaagatgaactcaatgctattttattaaaacaagccgagttccatcctgaacttacaaatcgtaatctttatgaagcatgtttaatggcactttatgcaaacaatgaggcgcatcgttataaccttgctacccagaatacgtgcaacttaataaccaaagatataattttttatcaacgacccttaaaaagtaaaaaatcgcttattgctgaatgccccttcgagaaacgaattttctgtgatgttgaaggaaatgtgcaaatgcaaggcattaagtgtataccggtgtcacatccacattttcaggagtatcgcctttggcaattccttaataatttacgcattttccaacgcgaagtagtagaggacggaaagttcactatgaacgtagacgtgactgacaaatatatcaacgaaaacagtctgacactgctttttgagtggttgcaagataaggttaccattaaacaaaaggaactacttgccaagttacgtttaaaagagtctgattttcgttggaattatgttgaggataaggcatacccttgcggcgaaacacgtcatgtattggcaagtagactgaaaaagttgaaaggtataacaaacgattttcttgcacagccttcgctcaacggtaaagcaactgtggagtgtgaactttggcacattctttactctgtaaccaaccttgcagaattgcgcaaagctctttatacatttgcacgaaaacacaattttagtgtagtcgatgctgaagcatttgtaaaggtctttatagcatgtcctccatttaaaaaagactatggagcttatagcgacaaagctatttgcaaactgctttctgtaatgcgtgtggggaaatattggagtgctgaaaatatagattcaaccacgcttttgcgcatagaacacttaataacaggcgaggaggatgaacatattaacgagcgaacacgaaaacacataacagaaaaaggccttcaacaatcagtaaatcagtatcaaggtcttcagcaatggttagcttgttatgtggtttatggcagacatgctgaggttgccgagattgtgcgttgggagtcgcctactgaattagaacaatacattaataactttaagcagtatagtttacgcaatccaattgtagagcaagtctctcttgaaaccttgcgcgtggttcgagatttatggcaaactgtggctaaagagggtggacgcatcgatgaaattcacttagaaatgggtcgtgaccttaaaaactcagctgcagagcgagcaaaaataagtaatcgcaataagcaaaacgaaggaacaaacttccgcattaaactcttgttgcaagaatttagtcagtacgaaaaagacatagagggtatccgtccttattctccttcacaacaagaattgctgcgtatttatgaggagggggtatgcgaacaaacagagatgcccaaggatattgcaaaaattcgacgtgaattgtcatcatcatcatcagaaaaagacgtgaagcgcagcgatatacagcgctatcgtttgtggcttgatcaaaagtattgttcgccctacacggggcaacctatcccgttagcgcgattgttcactaccgattacgagatagaacacgttataccacgttctaagtactttgatgattcatataacaacaaagtgatatgcgaggctgctgttaacaaagcaaagagcaatcgtttaggcatggcatttattcaagaatcgggtggacagattattccgctcggaaatggtagaaatgtgcaagtgcttaacgaaagtgcttacgtggagtttattaacaaaacatttaagcacaatgcgcgtaagcgtagccttatgcttgccgacgaaattacagaagagttctgtaatcgtcagctcaccgatacacgctacatagctcgttttatgatgggcgtattgtcgaatattgtgcgtcagaatgataatggcgtgttagagtctgaagccatttcgaagaatcttattgtttgtaatggcaagataaccaatcgtgtgaaacaagattggggacttaacgatgtgtggaaccacattgtaactccgcgtttcaagcgtttaaaccaaataacaaattctagcgattttggcgagtggtgtaacaaagaaggtaagcgttattttcaaacacgtataccacttgaactgcaaaagggggtcaataaaaagcgtatagaccatcgtcatcatgctatggatgctatagccattgcatgtactacgcgtagtttggttaattatttaaacaatcagtcggctcacaccaaagcacgcgaagactatcgccagcgactttgtcgtactgatggtcatgggcaaaccaagcgcttattgcgtgcgccatggaaggattttgcaaaagatgccgagtctgcgttgcaacaaattgttgtcagttttaagcagaatacacgcattctcacccatgctactaacagctacgaatgttttgatgcgaaagctggcaaaaaaattataaagcgccaaattagtcaaaaccactatgccatacgtaaacctttgcacaaggacacagtctatggcgaagtagtgttgccaagcattaaacttatttctttgaataaagctttgagtaatcctcgtcgcattatcgataaacagttgcgttcaaaaattcttgaactccaacagcgagacaaactcacaaaaaaacaagtttgtgacttctttaaaaagacttgtgcaaatagcacagagtggcgcaattatgattttgctaaagttgctgttcgtgtttggtctaacgatgaagaaggcagtcgtatggtttcagtacgcaaagctatcgatgaatcgtttgatatgaaacaaatagagaaagtttatgacccaatagtccgaaacatacttacgcgccatctaaaggcatgtaatggtgatagcaaaatagccttctcccctcaaggtgtggaagaaatgaaccaacatatagccgaactcaacaatgggaatgctcatttacccatatataaggtaaagctaggtgagtctaagggagaaaaattcgctattggtcaaaaaggttgtaaggcgactaaatttgtagttacggcaaaagacactaatttgttttttgctgtatatgcaaatgaagaaggaaaacgtagttatcagtctgtagacttgcgcactgcaattgaacttaagaaacaaggttgtcccgtagcacctgaaacgaatgaaaaaggcgacaaacttttgttcatactttcgcccaatagtttggtgtatatgcctacagaagaagaaatggagcgtggaaacattgatgttcaaaacttgaacttgaatcaaatattcaagatggtgtcatccacaggcaatgaatgctatttcgtcccaaatacattatctcaagttatattcccaaataaggaatacgaatcgatgaataaagtcggtactgttaaagagtgggatggatatagtattagtgaatcaaaaaacaataagaagtttttgagcattaaagcttgttgtatccctctctgcatagaccgtttgggcagaatacagcttaaaaagtaacagccattaaaactaaagtaaaaagactgcaactaaaaagatttgatttgaatcggtgagttgcagccttttttcttaaagatgttttattcgtattttagaatgctttttttacagagattgtttaatgttccataatccaaaaaactctatataatatgataaagaaaaccctttattttggtaatccagcctatctgagtttgcgtaaacaacaactcgttataagaatgcctgaggtagaaaactccacaactgtggccgacatcgttcgagaagaatctgttgtaagcaaacctattgaagatataggtgtggtagtccttgatcatcgtcaaatcacaataacgcaaggattactcgaagctctgcttgaaaacaatgtggcagtagtaacttgtgacacacgcagtttgcctgttgggttgtttctacctctttatggaaacactacacaaaacgaaaaatttcgtttacaactcgatgcctcattacctttgcgcaaacaactgtggcaacaaaccattcgtgcaaaaatagaaaatcaagcttctgtactcaaactttatactcagagcgaaatacgttgtatgcttgcttgggcgaatgatgtgcgtagtggtgatcctgacaacctagaagcgcgtgcggctgtgtattattggaaaaatatttttagtgaaaaacacccgaatttcgttcgagaacgtgagggagaagctcctaacaatctgctaaattatggctatgctattcttcgtgcagttgtagcacgcgcattggtgtgtagtggtttgctccccactttgggcatacaccaccacaatcgttacaatgcttattgtttagctgacgatataatggagccttatcgtccttatgttgataaactcgtgttagacattgtgcatagtaatatagactatagcaccttaactcgcgaacttaaagcacagcttctgagcattcctacacttgatgttgtgataaatggtaaacgtagtccattaatgattgcagtaagcaccactacagcttcgttagctaagtgttttggtggagagatgcgacgaattgcttatcctcttttatcacccgactgattatgaaacgtttaagtgaatacagagttatgtgggtaatggtattttttgatttgccaaccgaaacgaagaaggataggaaggagtttgctgcttttcgtaagtttttacaagaagatggttttaccatgtttcagttttctatatatgtgcgcaattgtgctagtagcgaaaatgcaacagtacatgagcgtcgtgtaaaatctcacttaccaccacatggaaaagttggcattctatgtataacagataaacagtttggcaatatggaaatattttttggtgaagctccgcaaaaaccgaaagccgaaggagctcaattagagttgttctaatataaaaagtaaaagaggtagctttatacaaatcattaacgattggtaatgctacctctttttttgacaaacttttttcatcctatttactgtcgttgtttattgattatcaacagattcaaccaatcgagttgtttgtcataggacaaagatacaaatttgaaagcaattcacaactacgtacctctactgctgtgtagcgtctgccgttgtttgtcataggacaaagatacaaatttgaaagcaattcacaacagttatatctttgcaacgcaattaagaaagttgtttgtcataggacaaagatacaaatttgaaagcaattcacaacatgacaatttatgtaataatactcaaaaagttgtttgtcataggacaaagatacaaatttgaaagcaattcacaacgcaatattgattccggtaatatttcaagtgttgtttgtcataggacaaagatacaaatttgaaagcaattcacaacggtttctcctcagatactaaatagcatatgttgtttgtcataggacaaagatacaaatttgaaagcaattcacaacaagattttactgttccctctaatttgcctgttgtttgtcataggacaaagatacaaatttgaaagcaattcacaacaaaatggcttctctatttgcgccccatgaagttgtttgtcataggacaaagatacaaatttgaaagcaattcacaacaagaaacaaggtatttcatataaaggaacagttgtttgtcataggacaaatccgtagaatgcctatttacgactgcctcaaaacgccgtatacgcatcccgacgcatcccttacacacaaaaaaaaggagctgttagaactattacgttttgcaactcccccagcatcaagttccttatttagaggttgtgctgtgttttaccgatattatagcctatttagacttgtgcgtaagaaattaatgaacctcgatggcatgagccactttagcttcttccttgctgaccttgggcaattcgatgtgaagaatgccatgcttaacttcggcattgatctgcgttttgtctacatcgtcaggaagcacaagggtttgttcgtatttagcgtaggcaaactcacgacgcaaatactttttgtctttttcttcgctcttatctttcttctccatgttgataaccaaatcaccattctggtcgagatggatgttgaaatcgtctttggtcatgccaggagctgctacttctacgtggtaacgcttgtcatcttcggctacgttgatagaaggtgcggtggcatttacacgaggcatatagttgttatcgaagaaatcgttgaatacattgggtaaccaatcttgtgaatagcgtgtcataatgttttatgtttttatttgttattataatgttagggtgtccgctgcgctgctctcgcaaccgcgaacaccctacattacgcaatgtgtatgccaacacgctataaaggtattttctgacaatatggcttgcctttttgacacttttaggataaatgtggacgatttgacagcagtttgggtttaacgtgcctatacgtcttgctcgagcgtgtggaggaggttttgacaagcatcctcgagcaattctatgactagttcaaaatcgcgctctgtgccgtaataggggtcggggatgctattgtgcgcaggatggtgttgtaagtagtctgccatctttacaacgatactctcgtctactccctcggtgtatgccattcgctgtaatttgtcgtagttgcgattgtccatagctactataagattgaacttatgaaaatcttcgggaaggatgggacgtgaacgatgggtgagttcgtaaccatgcttacgcgcatgggctcgcattcggttatcaggaagttcgccttcatgatagtctattatgcctgctgaatcgacagtgtaacgctgctttaaatcggactgctcggctgccaatgtgcggaatatttcttcggcggtacatgaacgacagatgttgccaagacatataaagagtattttcataataagtaagtattaagtgttaagtattaagtaataagtattacaaactattag

SEQ ID NO: 753 - DNA, 8675 bp, synthetic construct
  source 1..8675: mol_type = other DNA
  misc_feature 1..8675: note = Synthetic
taagcctgtagctagcgttcatcctgagccaggatcaaactcttcattgtaatataatgtttttgttttctctgtttatatgctcaagactacctgttatttattagagtaattgacggtttgttttaaacctttgttacttgcatgccctgtgttcagtgcagtgcaagtcccttgtacttctctacaaaatagttttatgtaatttctttcaaagaactctttgctgtcgcggtggtgagtggtgtaccgctcgtcccgtttagcgagtgcaaaattacggactttttcctttcccaccaaatgttttcgcaattatttttcaagaaaaaattgcgcgaaaaggacaaggcgctaaaagacaacgctttgcgccctgaaaaaaatttcgacatttttcaatcgacaacacggcaaaggtaggaaacgctaagaatatggcaaaaatatattttggaatttgttgggttttatgccgaagaacatggtttcggaaggaggaaccaaaaacataattaagagcatttcgcggccaaacagtgtttgttggagtatcaagaatgagcggattctcacaatatgaccaacagtatctttgcgctttatgcaaatgtaaagaatatctatgggggggggctattaaaacaaggtccgctctaattatgatttgaacgatagctttttcatatataatgaataaacaataggactgccccaacaagacatgcgccattctgcaacaacgttccgaagtcccctgtataaaaacgaagtgacttcgtgaatattcacgaagccactcgaaatgttttcacaacggaataatccttattgcgaattgctttcaattagcaagggcaaagtaaacaaatatttttcagaaagcaaagccttttcacaagaaattcactacatttgtaaatgtttctatacagagggctgttttagaataccaggtaggcctgtacaacaactcatttttaaaaaaactaccaggtgttatggattactgacacataagcaactatgtattttgtattcctcacaccatgtagccgccaacagtacataccccttcaaaactggccataataggacaccccttaaccgattcaccacacataaaacacaaccatataatatcatgacgaagaacacaaggaacatcattggcttggacttaggaacaaatagtattggctggagctggattcaacagctaatatcacctaccccaacgcaaccttcagaatatctttttaacggaactcctattattaggatgtctggcagccgcatcattccgatgcctggagatgtcactggaagctttgagcgaggcgaaaccatctccaagaccaaagacagaacagctaagcgcatggctcgccgcatgaacgaacgctttcaattgaggcgtgaacgtttaaaccgcgtgctaaatattatgggctttctgcccgagcactatgcacgcgctcttgaccgctacggcaaattaaacgaagaaagcaacaccaccatcgcatggcgaagcaaagaagacgggaagaatgaattcatattctatccgtccttccttgaaatggcatctatttttaaggagcgccacccagatatccaacgcattcctttagactggaccttatattatctccgcagcaaagctctacaccaagccatcaccaaggaggaattgtcatgggtgttacatagtttcaatcagaaaaggggctactatcaatcacgcgaagacatcacagaggaagacaaaacgaaaaaggtcgagtacatcaaaggtgtcgtaaactccgttgaagacaccggggaaaaagcgaaaggcaaaaaaatatataaagtgaccttcgccgatggcactgagtttacaagcacaaagtccgaagcccccttatggattggacgcacacgggaaatcattgtaacaacatcgcttgacacctctggaaaaccaaaacttgacaaagaaggaaaaatcattcagagcgccaaaactcccgatgagaaggactggactctgataaagatccgcacagaggccaccatcgatgacagtaaactgacagtcggtgaatacatttttcacgccttgcttaaaaacccagagacaaaaataaaaggagcacacgtcagcaccatagaccgtcgcttttacatcaacgaaatcaacgccatattaaaagagcaagaaaaataccatgaagaactaagagacaagtccctctacgagcagtgtacccaagcactatatgcacaaaacgaagtaaggcgcaacatcatcgccccatggagcatgtctgacctgctcattaaagacatattgttctaccatagaccccttaaaagcaagaagtctcaaatttcagaatgcccattggagttccattgctatacggacaaagatggggaaacacatcggcaaggcatcaaatgtattccagtatcgcatccgctttttcaagaataccgcatttggcaattcatatccaacctgcgcatatatgagcgtgagcactttgacaacggcaagcattttaccaatgtggacaaaacctcggaatttctaacgagcgaaaagaaagaagaattgtatgaatggctggcggagaaagattccgtgagccagaagaccttgcttggcaaaatcggactaaaggttgaagattatcactggaatttccctgaagagaaaacctatccctgtggcgaaaccagacatctgattcagagcaggctgaagaaagccaatcttcagaaagccttccattccctgatttctgatgagcaaaaagattgtttcgaacggggtttatggcatatcctctattctgtcagtgactataacgagctgtgcaaggctttaaaaacttttgcaagaaaaacaggattcacgctcgaagaacaacttctctttgttgaagcattttcatcctgccctcccttcaaaaaagactacggagcctacagcaaaagagccatcaccaaattattgcctttgatgcgcatcggaaaattttggcacgaagaatccatcgattccacaacaaagaaccgcattgaacatctcatctctggagaggaatgcagcagcatcgacgtccgcgtacgtgaaaaagtcgccaaagccgggctctgcgaatccattgaacaatatcaaggtctccaacaatggctcgcaaactatgtcgtttacaaccgacattcagaagcatctgaaatcaccaaatgggaatctcctgacgaattagacaattacatcaggtccttcaagcaatattctctacgcaatccaatcgttgagcaggtttctcttgaaacgctgcgcgtggtgcgtgacctatgggctgaacttcaaaaagaaggtcaaacgattgacgaaatccatttggaaatggggcgcgaccttaaaaacacagccgaggaacggtccaggatttttagaagaaacagcgagaacgaagataccaatttccgcatcaagcttctgttggaagagttttacgcaaacgaaaaagacataaaagacgtgcgcccctattctccctcccaacaagagctcctgcgcatctacgaagagggcgtttggcaacaagaaaaagatattcctcaagacatcaaggacatcaagaagcgaatctctaacgacaaggacattaaagacatcacgcccaacgacatacaacgctacagaatctggatggaccagaagtattgttctccatacacaggcaaaacgataccattgtcccgtcttttcaccaccgactacgaaatcgaacacgtcattccgcgttcacggtattttgacgactcctataataataaggtcatctgcgaagctgccgtcaacaaagacaaaaacaaccgactgggcatggaatacatcatggctgctggaggaaaaacgattgaactcagcaacgggaaaaacgttcaaattctgaaggaagaagaatacgttgaactgattgacaaaatctttggcaacaacacgcgcaagcgcaacatcatgctggcagacgaaatcacagaagagttcagccatcgccagttgaacgacacacgctacattgcgcgcttcatgaaaggcatcctgtcgaacatcgtgcgcgagaagaatgccgacggaacattggaaccagaggaaacctagaagaatctgattgtttgttcaggccgaatcaccgaccgcgtcaagcaagactggggactgaacgacatttggaaccatatcatcacgccgcgatttgaacgactgaacaaaaagacctcatccaacgattttggagaatacgtttgcaaagatggcaaacgttatttccaaacgcgggtgcccctcaatctgcaaaagggcttcaacaaaaagcgcatcgaccatcgccaccacgccatggatgccattgccatagcctgcgtcaatcgcagcatcgtcaactacctcaacaatgccgccgccaaccaaaccgaacgcgaagaccttcgccgtgccgtgtgcattccagaaagaaacggacaaaccaaacgccaactccgttcaccatggcattgttttgcaagggacacagaaaacgccctgcggcaaatcgttgttagtttcaagcagaatctgcgcgtcgccaccaaagccacaaacagttacgaatgttttgacaccgcttctggcaaaaaaatccgaaaacaccagagcaaccgtgaacactacgccattcgaaaaccgttacacaaagattccgtctacggcgaagtcatcctgccaagcatcgcctccgtcaatctaaaaaaggccctgctgaaagctgacaggattttagacaaacgcctgaaggacaaaatctttgaattgcgcaagctctacaactatagcaacaaacaaatagaggagcatctgacaaaggtgtgcatcaattgtctggaatggaagaactacgatttcaaaaaaattgccgtccgcattctttccaacgatgcagatgccacacacattgttgccatacgaaagccgcttgacgaaacatttgataaggaaaaaatcaagacaatcacggacactggcatccaaaagattctgctcaaccacttaagccgatacgccgatgacccgaagaaggctttttcgccggaaggtatcgaagacatgaatgccaacatcgcatcgctgaacggcggaaagcaacatctgcctatatataaggtgagggtctctgaaaaagacaacggcggatatttccccatagggcaaaaaggcaatcgctcaaaaaagtatgtcacaacagccaaagacaccaacctgttttttgctgtatacgtagacagtaatggcaagcgcagtttcaagaccattgatttgcgcacggccatcgaatgccgaaaacaaggattgtccgttgcccccagcgtgaacgagaaaggagacaaactgcttttcacgctctctcccaacgaccttgtatatatgccgtcggaagaggaagaggttaacggatttgccatcgacaataatctcaacaaagaccaaatctataagatggtaagtgccaacaacaaacaatgctttttcattccccacacagtggcagacttcatatccagaggcgaagaatacaatagtcataacaaaattgagctcacagaagacagacgtagcatcaaagagcattgcgttcctctgaaagttaaccgcctgggtaaataaaacatactaaaggatctggcaacaagactgcaattgtaattcaaaacagatgattacaattgcagtcttatgctttttaaaaccttacgaccatgataaagaaaactctctattttggaaatcctgcctatctgagcctacgcaacaaacaattggtcatcaaaatgcccgcagtggagaggtccaaaaatgttgcagacattatccgggcggaatcaatcatcacaaagcccatagaagacctgggcgttgtggtgctcgaccatcagcaaataaccatcacgcaaggcctgttggaagcgctgcttgaaaacaatgtcgccctgatcacgtgcaactcccaaagcatgcctgtcggcctgcaactgcccctctacggcaacaccattcagaacgaacggtttcggtcgcaactcgatgcctccaagccgctgcaaaaacagctgtggcagcaaacgatgaaagcaaaaatagaaaaccaagcctgcgttcttagaaataacacggaaaccgaaacacgatgcatgtttgtctgggccgaatccttgaagagcggagaccccaccaacttggaagcacgagcggccgtttattattggaaaaaccttttcctcaaggaatgcgccggcttcatccgcgaacgggaaggcatgcctcccaacagtcttctcaactatggctatgccatcctgcgtgccgtcattgcacgctcactcgtttgcagcggcttgttacccactttaggcatacaccaccacaaccgatataacgcctattgcctggcagacgacattatggagccatatcgtccctacgttgacgaactgatattgaaaatcatacggagtaacaccgactacaaagaattgacaacggctttgaaagcccaattgctaagcatcccaacattggatgtcaatatcaacgacaaacgcagcccgctcatgatcgctgcaacaacgaccaccgcctctttggtaaaatgtttcagcggcgaaatacgcaaaattgcctatccgtcaatgtctacgagttgattatgaaacgtttaaacgaatatagagttatgtggattttagtgttctttgatttgcccacagagacgaagaaagacataaaggaatatacaatattccgcaaattccttctggacgatgggtttacgatgtttcaattttcaatctacatacgtaactgcgccagcagcgagaatgccgcagtacacatcaaacgaataaaatcacgccttcctccacatgggaaagtgggaatattatgtataacagacaaacaattttcaaacatggaattattctttggcacgaaaacccaaaaagttcaagcggaaggggttcaactggaattattctaaaacaagaaagaggtagaaccgagaaaagcctttaccatttctcattctacctcttctatgacaaactttttctttttctatttgtcactataacgcattgatttcctttacataagacgaatcaagctgtttgccataggacaaaattactaatttgaaagcaattcacaacaataatcattaaggactattcttgcttctggctgtttgccataggacaaaattactaatttgaaagcaattcacaaccttctattacaagagactgaaacaacaaaagctgtttgccataggacaaaattactaatttgaaagcaattcacaacccagtgaggtttttatacgtaccgctccggctgtttgccataggacaaaattactaatttgaaagcaattcacaacaagtttgagctacagcaaagaattgaatcgctgtttgccataggacaaaattactaatttgaaagcaattcacaaccgcctccagcaattcatagttttgcataacgctgtttgccataggacaaaattactaatttgaaagcaattcacaacgtatgcccactaatatatccgtcttctatggctgtttgccataggacacgcttgcccattcggaagccggtactcaagattcacatactttcccacaagggcattcagtttttccacctttggcattccgtcaacattcaattcgttaatttcattgattaactttttcttgaattcttcaaactgaccgttatcactaagctcatcatatttcttccagtaatccaaagtaggaagcagctctttcatataagaacgggcttgttcctccgtgaaattctcgcttaccatattcttaacacaaacttcaatcaaatcgtccatatcattgtaagtatatgttccgtcggcataacaccacttacaatagtcctcgttgaaagaaccgtcgtgattgtgtccgataatatcatcatcttcaagcggcattccgcagcattgacaaataagctttctcggtgagcctaaaagtgtatttatggaaacatcgaatacttttgacagcaatttcaatgtttccgtattcggaactgtttctccgttttcccaacgtgaaactgcctgacgacttacaaaaactttttctgcaagctcatcctgcgacattcccttttgagtaccaagttcaagtataacctgttttgtattcattatgcagtatccccttacacctttattatagtctcacgcattatctcaaacaagcaactcgcagttgctgtccttattactcgcctttttcgttcacggctaaccaaatttcacaatgatagtttggggcggttgtattcacaaacggataaacttcaaactccacgccctaagcatattcatacttcgagctttgtgggaagattctgccgtttcttgacatcgtatgctttggagtgttacatttcctgttctttgtttcctttttcctgcataccctcatcggcttgtgcaatcatctgtctgtactgttctttcacactttccggtgcaagtatctgtaccttgccattaaagccaaacacccaaccaaaaaaggtcggactg

SEQ ID NO: 754 - DNA, 8159 bp, synthetic construct
  misc_feature 1..8159: note = Synthetic
  source 1..8159: mol_type = other DNA
ttgcgaatgggattttgggttggggacggagatattcttaaaaagtttttgataaaatagagatatataaaaaagaacgaggagcatgaatactcccccttccaaatgttttcacaacggaataatccttattgtgatttgctttcaaatttgtgttgacaaatatacatataatttttttatactattgtatttttcgataaatttttttatgtttacatattaaatataataataccataaaatatatagtaggcatgaaaaacattttgggattggatttaggctcgaatagtataggttgggctattgtaaaagcattgaaaaatgaagatggaaaggaaatcttacaaagcatagatcttgcaggaagtaggattattcctatggatcaagcaactttgggcaattttgaaaacggaaattctgtgtctcaaacaagagaaagaacaggttaccgaagtgctagaagattgagggaaaggtatttattgagaagagaaaggctgttaagagtgctgaattgtatgggatttttgccagaacattattctcaaaatattgataaatatggtaaattctttcttgataatgaggtaaaactttcatggaaaaaagataagatgggaaagaacgaatttatttttttagattcgtttaatgaaatgttggaagattttagacactcacaaccgcaattattgttagatggacgtaaagtgccttatgattggacaatttactatctccgtaaaaaagctttgactgagaagatctccaaagaagagctggcatggatactcttaaattttaatcaaaagcgaggctattttcaacttcgtggagaagatgaagaagttcagggtaaaaaaatagaattttatgccttgaaagttgttcgagtggaagacacaggagagaaaaagggaaaggacacatggtataatgtgtatttagagagtggtttgggagatacggatgattattgggtatatcgtagggctagcagtgttcccattgatgagtgggaagggcaagttaaagagtttatcgtaacgacaactctcgataataacgggagtcctcagattgataaagaaggaaaggtgaagcgttcttttagtatcccgaaaccagaagattggatgttagtcaaaaagaagacagaagtagatattaaatcatctggtaaaacagtggggacttatatttatgatacgttattacaaaagccagatcaaaaaattaaaggaaaattaattcgaaccatagaacgagaaaactatacaaacgagttatctctaattttggaaaatcaaaaaaaattccatcttgaattacaagatagggaattatatcatcaatgtatagaattgctttattataaaaatgaggcacataaaagagttattggaacttgggattttacttcgttattcataaaagacatattgttttatcaacgaccattgaaaagcaaaaaggctttgattgataattgcccgtatgaagaatccttttatatagaaaatggggagaaaaaaagtaaaccaaggaaatgtattgcaaaatcccatcctctgttccaagaatttcggatatggcagtttatttccaatttaaggatttatcaaaaagtgaaagaggtggacggcaaattgcagtttaacgttgatgtaacaagtgattttttgagagatgaaagcgcttatgtggaattgttcaaatggcttaatgaacgggcatgcaccatgacccagacggtcttgttgttgccgttgaagtagcccaccatgctgaacagcaccgctgtgacgatcgcctcaggcgcaaaaccgcgcagataggcgaaggcattcacaatgacggcggcatctgtagtgaagatgccggacagcaggtcgccctcgaaccacaccagcgcaaacaccgcacagccgaagaccagaccgatggcaatgccggtgaacagagtctgcctggcccgctttttgttgccggcgccgacattctgagagacgaaagaggccatcgactgcatcagagagctggggatgagcatggcgaagttgacgatcttgcaggccacgccgtagccggaggacgcttccagacccagacggttgacgaaggcgcagagcgccagaaaggaaacctgcgtcagaaactcctgcaaagccagcggcaggccaatgtccaggaacttgcggcactggaggttgagacggaaatcagtctttttgagctggaaaggcagatgtttcctccttaatgctttagccgaatccggggagagggattcgccccggtcgttcggttttgtcgtacaagcattcgcagcgggccagctccgtgcagttcgttgtctgacaacaaccttgctgaaataaatgtaccgatttttgcatcaaaagaaccatttttggcgtattttatagttttcttgttcataattatgtcatttccacgaaaaacaaactgccccttgcagtctattttccggtgttgtatactgaaatcggagcatggatttacagaaaaaattacaagtctctttcaaaagcaacgatttttcgcttatttttaatcgtttgcaatctattaagttgtccgacaatgccatcgcaggccccaaaagcgtctgcatcccgtgcaaaaggcaacgatcggcggcgctccggccgccgaaaaaagggcggacggcctgcagttttcagccgtccgaaccagaaagcgtgcaatttttgttcagatatcggaacactttcgtcgttttcccgacctggtccgaatgcctctcagaggccttatatataaggaaaggaagtgagtcccatgccttccggagattcccaccgttcactggcacgcgcgctggatattctggagctgtgcagcctgaacggcagcggttacaccctgacccagctgtcgcagcatctgggcattgccaaaggcagcatctccccgctgctgcacaccctgctggcccgcggctacctgaccctggacgaccaggatcatcactaccgcatcggccgcatggcgttccgcattggaaacacctatctggaagaagccagcgccttgcgggagatctaccgcctgatgcacgacatcgtgtcggtctgccacgagacatgccacctcggcagcctgaaaaacggggatgtctattacctcaaaaaggtggagaccccgctgcgcagccgtaccgtcacggtggagggccgcagcctgccggcctacgccaccggcgtgggcaaggctctgctggccgactaccagctgccccagctcaaggccctgtattacgacggcctgtacccgctgaccgagcacaccatcaccgactttcgcctcctggccgaccagctggccgagatccgggccagcggctttgcctacgagtgtgaggagagcacccggggcatccgctgcatcggcgtgccgctgcgcaaaagcggcaaagtggtggccgcgctgagcgttgccttcccgctggagcgctacaacgacgctgccgccgccagcgcccggcaggcgctggacgaagcccggcgtcagatcgagcggctcctgtgctgcgtggaactgcaattctgaaaccctgtagaaaaaggagtgttatttatgcctcagttgatcaccatcggcgagaccatggccgccttcaccccggacagcgtgggtgccctgcgctatgtgcagaacttcggcatccgcaccgccggtgccgagagcaatgtagccgtgggtctggcaaagctgggcctggaggccgcctgggtcagccgcctgggcaccgacgagtttggctgcttcatccgcaatcagctccgtgccgagggcgtggactgttcccgtgtcatctacgaccccgaccaccgcaccggcatcatgttcaaggagaccggcgtgggcgagaccaaagtgttctactaccgtgagaacagcgccgccagccacctgtgccccgaggacgtgacccccgccctgctggacggcgtgaaggtgctgcacatgagcggcatcacccccgtgctgagcgagagctgcctggccatgaccaaagccgcctttgctctggccaaggagaaaggcgtcgccatcagctttgaccccaacatccgccgcaagctgtggcgtgggcaggactacgcccccctgatccgggagctgaccctgcagagcgagatcgtgctgctgggcctggacgaggccgacgccctgttcggcctgcgcgacccggatgccatcttcgatcttctgttccgcgacggctgcgcacagtatgtggccatcaaggacggcggcaacggtgcctgggcggccgacaagaccacccgcgaaaagctgccgccctacccctgtaagcccattgagcccatcggcgccggtgacggcttcaatgccggcttcctggccggcatcctgcagggccgcgatgtggtcaccgcaggccgcatgggtgccatctgcggcgccctggccacccagaccccgggcgacgtggagggctaccccgacgccgcccagatggaagctgccctcaccggcgctgccatcacctaccgctgatccgctgaaaccatcggtttcattttttgccgaaaggagttttttgtatggacacttacgatctggtttccaagcatccgttgctggccatcctgcgcaacgttccgctggaaaagaccattgattacgccgaggccgccgtgcagggcggtgcccccttctttgaggtggcactgaatagcccccacgccctggagcagatcacaatgctgcgcacccatttcggggaccgttgcaccgtgggtgccggcaccgccatcaccgtggagcgctgcaaagccgctctggacgccggtgcacagttccttctgacccccggcactccgctggatgtgttcagctactgcgccgagaacgacatcgccctgctgcccggcgtgctgacccccaccgacgtggccaccagcctgcagttcggctacaagaccatgaagctattcccggccggcagcatgccccgccactacgtcaaggacctgcagggcccctttgacggcaccaactacatggccatcggcggcgtgagccccgccaacatccgcgagttctttgacgccggctgcatcagcgtgggcctggcctccagcctgatgcccaaggacgccgtggccgccaacgactgggaagtctgcgccgcctacgtccgcggcatggtggaccagatccagcgccgaatctgaacccattgaaaccttctgcaatacaagagaaaggatgatttcccatgaagatcgttgaagtcaacacctatactgtccgtccccgctggggctttgttgagatcgtgaccgacgagggcctgaccggctggggcgagcccgtgctggaaggccactgcgccaccgttctggcctgcgtgcaggagatgaagccctacctcatcggcaaggaccccatgcgcattgaggacttttccgctgtgctgtaccgcgccggtttctaccgcggcggcggcgtgctgatgagcgccattgccggcattgatcaggccctgtgggatatcaagggcaagttcttcaacgccccggtctaccagctcatgggcggtgcctgccgcgacaacatgcgcgtgtacagctggatcggcggcgaccgccccagcgacgtgggcgctgctgctctggagcgcaagaatgccggctttaccgccatcaagatgaacgccaccgaggagctgcagatgatcgacacctacgacaaggtggacgccgttctggagcgcgtggccgccatccgggagagctgcggcaagtatttcggcatcgccatcgacttccacggccgtgtgcacaagcccatggcaaaggtcctggccaagaagctggaagagttcgaccccatgttcatcgaggagccggtgctgtgcgagaacatggaggtgttcaaggagatcgccgctgcctgcaatgtgcccattgccaccggcgagcgtctgttcaccaagtatgacttcaagcgcctgctgcaggccggcggcgtggacatcatccagcccgacctgagccacgccggcggcctgaccgaggtcaagaagatcgcctccatggccgaagcctacgacgttgccctggctccccactgcccgctgggccccatcgctctggccagctgcctgaacgtggacgccacctgctacaacgccgtgatccaggagcagagcatcggcatccactacaacgtgggcaagagcgtgctggactatgtcaagaaccaggacgacttcaagttcgtagacggccgcgtgcagctgcccgtccgtcccggtctgggcgtggacgtcaacaaggaactggtgctggaggagaacaagaccccgcacgagtggaagaaccccgtctggcgtcacaaggacggcagcgttgccgagtggtaatgcatcccgccgcctgagttaacgcagaaaaacagcccgcatggcaggagcatcgtgctccgtcatgcgggctgtttgcgttcgatttactctttttcttccggttcttcgggcttggccagctccttgagctgcagcacccattccggcactttgggagcaaggggcggttcaccgctgcgggcgcggtgcatcttccggtacaggtcgcggttgtgggaaaggtgcagggtcatggcgtcccgggcccaggtgctgtcgccgcacttgatggcctccagcactgccttgtgggtgtccagggtctcctgcagcagggtgcggtgggtgccctcggtgaacacctccaccgacgccgtgatgatgggagccagctggggagccaccagattgccgctggcgcgggcaatggtccggtggaacttcatatcctcgttcagatagtcctgcccatgcaggatgtggtattccatgaggttgtacagcgattccatctcggcgatgtcctccggggtggcatggcgcgccgccagcgcggcaatggccggctcgatgatgttacgcacctccagcaggtcgaaggccagacgctccttgtcctcaatgaaatccagccccagcgggtcatccgccaggccgggctggtcggtcacaaaagagcccgcgccgtggcgcacggtcagaatgttctgtgactccagccgcttgatggcctcgcgcacggtactgcgtgccacacccatctcgcgggcaatcgctgtttcagtgggcagcttgtcgccgctcttcagtttttcttccagaatgtagtccttgatccgctgtgcaacctgttcggccagcggtcggctggaatcgcaccccgcagtctccataaaaacctcttcctttggtgttttgctctgttctaccctttattataccgaaaatttctggcagtgtaaagcaacgcggcatagaaattcgcgtttgcgcagcgaagcagagcaatgaaagccccgtttggcttttaaggacaccaaccgggcggcgaggtggaatcctccctttcgcttggctgcggccacggcagaccggaagagcaagccataacaaaaaatgcagtgcaggccgctggtgcgttgtggttgatgctgacgatgcacttggcgttctgcatgccgacctgatactgcacggagccggagatggcgacgttgatgatcatgttgggcttgacggcggtgccggactggccaatctgagcatcgtgcggcagaaatccgttgtcgaccaggggtcgggaggcggcaagctgaccgccgaggaggtctgcaagctccttgagaagcgcgagctctgactcgtcctttacgcctctgccgccggcaacgagaacgtctgcgtgatcgatgggtacgccggtaacgaccttcggctcgacattcagcacctcgtagcacacctccttgtcgaccgtgacgtgctccgtgatgacctcgcccttgcggctctcgtccggctccaggggcgtgaagatcttcggactaacggtcaccatctgcggccggcactcgaggatgacgatgtgcgcaaggatgctgccgccgtatgcgggcgtggtctgataaaacacgtcatcttcatcgtagccgaggtcgatggcgtcggcggtgaggccggtcttgagggagatcatcatgcgcggtgcaaaatcgcggccgag

SEQ ID NO: 755 - DNA, 8037 bp, synthetic construct
  variation 5032..5262: note = n is a, c, g, or t
  misc_feature 1..8037: note = Synthetic
  variation 1086..1140: note = n is a, c, g, or t
  source 1..8037: mol_type = other DNA
  variation 3083..3121: note = n is a, c, g, or t
tgtcttgcctaccttgctcacgctcaacattgatgctggcaaagccaccgtaccggtagacaacatttcggtcaagcagggtcaaacgacagatttgtttggcactagatccgaatctattccgcagcataggcacggatctacacttatcattaaatctcatgtcttcaaatcccgaaacgccaaggccggcaaaatattcatgtaaagaatcgagtatctcgttgtcgctgtatgtcaccttttcaggctctccttccattgcagctgcattttgctcagtcttccaatcctttaacagccaatataattcagtagccttgccgaaagcattctcaactgacggtatgtccacgtacgattcgggtaaaattattccgtcacatatcttgtaatgcgaaggtagagccttcctggttagaagtgtctgcctgatctgcgaggaattgagctgacctactgtcattgcaggtcttgtgagtatgcgacgattgaaataaagatatgtggtattccaataataggtgtacggatcacaaattcttgctgcctgtgggtttcgcaagatataggcaacttcagtcttgaacatttccgggccggttaccttcacgagtgtcggtttcagttcctgaaatggtgaagaacggcgtaaggtgttaactaaatgcttaccaacccgtgatttccattcattgtaaaaccttatgacctgattcctggtgccaaataggagaaaatgcgcatggttactcatcaaagtgaagcagtatatgacaactcctgtgctcaattgtgctatcggaatgctattcattccgaatttgtaatcgtcaaaagtcttgaaaatcaagttgttcgtcagctctcccgaacaaaggtgccagcatgatttctgaatgtcatccatatagtttgaagtttagacctatggattgccccatagacgattgcaaatctatctaaatttctgattatatgcaatgcgctaaggatgtaagcaagccctattcgtaaatatatgatactgaggagctaccaaaaacctcttgcttacgcctcccaaaaattgaggccgtgagcaannnnnnnnnnnnnnnnnnnnnnnnnnnnnnnnnnnnnnnnnnnnnnnnnnnnnnnagagggcactctccgttgtgtctttgaagtctttggccaggccgccggcgctggtctccttgtacagagaaggaaggtctttgcctgtctgcttcatcacttccacgacgtggtcgaacgacacgcggtgacggccgtcggaaaaagcagcgtaaaggttagcatccagcgccctggtcgcagcaaaggcatttcgctcgatgcaaggaatctgtaccagcccgcaaatcgggtcgcaggtcatgcctaaatggtgctccagagccatctcggcagcatattcaatctgagcaggagttccgccgaaaagctggcaggcagctgctgcagtcatcgcgcaggctaccccgacttctccctgacaacccacttcagcacctgaaatagaagcgttctgcttcacaacgttgccgactattccgcccgtcgctatggcatgcagaacctttatgtcactgaaattatgtcctttagccaggtggtaaagcacccctggcatcactccgctggatccgcaggtcggcgcagtgactatcgtcccgccagaagcgttttcctcgcttactgctagggcataggcatataccaatcctctggtctgaagcgtctgcttgtagcctgtggctttaatgtaatatgtcgctgccttacgagccaagttcaaaggtcctgggagccgcccctcgtggtttatcccattctccacggactgcttcatcgcaatccaaatctcctccagatagtcccaaatctccgaaccctcgcacaagtcgacatattcccaataattcctgccattgtcgtcgcaccagttcattatctgggagaggctgttcatatcgtaaacttctttcgtagagaaacggtcaggctcttttccttccgagagcgcgccaccgcctatgctgtagacggtccagtcatcgagcgtgtgtccctcccggttgaaagctttgaattccatgccgttagggtgatatggcaggaatatgccagccttccagactatttccactggagccgttggttccagcacctctttaatggcaatgtcggtcatgtggcccttaccggtcgccgccaagctgccatagagggtcacctcgaacttcgctgcatccctgtgcctttcgagaaaatctttcgccgccctctgcggccccatggtatggctgctcgacggccccttgccaatccgaaaaagttccttgagagatttcatgcgacaactgtcattttcttgcccaaactcgttcgatctggccgatgtacatcgtgtggagtttcatcctgctctcatcgccatacatgctgcggacagattccggcagcttctctttctcaaatgtatgggaatatattttcttgcattcaatcgtcatcactgcctccttgaatgatgggttgccttcattggtaaactctggcgtgagccccgcatccttcagcttgtcgccatcgcgaccagaatggcttccaatgtagagcagggctttccgtttgtcatttggaaaaagtgagaccgtgaaatgttcgtatttctccatgaatccgtgagtataacggcttcctgacacgtagacggtcacgacaggcatctcccacagctgacccaggccgccccatgagatggtcatggcattcatcttttcctcattgcctgcagcaaggaccatccagtccttggcgaataattccgccgcattcccagggatgtttccggcctttatctcctgccattgaccgtccgccttgagagagcctgcatcgcagttgcctgcgctagccctgtactgtccggcacaagcggataatagaatactcataaatattgtaactatttgctttaatcgatgttcgttcattagccattattctcggtaacaaatgacaaatatagtgaaacttatccgaaatgactttaccaagcgtgaagaaacagnnnnnnnnnnnnnnnnnnnnnnnnnnnnnnnnnnnnnnnattattcaagtttacggcttcgtgatactggaaaatggtgcccggcatgttctacatctatcataataaaaaatcccgctgctaagggcaacgggaaagaacctaatgttttcacaacggaataatccttattgtgatttgcttgaaattctgttgctaatataagaaaaaaatatattactattcattattacaatattttttttaactttatgaggagaagacaagagttattgcgcttggcaatgatttctcgagcatgagtttactaataatcaataaataaaaatgaaaaatattctaggactagaccttggtactaatagcattggttgggctgttgttggaagcgtaactgatgcggctgaaaaagaaatacttgcgggcattaaaggctgcggaagcagaattattccaatggatgcctcgcagttgagcgatttcgctaaaggaaatactgtttcacagacagctgacagacgaagcaagaggacggcccgtcgaatgaatgagaggttcattcttagaagggagcggctccatagggtgctgaatttgatgggtttcctgcctgaacattatgccgcttctcttgaccgatatgggaaattcatcgatgccgatgaccacaagatagcatggaggacaaattctgacggtaggcaggagttcgtttaccgacaggcattcaatgagatgtatgaagagttcaaatcgaaaaaccctgaatttctcaaaaacgggggcaagattccttacgactggacaatatactatcttcggaagaaagccctctatagcccgattaccaaagaagagctttcatggatacttctgaacgcaaaccaaaagagaggatataaccagctcatggggatggatgagcagcaggagcaggaagataggtcaaaatcagttgaatatttgtcgtccacaatcgtagaagtaaccgacagcggcgataagaaggggaaagccacttggtggaattgtaagcttgacaacgggatggtatacaaacgtccttctgaagtcaagccggattgggaggggaagacaaaggaattcatcattaccaccgacctcgacaaagacggaaagccaaaactgaacaaatacggagaaatccagcgaagtttccgcatgccgggagaaaacgactggactctcatcaaaacaaggactgaagatcaggttaacaagtcaggagagttcgttggagagtacattttcaatgcgcttctgaaagaaccaacgcaaaaaatccgaggcaaactggtcaggactatagacagagagttctacagagctgaattgaaagcaattctcggcaagcaggttggttttatcaaggaactgacagacagagacttgtatcgccaatgcatcgaagaactgtatcctagcaatgacggctatcgtaattccattgcgtcaagagatttcatatatcttttagcagatgatatcattctataccagaggccattgaaaacaaagaagagcctgatagacaactgcccatacgagagccacatctatacagacaaagaaacaggcgaggtgaaaacagctcccgtaaaatgcatcgccaaatctcaacctctttaccaggagttcaggctatggcagtttgtccagaacctgagaatctacgacaatttcagtggggaagacgagacttctttcgtcatcccgaccgaagcgaaacgggtcgaggtattcaaatatctcaacgatatctcatctaccaatcaagagtctttcttcaaagaattcttaggtgtaaaaaagccgaaaggcaaagattcgaaactcccatacgtttggaactatgtagaaggtaaagattatccttgcaacgagacacgcggcccgattctttcaaggttgaagaaatcgggaatcccnnnnnnnnnnnnnnnnnnnnnnnnnnnnnnnnnnnnnnnnnnnnnnnnnnnnnnnnnnnnnnnnnnnnnnnnnnnnnnnnnnnnnnnnnnnnnnnnnnnnnnnnnnnnnnnnnnnnnnnnnnnnnnnnnnnnnnnnnnnnnnnnnnnnnnnnnnnnnnnnnnnnnnnnnnnnnnnnnnnnnnnnnnnnnnnnnnnnnnnnnnnnnnnnnnnnnnnnnnnnnnnnnnnnnnngaaaacataattaacggaaatgtctccgcctccattccccagaaagtgagagatcagctgtcgtcatataaaagtatttccgatttcaagggactgcctctttatcttgcttgttacgttgtctatggcaggcatagtgaagcgtctgattcccagctttggacaagtccagaagacattgatgcctatcttaacaatttcaaacaacattctctccacaaccctatcgtagagcaggttgtgaccgagactttgagaactgtcagagatatctggcggtgttttggcaagattgatgaaattcacatcgagatgggacgagatcttaagagtccggccgacaaacgcagacaatatcagatgagagcccttgagaacgagaatacgaatatgaggatccgcgctctattgatggagtttaccaatcctgattttaaaatcgattatgtcagaccctattctccttctcaacaggaccttctcaggatttatgaagaaaccgtcctaaatagtggagaagaattgcctgattacgttgttgacgttcttcgtaatcttggcaacggcaaaactgaacagccaacccatgctgagattctaaaatacaaactatggctggatcagaaataccgttcaccatacacggggcagccgattcctctggcaaaattgtttactccggcatatgaaatcgagcatgtgattccacaggcgagatacttcgatgattcatacaacaacaaagtaatatgcgaatcagaggtgaacaagctgaaatcaaacatgttgggccatgagttcattgataaacatggtggagaagctgtatcgctcaacatgggtggcactgtgagaatattgactaaggacaagtatgaagacttagtcaagaaaatctacggaaacgaacgaatgaggatcaagtttaagaatctcatgcttgacgacattccggaggactttatcaacaggcagctcaatgacagcagatatatcagcaggctcatgcttgggcttctatccaatatcgtaagaaaagaaggcgagactgaggcgacctctcgcaatgtcattgccactaacggctcaataacagacaggctcaaggtagattggggtataaaagatacatggaataagatccttctgcctcgctttagaaggatgaatgaaatcacaggcacaaacgaatacactacaattaacagaaacggacatgaaattcctaacgtgccagacgacatgagcaaaggattcatcatcaagcgaatcgaccatagacatcatgctatggatgctattgttattgcctgtgccagccgaaacatcgtgaactatctcaataattcttccgcctgcaagggagcaaaaatttcgagatatgaccttcagcatttattgtgtaacaaagtgctccagggagacggaaactacagctgggtaatcaaaacgccttggactggatttcaaaatgatgtatacaatgcactgaacaacattattgtaagctttaagcagaatctaagggtcataaacaaaactacgaattattaccagcattatgaggaaggaaagaaaattatagcgaagcagatgaaaggcgacagctgggcagtgcgcaagtccatgcacagggacaccgtctttagagaggtgaatttgagaatgattcgtcaagagaatctgaaatccgccatcgagcaccttgactatattgtgaacagagaccttaaggagaaactcaaagagtttctcagggaaggaataagcctcgctaaaattaagaactattttgagcaggagaaggatacctggtcagaagtgaatcttaaaaagattgatgtgtactactttactcaggaagataagaacccagagacaggtctcccgaaacatcggttcttctccacgaggaagccaatcgacatgtcttataccgaggagaaaataaagacacagattacagatactgcaatccaaaaaatattgctggcccatcttgccgaaaacggcaacgacccgaaggtggcatttagccctgacgggatagatcgtatgaacgacaacatagtgcgtttgaataatggtcgtatgcatcagcctatatttaaagtcccatattttgaagaggggcaaaagttcagtgtaggaaaagtcggtgcaaaggccaagaaattcgtagaagcggacaagggaaccaatatattcttcgccatctatgaaaatgaggccgaagacgaggagacaggagagattaagaaagtccgttcgttcgccgacatacctttaaatgtcgccatcgatagggagaagcaaggtctggctcctgcgccggaaaacggggacggcatgaagcctattatggtgctgtccccaggtgatctggtttacgtgcctacggaagaagaaataaaagatggaaaacttggaccttcactagacaagaatcgaatctataaaatggtgagttcgggacaagggaagtgctatttcattcctcagtcagtggcctctgtcattaaagataaggttgaatttgaatctgggaataagtctcagaaaacaatagatggaaagacttctattaaggaagtctgctaccccgtcaaagtggataggctaggacatatcatttcaatcaacggcgatatgatatgattaagaagacccttgcaatcattaatcccgcctatctttcgcttaaagacgggcaactcgttgtgagagaaattgttgcgaattcatctgaaagtaaggagaagatcataaccgcac

SEQ ID NO: 756 - DNA, 7395 bp, synthetic construct
  source 1..7395: mol_type = other DNA
  misc_feature 1..7395: note = Synthetic
ggttgatgagatccaggctgccgccggggccgtcgtcgccacggttggtgtcgcccttgtcgttgagcatctcgctgaagcgtccgcgcagagtgcagccggccttacccttgacgttcactctcacccaacctaccatgttctgtccgaagtcgtagattacggtctgtcctttcttcagtgtgactggcgagttgccgcttatctctgacactacgttcaccatgccataggcagtgcctgtctgtttcacgccttcgtagatggtgatgtgctccggctggcgtgtcagcgatgtgcgtatgcgtgccgccggaccttcgaatgcgcatatctcgccggtgaagtcgcggctcgacgccgtggcgtgccatgccgactggtcgtatccggcctctttccaaccgtcctcgagagtggcgttgtaggtctcgccgttgtatatgtcgcccttgcgcagcgcgccgttgtttgatgtcgcccatgagttgtcggtcacgatggcctccttcgagccgtcggcatattcgatgacgagcttcgccatgaatgccacaggcttgtcgccgtattgtccgtgggcgatgcctccggcccagtagccagacgttacggtcgctccgatggcgttgccgccttctttgacgagtgtggtgacgtcgtgtgtgttgtagaataccttctttgcatagtcggtccatcccggtttcagctcgtcgtaaacggtcgttccgtcgtcctgaacgtgacccacacgtgtgccgttgatatatacgtcgtatatgccgagggcagagctgtagagcttggccgactttatgggtgccttggccgtgaactctttcctgaacatcgaggccgctcccatggtgctctccatgaatctctgctcgccgcttgctacggccacatagagctgtttggagccgtcgtgctcctcaatggtgccgtcgaacaacggagcgtcgccctcgaagtcctcagacagacgcacggtctcggtgccgtcggcattgattgtcgtcactaccacattgtcggcataggccggaccttcgtcatctacgtgtgcgcggaagcctacgtagccatcgacaatcttctcagaggcggtgtatgtatcgacaagctgtttgtcgatgtatgtgttcaccacgtttcctttcacctcaatgcgcatgcggtgaggcttgccgagtatctcgtccttggtgaacgcgtctatgcgtgtgtcgctgtatgaaggtgttgagctgttgttgtacacatggcggcgtattgccggatagtcgtagtccttgcagttgagcgcccacatgtagtagttgttcgaggcggtgtatgcgaacaccacagccacgttgcccttcatgagagtgatgtcagactctatggcgtagccgctgttgtcgtctgatgacgtctctttctgccatgcgaacacagagttcaccacaccctccatgcgcagttgtccgtcggtcactgtgccattgtcgaaagcgtagttgtcggcgttggcaaagtcctcgctgaagagggtctttccgttggcgatgaccttgatgttgtcccacagcgcaatctccggatcgctgttcttctcgcccatgtcggcgcgcaagccgagcttgccgtaggcaaagtcgccctcgcggtcgtctatgagtatgtcgttgatataggtgcgggcacgtttgcagttgtcgtaaacctctatgcgcagatggtatgtctcgttgttcttcagatcgacaatgcctgtcaggtccttgttctcaagacactcgccgcccggattccagcggtgagggcggaaacggggataatcgccctcggtgttgaactgccacatgtagaagtgtgactggtctgtcgcggcgaagcacagaccggctgccacttgcgagatgttgaagtcggcggttatggtgtattccgttatgtcggcggtgtcggtatctttctgccagcaatattgttctgtaccatatccctcgaagtagagacggccgtctcttacaacgcctgccgtgaaggtggagttgccttctgagaagtcttcggagaagacagacacgccatcgacgctcacgttgaagtcgtcgtagtaggcagcctcatacagattgtcggtatattcggagcctgcggcacggaagccgagacgtccgaaggggaagtcgccgcggcgctcgtctatcagtatgtcgttgatataagtctttgcgagcatgccgttttcggtaatgtcgatgcggagggtgtattcctcgttgtccttcaggtcgattatgcccgtcagatcaacgtcctcaagacacgtcggagtgttgttcacccagcggtgaggacggaagcgtggatagtcgccctcggtgttgaactgccacatgtagtagttgttctcgtcggtcatgccgaaacacagtccggcagccacctgggcaatctcgaacttgcagcttatggaatagtcggaaatctcgtcctcgtctatgtatccgagcggattgttggagtattttatccatttcgctccgtcccatcctgtgcccatgagtccggtttcgaagtaagccttctctgtagaggtggcttcgttgcctttgttgtcggtcactgtcaccttccaatagtagcgcgttgacggcgcgaaggtgtagtcgggactgatcatcaccgactggtctgactcaacgatgcctgagtcccacacgatgttggagcagtcgctgtcgctgcacaccatgatgcggtagctcttctgcatcactccgcgctcgtccgagttcaatatccagctgaacgtcggcgccttgtctatgcccacgggattggtgagcgacagggtgcgcagcttttccacagtaagagcttgagccacccctgcgaataatacacttagtagcagcaaccatagtcttgggttgcctgatgagaaaacggttcgtctcatagttgtttgtttagtgaataatatgaaagtgaataataagtttattgtcgtcagtatatgtgtatatgcgtttcatgcaccgtgtgccgtcgtcataccacatcagtatagtcttcgtaggttcttcctcccgtggtcttttaccgttccgggtggcaggatagtgtttctgtgtcttttttacgcgccacatgcacagcggcatagtggctgtatgtcagattagtagttcgtttcaaataataatatcagtcctataagaaagaacaaacgacatattcatcaatttgaattattctttatttttttcatattttttcacatttggcggagtggtgtccttgacatgacaacgtaagtccggcggattcacaaccacgcgggaatgggtttatacgtgaaatgtcatagaatataatttatatgatgcgggagaggtttttatatgatgtggaaaaaggttttatatggtgtaggagaggtttatatatgatatgtgaatggtttatatatgatgtatggaatggttatatatgatgtacgagagatttatatatgatgctggaaaagtttatatatgatacgtgaagggtttatatatgatgtatgaaaggtttatatatggtgcgtgaaaagtttatatatgatgtatgaaaggtttatatatgatgtatgaaaagttttttatatagtgtatggaacgtttatataatgctgaaacgtttttatattatgcgtgaaaggcagtggcgatgcaggcctgcaagattcacggctgcacggtgatatagtgatgataaactctccctgccacaaccggtaaaccatctccccaatagcgacatatgcttacggttcgccggacgaatgtttcccgtgcctctccttactcttgatttcagtgttttcaagcaaaatccgcatgacgtgcttacaatttttcttgactaaattttgacaaaataaattcgcaaaagaggtgtgaatgaatgttaaatcacgcataatatagcccgtttcgtgcctttttgcactttgttataccccataacgtagtccggaaaagcgcgttccgtgttccgatattgcccatttcgcattacgataaagcccgtttcagggtgcaatatggcctatttcagcacccaatatgggccatttcgcaagccgaaatggtgctttttgcaaagcgaagaaataccccttaaatataattatctgatattcaatacattaagaaatactctcataatccgcgtatttgcgcccgacgaagagtccgcccgcatacgcgcttatttttcggggtagaacaggaaactgaggccgaaaaaccgaaatccgcttacaatctgaaagtgccacgtaccggcatcccctcaactgaaggaaagacgccgtctcagacttaatcacaaaccgtcatcagaccgcaggcctttgtccccgtattgaaactggtccctttttctttctcacggccccgatataaaccttaaatctacgtttccggcttcggtaaatacagatgcctcgtgcttgtagttgctgttatttttcctatatttgcaatataatattgttgcaatctattgttcggacatgaaaaaacataaattatgaaaaagatattaggactggatctgggaacgaacagcattggttgggctgtggtgaatagtgagaacgacgaaaacggtgatgaaaagataaagtgtatagaggcagccggaagtagaataataccgatggatgctgcgacattgggcgattttgcaaagggcaacaccaagtcgcagacaaaggaacgtactgatgcaagaggcataagacgcttgcacgagcggcatctgctcagacgcgagcggctcaacagggtgttgtctgtcatgggtttcctgcctgagcactatgacaatgcgctcacacgatatggaaagttcaaggacgacaaggagtgtaagatagcatggaaaagaaacgatgacggcaaatggactttcattttcatggattcgttcaacgagatgctgtccgatttcgctgcctgtcagccagattggttggccggaggaaaaaaggtgccttacgactggactatttattatctcaggaagaaggctctcagtcgtgcgcttacaaagcaagaacttgcctggctgttgcttaacttcaatcagaaacgcggatattatcagctgcgcggtgaggacgagcaaagcgatgacaaggggaagctcgtggagtattatgccgtgaaagtggtggatgtcaaggataccggcgagaaaaaaggcaaagacacgtggtttgatgtcattcttgagaatggaatggtgtatcaccgccctgccgccgaggctcccgattggatagggaagaccaaggagtttattgtcactaccgatgtggagaaggacggtacgccgaagaaagataaggacggaaacataaagcgctcgttcagaatgccgaaggaagatgactggacgctgataaaaaagaagacagaaagcgatatagacagctcgggcaagaccgtcggcgaatatatttacgattctttgctggcagaccctacgcaaaagataaagggcaagttggtcaggaccgttgagcgtaaatactataagagcgaactaaagaggattctggattctcagaaaagattcatacccgagctgaatgacagaacactttatacggcatgtatcgaggaactttacgagagcaacgatgcttacagacagtcgatagcctcttacgacttcacatatctgtttgttgacaacataatattttatcaaagaccgctcaagagcaagaagtctctgatagataactgtccgtatgagagccgttcgtatgtggacaaggagaccggcgaggtgaagaccgcacctgtgaaatgtgtggcaaagtcgaatcctttgttccaggagttcaggctttggcagtttataagtaatatcagaatatacgaacgccagaagattgtggatggtcatctgaaggcggatgttgatgttacgggcgagtttataaaggatgaggacgacgtcgtgaggctgttcgactttcttaacgaccgcaaggagatcaagcaagacacgttgctgagcacttatttcaaggttaagaaaccgaaaggcaaggacagtagttatccgtataggtggaattatgtggaagacaagacctatccctgcaacgagacaagggctctgatgttgaaaggtcttaaggatgccggggtggacgaggcatttctcgacaagacaaacgaataccgtttatggcacattctttactcggtggatgacaagcaggagataaagaaggcaatggctacgtttgttgtgaaatacaataaagatgaagagaataaaagaaaggacaagaacaataaagcaataacccttgatgacaggtttgttgaggctttcagtgccttgcctccgttcaagaaagaatatggatcttattctgagaaagccatcagacgattgcttccgctcatgcgtatgggcaaatattggaatgtggaagctatagacgcatccaccagagtgcgtataaataatattattgatggtgtagaagtatatcattcaagttttacagaggaacaaataaaatttttagataaatattgcaaagataataatttacttatgtcgggagggagtgactgccatggagaaaagaaggctgatagaaaaattggtgtaggatatggaaaattaaatataagtaaagaaatattaaaagcatggactaataaaaattagtaaaatgtcaataacatcaataagtatgaattatatattttttcgcccttcaaagatacacaacacaatttaatacaaaagaataaagaattcgttttaaagtaataacatataggtaattattttataaaaaaacacataaaatcaaatgcccctaaaaatcgagattaggggcatttactttttcgtaataaagtttaataattaatttatactttttataaaaacagctagtttttttagagtatcacaaccaagctcaatttgctcatctgtgaaagtacttaatatcacatttgtttcatgctctaaattagtatttttaccaaataaaatataatcagcagatgaattacttaaatcacaaagccttttcaatttctcaatagataaacaactcccaccacgttcaacaatacctaaatattgaccagaaataccaagcagtttagaaaattcctctttagacatattcatactttcacgtatatttttaattcttaaaccaatttcttctttcatgttttacctcacaaatattttataattttattttaaaattataaataaattaaaaagtgacaaaaaacgacacatattagtagaaaaatattacaaattatgataatatatgaaaaaaaagta

SEQ ID NO: 757 - DNA, 7265 bp, synthetic construct
  source 1..7265: mol_type = other DNA
  misc_feature 1..7265: note = Synthetic
gatttgtacaaatatggtttgatggatgcagaagaattgggaaggagataaggaagtattagtcgttattctttcaggttagtaaggaaagcatccacagctataaaaaagaaagcgaccttcgtaaaaagaccgctttaaatgttttcacaacggaataatccttattgtgacttgcttcaatttagttaatgcaaatatacagaatatcctttacataaggaaggcttttttgatatcttttttctaactttgaggaaatgaacaaagaaaatcggttatgaaaaagatattgggtttagatttaggaacaaacagcgtaggctgggcagtgataaattcggtcgtaaatgacgaaggcaaggaacaacttgtaaatatttcttcttgcggcagcagaattattccgatggatgctgcaacattgggagattttgataaaggtaattctaaatctccagtagcggagcgaacccgacttcggggagtacgtcgtctactggaacgtagtttgttacgtcggcagcgtttacatcgagttttatctgttatgggatttttaccggaacattatgcatcacaacttgaccgatatggtaaatttctgccagaacgggaacctaaattagcctggtatcaagatgaaactggtaaatatagatttctgtttcaggattctttcaatgaaatgctggaggactttcgtcagcattatcccgaactggtagcagaagggaaaaagataccttacgactggacgatctattatcttcggaaaaaagctctttctcagaaaataaccaaagaagaacttgcatggatattgctcaatttcaatcagaagcgaggatattatcagttaagaggagaagaagagaaagaagataataaaaaatcagtagaatattatgcattgaaagttgtttcggtagaagattccggagatcgtaaaggaaaagatatctggtacaatgtcaagttggaaaatggctgggtataccggagagccagtagtgttcctttagactgggtcggtaagataaaagaatttatcgtaacaacagatttggatgaaaagggaaatcctaaaaaagataaagacggcaatgtaaaacgttcttttcgggcacctaaggaagatgactggggattgttgaaaacaagaacgcaggcacagattgacgaaagtggtcagacagtgggtacatatatttacgagtcattacttcgcatgcctgatcaaaaaataagaggaaaattggttcgaacgatagaacgtaaatattataaagacgaacttcgtaagattttggtcaaacaatcggagtttcatgcagctttgcaagatcacaatttgctgcttgcttgcattgaagaactatatcccaataacgaagcacatcgtcggttactgtctacttccgattttatttatttcttggtggaagatatattgttttatcaacgtccgcttaaaagtcagaaaggactgattgacgattgtccatacgaatcgcatgtatatcgggataaaaagaatggcagtttgcagcatgttccattgaagtgcgtgtctaaatcgcatccgttgtttcaggaattccgcttatggcagttccttgcttccttacgcatttatcagcgtgaaagacaggtagacggttctcttaaactggatgtagatgtaacaaatgaatttttgcagggcgaagatgattatgtaaaattattcgattggctgaacgatcggaaagatatagatcaaaaaacattcttagcatacaaacctttcgggttaaagaaaaacgagctgtcccaatatcgctggaattatgtagaagacaaaagttatccgtgtaacgaaacaagagcagatatggtatccagactaaataaagctggagttccggaagagttcttaactcgagaaaaggaagaggccttgtggcatatattgtattctatatccgataaaaaggaattgacgaaagctttggggacttttgcggagaagaatggtttgaatgaaacttttgtagaaatattttccaagatgccgccttttgaaagcgactatgctgcttattctttgaaggctattcgtaaactgcttgcgctgatgcgtatgggaaaatattgggacgagcaggccatcgatgagcagacccgtagtcggattgaaaagatactgaccggagaatacgatgaaactatccgtacccgggtacgtgaaaaggctatgcacctgacggatatgtcttctttccgaggacttcctttatggttggcatgttatgttgtttacgatcgtcattccgaagcaaaagaacttgtcaaatgggaaacccctgatgatatcgatcacttcttgcgtaagtttaaacaacattcgttgcgtaatcctattgtagaacaggttatcatggaaacgctgcgtacggtacgcgatatctggaggcaagaaggaagaatagatgaaattcatgtggaattaggtcgtgaaatgaaaaatccggccaaagaacgtgcccgtataacagcacagatactggaaaacgaaaataccaatttgcgtataaaggcgttgcttacagattttatgaatcctgaatttgagatagaaaatgtccgtccttattcacctgcccagcaagaaatcttgcgaatctatgaagaaggtgtattgtctggtgttgcggaaaaggatttgcctgacgatattgcttcaatcttgaagaagttcagggaggttcacagtagagtttttctacatgtttcacacccaaacgttcaagaagttcagggagaatgatgtaaagaaacgtcctactacctcagaagtcttgcgatataaattgtggctggagcaacgctatcgttcgccttatacaggcagaataattccgcttggtaagctgtttactcctgcttatgaaatagagcatgtaattcctcagtcgcgttactttgacgattcatttaccaataaagtaatttgtgaatcggctgtaaacaaactgaaggataattgtttagggtatgaatttataaagaaacattccggcgaaaaggttgaattgggaaatggtgaagctacgactattttttcagttgaagagtatgagcgttttgtgaaggattcttacttaggtaatagtaagaagatgaaaaagctgctgcttgaagatatacctgataactttattgaacgccagttgaacgatagccgatatattagcaaagtcgtaaaatctttgctttcgaatattgtatgtgaagaaggcgaacaggaaggtatgtcgaaaaatgtgatagtttgtactggtggagtaacagatcggttgaagaaagactggggagtacaggatgtatggaaccggattattcttccacgtttcctgcgcttgaataaaataacagatagtacagacttcacttctgtaagcacaaatgggcatttgttgcctgccgtacctttgcatttgcagaaaggattcaacaagaaaagaatagatcatcgccaccatgctagggatgccattgtgatagcgtgtgccggtaggaatattgtcaattacttgaataacgcttctgcacgcaaaggttctgacatctctcgttatgacttgcagcatttgttgtgtgataaggtaaagacagacgcaaacggtaattacaaatggattcttcgtaaaccttgggagacatttacacaggatgtatatgcagcattgacgaatattgttgtcagctttaagcaaaacctccgggtaataaatcgtacaacgaaccattatcagcattataatgaagatggagaaaagaaaatgattccacaaactaaaggtgatcgttgggcgattcgtaaaccgatgcacaaagatacggtatatggtgaggtaaatttgcgtaaggagaaaacacttcctttgaaagacgtgctcaataatccatcgattgttgtggataaatcattaaaaaacaaattgtatgaattgttaaaatcccagtatgacttgaaggcaataacgaagtatttcgaaacgcatcaggatgtctgggctgatgtcaatttaaagaaaatcaaggtttactattttacaaaagaaacgaatgaacgcttttttgctacgcgtaaatcattggattcaagttttaatcagaagaagattgaagaagaagtaacagatacaggtatacaaaagattttgctgcgtcatttgcaccaaaatggtaacaatccggacattgctttttctcccgatggagtggagcgtatgaatcagaatatgactattctgaataatgggaaatggcatcagcccatttataaagtacggacttatgaaaaagcagataagtttgcagttggtgaaagcggtaataaaattaaaaagtttgtggaagctgccaagggaaccaatttgttttttgctgtgtatgaatctatgcaagaggatgaggctacaggtaaacaagtccgtaaacggacttttgctaccataccgctgaatgaagttattaagcgtaaaaaacaaggattatctgctgcacctgaagacccaaagggtaatttacccatatttgttttatctcctaacgatttggtctatctaccgacagaagaagagcgtaatagcggtaaaataattcaacctttggatagagagagaatttataaaatggttagttgtacagggaatagattgtttttagttccttatatggtcgcttcatctatatatgataaaaatgaatatacatcattgaataaagtagaattgtcagatgataaaatttctataaaagaatggtggattcctattgaggtggatagattgggaaatatatctatacaaaattattgactactaatccaatactatgatcaagaaaacactatactttggtaaccctgcttatttgtcattgcaaaataatcagttggtcattaagctaccggaggtggagcgtaacgcttcacttccagaaagctttaagtctcaatcgattataactagaccgatagaagatataggattggtgatattagaccataagcaaataacaattacttctggagtgcttgaagcgcttttggaaaataattgtagtgtcataacttgtgataataaaagtatgcctgtaggattattattgccactttatgggaatactgttcagaatgaaaggtttagggaacagctgatggcgactcttccattgaagaaacaattgtggcaacaaaccattaagcaaaagatagagaatcaggcagcttgcaatattgtttaggagaggacaataaatgtatgagggtgtgggcggaagaagtaaaaagcggtgatcctgataatttggaagcgagggctgctgcttactattggaaaacactttatgctcatattccaggatttacacgcgaccgtgacggaatccctcccaataatttattaaattatggctatgctattttacgcgcgattatagcccgtgctttagtttccagtggtttgttgcctactttaggaatacatcatcataaccgttataatgcttattgtttggccgatgatgtaatggagccttatcgtccttatgtagataaacttgtatttcagcttgttaagactcatggtgagaatgtagagctaactaaggaaataaaatcagttcttttgacaattcctacactcgatgttgttatcggtagaaagcgaagtccattaatggtagctgcaacccagacaactgcttctttatataaatgctttagtggtgaattacgtaaaattgcttatcctgaaatgtgatggatagatatagtgaatatcgtattatgtggatacttgtattttttgatttgcctacagaaactcaaaaagacaagaaagcttatgccttgtttcgtaaaaatttgcagaaagatggtttcactatgtttcagttttcgatttatattcgtcattgtgccagttatgagaatgcagaagttcatataaaaagggttaagtcatttttaccagaatttggtcaggtggggataatgtgtataacagataagcagttcgaacaaattgagctgttttatggtaagaagcctcattgtaaaaatgtagcaggacagcaattggagctattttagaaataagaaatcccgctttttatggcgggatttcttgtaggaaacatttcttttttaatttctattctttgacgtaatgtattgctatataggttgttacacggattgtgctgtttcctatataacaaagttactaaattgaaaacaaatcacaacagtcggttacgtggtagcgtatctgtatgagctgtttcctatataacaaagttactaaatgaatagatatttcaaaattttcccacccaacattttgtaaatgaaatatccttactttttgcactttttaggcttttagatgaaaattattgttcagcttttcgctataaatgaaaatttttgtatatttgtcttactcttagaagaaagaaagtattagaagcgttttaggcattatccgaggttcagaaaatccccaatttcgcaacgataacaaaggataatacaaaaacgctccacgggctatcgtatatgctgttttgagcaatatgtatgtatataggcgtggggctttatgtattgctcagttatcaagtatggggatacttctggacaagtaatactaaagttccccacgctttaacttttataaaaacagcttcaaggggaagcaagctgacatatcgtatatgtatgaaagcacttaaactaaacaactgtgaaagcggtgtttcaacctttgtttcatttgccgcgggtcaccgctctattcattggattctttttcttagcatttgttttgctttgtatgttgtagcatataagatacaaattatgtgccatacttttttccgtactcatctgatagtagattatggattatgacgaggcttgccatactaatggcgagatgtggagtgtaatctattgtactttgaaagaaatacgtgaagttagagagttattatgtaccgatgagttggaaaaagtttctcaaaagatggaactcatcgaaaaagaaattgatattttgtctgttttaatcttttacttgtgacaatatgtcacgatatattgtgcttttgtgagtggtatgtcatgtgtaaagctctaaaacagattaataagaaagatgatggataaaaagattgagttcccttatgcggtaggagtatcggccggg

SEQ ID NO: 758 - DNA, 7069 bp, synthetic construct
  source 1..7069: mol_type = other DNA
  misc_feature 1..7069: note = Synthetic
agacagccgtactatcgaccgcaaaacttattacgattatccgcgagcctataagttgatcgacgagttgcagccacaggctgttatcttctcggatggaggtccgggctgccgttgggtaggtaacgaaaacggatttgcaggagctaccaactggtcttttctccgtgccggagaagtttatccgggttaccccaaatatcgtgaattgcaatatggccatgccgacggcaaccaatgggtagccgcagaatgtgacgtatccatccgtccgggatggttctatcatccggaagaagacgaccgtgtgaaaacagcagatgcattgaccgatctgtattaccgtagcgtaggtcataacgcaacattgttactcaactttccggtcgatcgtgacggactgatccatccgacagactctgccaacgccgtaaacttccaccagaacgtacaaaagcaactggcacacaacctattggccggactttctcccaaagcatcggacgaacggggaaaaacattctctgcaaaagcggtgaccgatggtgagtatgatacttattgggctaccaatgacggtgtcaactctgccaccatcgagtttgacctgcctcaaacggaaaagattaaccgcatgatgttacaggaatatatacctctggggcaacgtgtcaaatcattcgttgtagaatacaaccaggaaggcgaatggcttccggtaaaattgaatgaagaaacgaccactatcggatataaacgccttcttcgtttcgagacagtcaccacagataagatccgtgtccgttttacagattcgcgagcttgcctctgtatcaataacatagaagcctactatgcaggagagacttccgatacatataccgcaaaagcagaagagttgaagagttatccgttcacgctcaccggagtagatgcggaggaagcacaaaaatgtatggataaaaacaatcagaccacctgcttcatcaacggaaatacattattgattgatttgggagaggaacgcacaatcacctcattccactatcttcccgaccagagtgaatataataaaggggtgattgcggcctacgaaatatctgtaggtacagacagcaatgctgtcaaccagctagtagccaaagatgaattttccaatataaagagcaatccgattttgcaatcggtttactttactccggtaaacgcccgctatgtccaactgaaagcaacacggatgatacatgacggtgaaccgatggggttagcagaaattggtatacaataaaagaatagagactctctccataaaatcagaataaggtgcaattatgaactaaaccatttgctttattacagtaaatgattcctataggcatttttatttcgccgtttgcctaccaggatatagttcgttaggcaatcttatttcgtataactatagtcatacgaaaagataataggcaatcaagatagtcttatcaggctatggagaaaatctaattagtaacataaaataatagataatatggtacagcaaacagaaattatcgtgcagaagaaaaactatactctccgtacttggcaaaccgaagatgcagcatcattagcccaatatctcaataacaagaatatttggaataactgtcgtgacggtctcccctatccttatagccaggaagatgctaacgtttttctcgctatggtacaagcaaaagaaaacattcatgatttctgcattgaggtaaacggagaagcagtcggaaatatcggttttatacccgctacggatgtagaacgttttagtgcagaagtgggctactggattggagaacctttctggaaccagggaatcgttactgacgccctgaaaaaagctatcaactattatttcgaacacactgataaaatacgtgtattcgcagtcgtatttgagcataactccccatccatgcgggtattagagaaagtgggattcaagaagactggcatcttccgaaaagcttgttacaaaaacgggcgattcatcgatgcgcatcattttgagatcgtagcggatgagaaattagttgggaacaaagacttataatccatttatgcaaataagacaattacaggtaaacgaatacgataaggcattaaccttgtctttggacgtgttcatccaatgtggcaagaatgacttcgacgaagagggattggaaaccttcaagagtttcatttacaataaggatctggtaaatgagctaaccatttacggagcattcgagggtgagtcattaataggtctaatcgcgacaaaaaatgaaggaaagcatatctccttattcttcatcacgcctatgtatcatggaaaaggtatcggcaaacgattattcgaggccgctatccaagataagccagtctcggaaatgacagtcaactcctcttcctatgcaatcccaatctaccggaaattcgggttcgaaccaatctgcgaagaacaaactacacatgggatgaagtacaccccgatgaagcgaacgataacccgtccctccttcgaggacttcaatgagcttcttctgctttgggaagcgtccgtacgtagtacccatcatttcctaaaagaagaggatatcttattttataaagaacttgttcccggatatttcccattggtagaactttatatcatccgaaatgaacgaggaaagatcgccgccttcatgggcttaagcgatgagcttatcgagatgcttttcgtacatccggaagagcaaggcaaaggattaggtaaacgacttatccaattcgccttgcaagagacacccatccgaaaagtcgacgtaaatgagcaaaacacaaccgcacttcatttctatcagcatctgggattccaagtgataggaagagacgagacggattcctcccacaagccattcccgatacttcatcttcaagctacacttccttaaaaatttaaggtaatcgtgtagcctatcatgactatatgcgtagcctaacgaaggcattcttatcaaaaaacaggactagttacacataaaaaaagcccaccgataaaggacgatgggctagaacctaaatgttttcacaacggaataatccttattgtgatttgcttcaaattagtatagcaaagaaataaagaatatatttataaagcaagtatttcttgataatttattttatctttgaaaaaatcgttaacacaatactagtcatgaaaaaaatagtaggattagatttaggtacaaatagtataggatgggcattaatcaatgcttatatagatgaatataataaagaacacttatatggtatagaagcttgtggcagtcgtattatacctatggacgcagccattttaggaaatttcgataagggaaattctatctcacaaactgcggatcgaacaagctatcgtggtatacgtagattgcgtgaacgccatctattaagacgtgagcgcctgcatagaattctcgatttactcggctttttaccaaagcattattccgattctctcaatcgctatggcaaattcttaaatgacatagaatgtaaattaccttgggtaaaagacgaaacaggttcttacaaatttatctttcaggagtcttttaaagagatgttggccaattttaccgaacatcatcccatacttatcgcaaacaacaaaaaagtaccctacgattggacgatctattaccttagaaagaaagcattaacacaaaaaatatcaaaagaggaactcgcttggattcttttgaactttaatcagaaacgaggatactatcaacttcgaggtgaagaggaggaaactccaaataaactagtagaatattattcattgaaagtagaaaaagtcgaagactcgggagagagaaaaggcaaggacacctggtataacgtacatttggagaatgggatgatttaccggcgcacaagtaatataccattggattgggaaggtaaaactaaagaatttatagtcaccactgatctagaggctgatggtagtcctaagaaagataaggaaggaaatataaagcgttctttccgtgcgccaaaagatgatgattggacattaattaaaaagaagacggaagcagatatcgacaagatcaagatgactgtcggcgcttatatttatgatacacttctgcaaaaaccagaccagaaaatacgtgggaagctagtacgtactatcgaacgtaaatactataaaaacgaactctatcaaatactaaagacccaaagtgaatttcatgaggaattacgagataaacagttatatattgcttgccttaatgagctttatcccaataacgaaccacgtaggaatagtatttccacacgagatttctgtcatttatttatagaagatatcattttctatcaacgtccactgaagagcaagaaatcattgatcgacaattgtccctatgaggaaaataggtatattgataaagagagtggagaaatcaaacatgcatccattaaatgtatagccaagtctcatcctctctatcaagaatttcgcctttggcaatttattgtaaacctacgtatctacaggaaggaaacggatgttgacgtaacacaagaattactccctaccgaggctgattatgtcactttatttgagtggctgaatgaaaagaaagaaatcgatcaaaaagccttttttaaatacccgccattcggctttaagaaaacaacttcaaactatcgttggaattatgtggaagataaaccttatccctgtaatgaaacccatgcacaaataatagctcgtttaggaaaagcgcatatcccaaaagcttttctttctaaggaaaaggaagagacattatggcatatattatattccatagaagataaacaagaaatagaaaaagccttacactcttttgccaataagaataacctaagcgaagagtttattgaacaattcaagaatttccctcctttcaagaaggaatatggctcttactcggctaaggcgataaagaaattgcttccattgatgcgaatgggtaaatattggagtatcgaaaacatagataatgggacaagaatacgaattaataaaattatagatggagagtatgacgagaacattcgtgagagagttagacaaaaagctattaacctaactgatattacccattttcgagctttgcctttatggttagcttgttatctagtttacgatcgtcactccgaagtcaaggatatagttaaatggaagactcccaaggatatagatctctatttaaaatcgtttaaacaacattcgttacgcaacccaatcgtggagcaagtgataacggaaaccttgcgtaccgtacgagatatttggcaacaagtaggccatatcgatgagatacatattgaattaggacgggaaatgaaaaatccggcggacaagcgtgcccggatgtcacaacaaatgataaagaacgagaataccaatttacgcataaaagcactattgactgaatttttgaatccggaatttggaatagaatgtacgtccatattcccccagccagcaggatttattgcgtatttatgaagaaggcgtactaaatagtatattagaattaccggaagatataggaattatattaggaaaattcaaccaaacagatactctaaaacgtccaacacgctcggaaatactacgttacaaactatggttggagcaaaaatatcgttcaccttatacaggcgaaatgataccattaagtaaattattcactcctgcttatgaaatagaacatattattcctcaatcacgttatttcgatgattcacttagcaacaaggtgatctgtgaatctgagataaataaattgaaggataggagcctcggctatgagtttattaaaaaccatcatggagaaaaggtggaattagcttttgacaagcctgttgaggtactttccgtggaagcctatgaaaaacttgtgcatgaatcttattcacataacagaagtaaaatgaaaaagttactcatggaagatattccagatcaatttatagaacggcaactcaacgacagccgctatattagtaaagtagtaaaatctctgctttctaatatagtgcgtgaagaaaacgagcaagaggctatctccaagaatgtcattccttgtacaggaggtattaccgatcgattaaaaaaggattggggcatcaacgatgtttggaataagattgtacttcctcgtttcattcggttgaatgaactgactgaaagtacccgtttcacttctatcaataccaataatacaatgatcccctccatgcccttagagttacaaaagggattcaataaaaaacgtattgatcaccgccatcatgcgatggatgccattatcattgcatgcgcaaatcgtaacatcgtgaactatctcaataatgtgtcggctagtaaaaacacaaagataacacggcgagatttgcaaaccctattatgtcacaaggacaagactgataataacggtaattacaaatgggttattgacaagccttgggaaacattcactcaagatacattgacagctttgcagaaaataacggttagctttaagcaaaatttgcgtgtgatcaacaagacaacaaaccactatcagcattatgaaaatggaaagaagatagtctccaaccaatcaaaaggggatagttgggctatccgtaaatcaatgcataaggaaacggttcacggagaagtaaatttgcgtatgataaaaaccgtatcatttaatgaggccttaaagaaaccacaggcaatagtagaaatggacttgaagaagaaaatactcgctatgctcgagttaggctatgacactaaaagaataaagaactatttcgaggaaaataaagatacttggcaagatattaatccaccaaaaatcaaagtctattactttacaaaagagacgaaagaccgctattttgcggtgcggaagcctatagatactagtttcgacaaaaagaagataaaggaaagcattacagatacaggtatccaacaaattatgcttcgacatttgga

SEQ ID NO: 759 - DNA, 6968 bp, synthetic construct
  misc_feature 1..6968: note = Synthetic
  source 1..6968: mol_type = other DNA
ccttggagaggaaatgttcattaatggctgcgccctcaaaacgagatagtgtaaatgcccaatcaagtttcaaattccgttcggttgattctcaaaccatttctttttgactatagaagagttcaaactccaaattaattcttcgtcagaaaagttcagacgacttcatatatcgttggtttgggtatgaatccgataaggaggagatgactatggaataaaaaaagcgactccatgcaccgaagccatggagccgttttggatgttcacaacgggatgtgttcacaacggaataatccttattgtgaattgctttcaaaagtgattgcaaagtaaggaatatttttcgaatcttgcaaggtttcggatgaaaaaaattatctttgcaatagagctaccaagaatcaatccgaatacttgacattctaatgccgtattccagaacttgtttgcttcaacagtttcaataatgaagtcgtctgaacttttatgaaattcaagatttgcctttatttttgaggcgtttttgggccttgaagaaggagtgtagcgagctacacaactgatgaaaggtcaaaaaacggccaaaaagaaaggtgaggattgaatttagaagagctcaaactccaaatcaaatcttcgtcagaaaagtttagacgacttcaataacccatctcaatcctgtcacatttatggaagaaggtaagatgaaaaacattcttgggttggatttaggaaccaacagcatcggttgggcctggattcaatcgaaagtcccccaacaaaccgacgattgtccatcttcgtccgagtatctgatgcctgattgcgccaccatccgcatggcaggcagccgtgtccttccgatggacggcaaaatgctttccggttttgaatccggattggcggtatccaaaacaaaagagcgtacgacatatcgcatggcccgacgcgtgaacgaacgattccaactgcggcgtgagcgcctcaatcgtgtgctgagaattttaggattccttcctgcgcactatgcggcctgtcttgaccgctacggaaagattgacgaagaaaaaaatgtcactatcccttgggaacccacagctgacgggaaacgcaaattcctgttttatgcatcgtttcttgaaatgaaggaacgcttccatgagcatcaccccaatttggaaaagatacccttggactggacgctctactatcttcgaacgaaagcattgcagcaagccatcaccaaggaagaattggcctgggtgctccacagcttcaatcaaaagcgcggctacaaccagtcgcgtgatgaagtcaaagatgaggatgcgagtcagaaggaagagtacgtgaaagtcaaggtcgtgagcgtcgttgacagtggagagaagaaaaagggaaagacctcctatatcgtcaccacagagagcaatctgcagttcaccacggaaaacgccgccgctccctcttggctggacaaagaacgggaattcatcgtcaccaccaagttgaatccgacgggacttcccaagatgaatcaggaaggccgaatcgactgtacggtgcgtattcccaaggaagaggattgggaactgaaaaagaaacgcacagaagccttgattgccgacagccacatgaccgttggtgaatacatcttccattcccttctcgacaatcccgatgcgaaaatcaagggagcaaaagtcggaacgatcgaccgccatttctataaggaggaactgattgccatcctcaagaagcaagctgcgttccatcccgaactgaaagacgaagaacggtacgccgaatgcgtgagtgctctatatgccagcaacgaaatgcaccgcaatatcctgtcagcttgggatatgccacgcttgattgtcaacgacatcatcttctatcagcgcccgctaaagagcaagaagtcggatatcgcagaatgcccctttgaaagccgctacttcatggataaggagaagaagcttcaaaagcaaggcatcaagtgtatccccacctcgcatccgcatttccaggaatatcgcatctggcaattcctttccaatttgcgtgtccttcgtcgtgaagtttgggagaacgggcgctatatgacggatgtggacgtctctgcccattatctgacagacaaggtgaaagttgagctctacgagtggttggcaggtaaagccaacgtgaaacagaaggaactgctttccaagctgcggatgagcgaaaaggagttccgatggaactacgttgaggacaatatctatccttgcggcgaaacacgcagccttctttcgacccgtctgaagaaggccaaactgcccctttccctgctcgacagtccttcatccgatggatcccacacctttgagtttgagctttggcacattctctattccgtcagcgacctcgcagagcttcgcaaggcgctgaggagatttgcccgcaaacacgacttcacggccgaacaacaggaggcgttcgttgaaacctttgtgaaatgtccgccgttcaagaaagattatggtgcctacagtgacaaggcccttgtcaaactgctctccctcatgcgcataggcaaatactggaatgccgaccgcatcgatgcaaacacccgtcggcgcatcgcctgtctgcttgacggagaagcctgcgacagtatctctttgagaacccgggagaaggttgcggagcgaggacttcagcaatccatcgaacagttccagggcctgccgcaatctttggcctgctatgtcgtttatgaccgccatgccgaagcttcagaggtcgtgcgttgggaatccccagccgatttgcagcaattcaccaggcagttcaagcagtattccctgcgcaatcccatcgtggaacaggttgtgctcgagacgctgcgtgtggtccatgatttgtgggaagagattcagaaggacggcggcaccatcgacgaaatccatttggaaatgggtcgcgacctgaagaatactgcagaacagagagctagaatcatgcgtcgaaacagggaaaacgaaatgaccaatttccgcatcaagctgctcttgcaggaacttcatgattgccagcccgacatcgagggcatccgtccctattccccctcacagcaggaattgctgcgcctctatgaagaaaccgtttgggaaagcgagatcggaaagtcgggaggaaaagaggcgtccaaagacattccagatgatatcaagaagatccgcgacctgctttcgaagcccagcgataagcccatcccccagagtaccatccagcgttatcgtctgtggctcgaccagaagtatctttccccctacacgggccgccccatccccttggcccgtctgttcaccgcagactatgaaatcgagcatatcatcccgcgctccatattcttcgatgactcctatgccaacaaagtcatctgtgagagcgctgtcaacaaactgaaaaacaaccgactgggcatgcagttcattcgggagatggacggcagggttgagacggtgaaactcggagaaggacgtgagaccagcatcctttcggtggacgggtatgtggatttggtgaatgacctcttccgcaacaatcctcgcaaacgcaacaacctgcttgctgaggaaatcacagaagatttctgtcatcgtcagttgaatgacacccgctatattgcgcgctacatcaaaggcatcctttccaacattgttcgtcagcgcgctgcagatggcacgcttgaacaagaggccacgtcgaagaacctgattgtctgtacggggcagatcacggaccgcgtgaagcaggattggggacttaacgacgtttggaaccatatcatcacgccgcgtttcgaacgtctgaaccgcatgaccggttccaacgattacggagaatggtgtagcaaggaaggcaaacgctatttccagacccgcgtgccacttcatttgcagatcgggttcaacaagaagcgcattgaccatcgccatcatgccatggatgcaattgccattgcctgtgtcaaccgcaatgtggtgaactatctgaacaatgctgcggcgcatgccacagaccgaatggacctacgcatgagaatttgccgcccatcaggaaacggtcagacgaaaaaggagattcgcagcccgtggaagaactttgctcatgatgcagaatgtgcattgcaggccatcacggtaagctttaagcagaatgtgcgcatcatcacgaaggctacaaacacctacgaaggctatgatgcttcgggcaagaaggttcgccgctgtcaaacttcattggatcactactccattcgcaagcccttgcataaggatacggtttatggcgaagtggtgctgccggttgtcaatcaagtacctttgaagaaggcattgctccgagtgaaccgtatcgtcaatggcaagttgagaacgaaaatccaggaaatgcaatccagcggtctcaccgacaagcagattgtggatttcttcatgaagacttgtgctgactctcccgaatggaactccatcaacttcaagaaaattgaagtacgtgcttattccaatgaagaaggacaaaccagaatggccgccattcgtacggcaatcgatgagtcgttcagcgagaaggtgatcggaagcatcacggatgtaagtattcagcggattctgctcaatcatctgcgtgaatgcaatggtgacagcgaggaagcgttcagtcccgaaggtattgagacgatgaacagaaagattgtccgtttgaatggcggcaagcctcatcttcccatctataaggtgagattaggtgaagctatgggcaagaaatttgctgtgggacaacgcggaaacaaaggcaagaagttcgtgattactgcaaagaatacgaatctgttttttgcggtatatgccaacgacgaaggcaaacgttcttttgagacgattgatcttcactgcgctcttgaaatgcagaaacaagggaaagatgtggcaccttcaatcaatgaaaaaggcgataaactgctgtttgtcctttcaccgaatgatttggtttatgtgccttcggaatctgaattgcaacatgacattgattctgaagacttgaagttggatcatgttttcaaggtcgtttcttttagcgagaacagatgttgctttgtgcctcacagcatctcctccccaattgctgcaggcttcgaattcaattcgcttaataagattgaagtcgtacctcgcttgggactatttgaacaaggcaaagaaacagtaagcatcaagaatatctgccttccgatcaagatggaccgcctcggtcatctccatcttgtgaaaatctgatattcttcacaacacacatcaacaaaagactgcaactacaagaattccgattctcgtcgttagcagtcttttgtgctttaacccaaatgcaaaagtgatgataaagaaaaccctttatttcggaaatcctgcgtacctcagtctgcgcagcaaacagatggtcatcaaaatgcccgccgtcgaaaaggccgacaatgtggcgcagatgattcgggatgaatccgttgtcaccaaaccgattgaagacctcagcgtggtcgtactcgaccatcgtcagatcacgatcactcagggccttctggaagccctgcttgaaaacaacgtggccgttatcacctgcgatgcccgcagtatgccggtcggactgttgcttcctctctatggacattccacgcaaaatgaacgtttccgttcgcagctggcagcttcgttgccattgcgtaagcaactttggcaacagaccatacgggcaaaaatcgagaatcaagcctgtgtgctcggcaaaatgacagaagtggaaaaccgttgtatgttcgtctgggcaagtgatgtgcgaagcggagaccctgataatctggaggcccgtgcagcagcttactattggagaaactttttcagcaaagaacatcccgacttcacgcgcgaacgcgaaggagctgctcccaacaatttgttgaactatggctatgccatacttcgagcggtcatcgcccgctccttggtatgtagtggcctgttgcccactttgggcatacaccatcacaatcgctataacgcttattgcctggctgacgacatcatggagccttatcgtccttatgtcgatgaactggtgatgcgtatcatcaggaaccatgcagattatgccgttctgacccgggagttgaaagcccaattgttgaccatccccaccttggatgtggtcatcaatgggaaacgaagccccctgatgattgccgcctccacaacgactgcttcattggctaagtgcttcaatggggaacagcgacgaatcatctatcccaccatgatgcaaacttgacacaactgatggaccgactaaatgaatatcgagtgatgtggttactggtgttctttgatcttccaacggatacaaagaaaaagcagaaagaatacctgaaattccgcaatttcttgttggaagatggtttcacgatgtttcaattttccatctatatgcgcaattgtgccagtagtgagaatgctgctgtacatacccaacgggtgaaatcccatctgcctccccatggaaaagtgggtatcctgtgcattacggataaacaatttggaaatatggaactgtttttcggaggtaacgcacaggcgacaccctctgaaggtacacaattggaattattctgataaaaaagaaaagagatagcataaggaaaacgcgagtggtttgccttggctatctctttttcggtaaactttttttaattctgaattgaatactatctagttgatagtcagtactttgcaaacatcggggtgtttaccgtattgcaaaggtacgattttgaaagcaattcacaacctggagcgtcagactaatgggctggcattaggtgtttaccgtattgcaaaggaacgattttgaaagcaattcac

SEQ ID NO: 760 - DNA, 6962 bp, synthetic construct
  misc_feature 1..6962: note = Synthetic
  source 1..6962: mol_type = other DNA
aacctaatgttttcacaacggaataatccttattgtgacttgcttcattttagtatgacaaatgtataaaataaatatggaaatacaatgcttatattgaaaaaaaaatacctttgaagaaaatattcaaaattaatactatgagaacgatacttggattggatttgggaaccaatagtataggatgggctgtaataaactctgtaattaaagaacagaccgagaaaatttggatagaaatggctggcagtagaataattccgatggatgctgctatcttgggagactttgacaaagggaattctatatcacagacagctgaaagaacccgtttttagaggggtgcgtcgattgagagagcgacaattactacgtcgtgaacggttgcataaagttttgaagattcttggcttcctgccggaacactatttaaaaggaatagattttgaaaagcatacgggtaaattcttgtcaggcagcgaaccgaaattgccatgggtaaaggatagatggggaaaatactcttttttatttcagacagcgtttaatgaaatgttggcggattttgcaaagcaccaaccttcattggtttttgatggtaaaaaaatcccttatgactggacagtttattatctccgtaagaaagctttgacagaaatgataagtaaagaagaactggcatggattcttttgaactttaatcagaaacgtggttattatcagcttagaggagaagaggaggaagacaatgcaggaaaatctgttgaattttatgcattgaaagtcttgtcggtggaagcgactgatgaaaagaaaggccgggatatatggtataatgtacatctggagaatggatgggtatatcgtagaagcagtaatgtcccattggactgggaaggatgggtaaaagagtttattgtcactactgacttaaatccggacggtactccaaagcttgataagtatggtgaggtgaagcgttctttcagagcgcctaaagaggatgattggatgttaataaagaaaaggaccgaagcggacattgccggtactcataaaacgattgggagttatatatatgatgctttgttgcaggagccacaacaaaagataataggaaaattggtgaaaacagtagaacgaaagttttacaaggaggaactgaacttgattttgcagaagcaatgtgcttttcatgcagaattgcaggatagagatttatacatgaggtgtattgaagcgttgtatccgggtaatgaagtgcaacggagaaatatagctaaccgggactttatctatttgttaatagatgatgtcttgttttatcaaaggccgttgaaaaccaaaaagtcattgatagctaattgcccattatgaggaaaatgaatatgtaaaccgcaaaacaggtgaaatcaaaacagctccgttaaagtgtatagccaagtcacatcctctttttcaggaattccgtttatggcatttcctttccaatattcgggtatatcaaaaggaaagggaagtaaatggaactttatatttggatgtggatgtgacaacggagtttttgaaaacagaagatgattatgtggctctatttgattggctgaactctcgaaaggaaatagatcagaaagcttttctgagatatcctgcgtttggactgaaaaaggaaataaataattatcgttggaattatgtcgaggataagttctacccatgtaatgagacgagacatgcgattctttcccgtttggaaaaggccggtattggtattgactttttatctgatgaaaaagaaacagccttgtggcatatcttatattctgtaagtgacaagcaggaaatagagaaagcattggcgacttttgcggttaagaacggattgaatgaatcctttgtggaagtgttcaagaagtttcctcctttcaagtctgaatatggcgcttattctgccaaggcgataaagaagttgttgcctttgatgaggtgcggaaagtattgggatatgtcgttgattgatggtacaaccaaggaaagaatagaaaggataatagcaggtgagtgtgatgagagtataggtgccaaggttagagaaaaggcgatgaacttgtcggatatatcttgttttaagaggcttccgttgtggttggcttgttatgtagtgtataatcgtcattccgaagataaagaaataaccaaatgggaaacccctgctgatattgatgcttatctggctgcttttaagcaacattcactacgaaatcctatcgtagaacaagtgataaccgagacattgagagttgtcagggatatttggaaacaggttgggaaaattgatgaaatccatattgagttagggcgcgagatgaaaaatcctgcggacaagcgaaaaagaatgactactcagattctggagaatgaaaatgccaatttacgtataaaggcattgcttgctgaatttgtgaatccggaatatggggtagagaatgtccgtccctattcaccaagtcaacaagaaatattgcggatttatgaggatgcagttttaaagggggaagaacagattccggaagatatagatgtgatattgaaaaaattcaataccagtaaattaccgacgaaatcagaattcttgcgttataaattatggctggaacagaaatatcgttcaccttataccggtgagctgatacctttggctaaattatttactgctgcgtatgagatagaacatgttatacctcaatcccgctattttgatgattcattctctaacaaagtgatatgtgaatctgctgtgaacaagttgaaagataatcaactgggatatgagtttatcaagaatcatcatggacagaaagtggaagtgggttttggaaagacagtagaaatcttttctgtggatagttacgaacgttttgtaaaagaacaatatgcaaaatcgggcataaaaatgaagaaattgttgatggatgatattcccgagcaatttattgaacgccaattaaacgatagccggtatatcagtaaggttgtcaaaggacttttgtcgaatatcgttcgtgaaaagaatgatagcggtgaatatgaaccggaggctgtttcaaaaaacatattagtttgtacaggaaacgtgacggacaggctgaaaaaggattggggcatgaatgacgtctggaatagtattgtaagtcctcgttttgaacgtttaaatgctttgaccgaaacccagtgttttggacattgggagaataaagacggaaaaaaagtttttcaaacagcagtgccccttgaatatcagaaaggattcagtaagaagcgtatagaccatcggcatcatgctatggatgcaatagtaatagcttgtgctacacggaatcatgtaaactatctgaataatgagtctgcaagccggaatgcgaaaatttcccgttatgatttgcagagactgttgtgtgataagagtgaggggggatggtaatggtaattatagatggattataaagaaaccatggactacttttacgcaagatgcaagggaagcgttgagtgggataatagttagcttgaaacagaatttgcgtataataaataaaacaaccaatatctatcaacattttgatgcaaatgggactcgtgtttatgagaaacagaaaatcggtgatagttgggctatccgtaaaccgatgcacaaagatacggtttttggagcggtaaatttaagaaaggtaaaggtggtacgcctatctgtcgctttggatactccttctatgattgttgacaaaagagtcaaaaaataaggttcttgaattgttatcatataagtatgataagaagaaaattgaaaaatatttcaaagagaatgctttcttgtggaaagagctggatatagccaaagtcgctgtttattattttacggaaaatactactgaacctttagttgcagtacgtaaatcattggactcaactttcaatgagaagaagatagcatcggtgacggatactggcatacagaaaatactcctgaatcatctgaaatcaaaagaaggaaaggcggagttggctttttctgcagaaggtatagaagaaatgaaccgtaatcttttacaactgaatgatggtaaaggacatcagcctatatataaggtgagggtgtatgaaccgcgtggaaataaatttaaagtcggtgtacttggcaataaaggtgccaaatgggtggaagctgctaaaggtactaacttgttctttgctatttacataacagaagatggaaacagaacgtatgagactattcctttaaattgggttatagagcgtgagaaacaagggcttgttcctgtaccggacagaaatgaaaagggagataaattattgttttggctgtctcctaatgatttggtatatctgccaaccgaagaagagcgggattttggtaggataaatgaaccgatagatagggggaggatttataagatggtttcatcttctggtaatcaatgcttttttatacctcaaagtatatcaaatgctattatttccactaaagaattaggttctaataataaagcagaaaaatcatgggatggtgaaatgataaagaatatttgtattccagtaaaagttgataggttaggccgtattatagaagttaagtatagagtaaatgaataatataaagttgtttcaagagaaaaagatccgttccgtatggaacgaggaagaacagcaatggtatttctctgttgtagatgtagttggtgtattgactgatagtgtgaatcctacggattatctgaagaagatgcgaaaacgggatgaagaactggctacttacctggggacaacttgtccccaggtagaaatggtgacagatacaggaaaaaaacgaaaaacgttggcggcaaatgtgcaggctttattccgcatcattcaatctattccttctcctaaagctgaacctttcaagctttggttagcacaagtaggttatgagcgtgtacaggaaatagaaaatccggaattggctcaagagcgcatgaaagaactatatgagcaaaaaggttatccaaaagattggattgacaaacgtttgagaggaatcgccattcgtcagaatttgacggatgaatggaaagaaaggggaatcacggaaaaaagtgattatgccattcttacggcagaaatatctagagcaacgtttggattgactccttcggattataaaatatataaggggctgacgaagaaaaatcagaatcttcgtgaccacatgtctgatttggagttgatatttacaatgcttggagaacgtgtcacaacggaaatttctcagaaagaaaaaccagatacatttactaaaagtaagcaagtagcacaacgtggaggaaatgtagccggagtagcacgtgaacaagctgaaaaagagttgggtagaagtgttgtttctcctgaaaattttctgttggattctgataaacagaatgatactttagagcttccttttcttgaaaatgatgaatgaataacttgtaaagtctatatgctatgattaagaaaacactttattttgggaatccggtctatttgtctttaaaaaatgcccagttggtgattaaattgccggaggtggtgaagaacagtgctttacccgaagggttcaaacgaatgtccgaagtgactaagccaatagaagatattggagtagtggtgttggacaataagcagataaccattacttcgggagtattggaagctttgcttgagaataattgtgcagtcataacctgcgattctaaaagtatgccggttggtttaatgcttcctttgtatgggaatactacacaaaatgaaaggtttcgtcatcaacttggtgcgtctctaccattgatgaaacaactttggcagcaaacaataaaagccaaaatagagaatcagacggtagtattgcatgaatgtgctggagaagaaataaagtgtatgaaggtgtgggctgcagatgtaaagagtggagattctgataatttggaggctcgtgcagctgcttattattggaagaatttgtttaaaatagaaggctttacaagggatagagaaggtattcctcctaataatttgttaaattatgggtatgctattttgagggcagttgttgctcgtgctttggtgacaagtgggcttctacctactttgggaatacatcatcataatcgttataatgcttattgtctggcagatgatataatggaaccttatcgcccttatgtggataggttggtatatgatatattcaaggaagcagaaccgaattgtgttgaattgacgagagaattgaaagcgaggttactgacaattcctacattagagactgttatttcgggaaaacgtagtccgttgatggtagctgttgggcagactacggcttctctgtataaatgtttcagtggtgagttgcgtaaaatatcctatccagagatgtgatggaccggtttagtgaatatcgcattatgtgggtattagtgtgtttgatttgcctaccgaaaccaagaaggataaaaaggcgtatgcggaatttagaaaaaatctgcaaaaggatggatttacgatgttccagttctctatatatgtccgtcattgtgcgagttgtgagaatgcggaggtacatataaaaagagttaaatctttcttaccggactatggaagtgtcggaattatgtgcattacggacaagcaatttggaaatatagcacttttttatgggaaaaagactgtggatgtgaatacgcctggacaacaattagaattattctaaaaaaactcccgcgcaatggcgggattttttccagaagcagcattcttttttatattctaatactatgtgtaatcgtttgaatattagattgttacttgtaatcagctgtttccaatggttcaaagatactaaaatgaaagcaaatcacaacccg

SEQ ID NO: 761 - DNA, 6935 bp, synthetic construct
  source 1..6935: mol_type = other DNA
  misc_feature 1..6935: note = Synthetic
ttatggtatgctcccaaagactgggaattgggaacagatttttcttattacctatataagggatattccaacggatatggagagccggagtttatctggaacattacattgtccaaatcaatcaaggcatttaccttaagtctgacagcatctgatatcctgaatcaggaaaaatccatgtaccgtacagtgacatctggctacagccaggagtcatacagaaacatcttaggaagatatatagttatcggactgaaatacaacttcggcaagatgaacgcaaaaaatagccagaaagcccaaagtgcaatgttcatgggagttttctaaacatgttctatttaaagataaaagtctccactaaatcaaggggagacttttctttatatacacaacttaacataatataaattgtgtaacaaataatcaatagtcaaaaaatgagttaagtacagtgattgtaaaagatatattattttgaaattgattaaatatcagtatatttacaattataaactcaatattgtccctaagcttatggaaaagaattttgctatatttttaattacattgcttgctgttgctctttcaatctggaatacatacagcttttgcattcaatccggggatgcaccagagacaagcataggaacaataacttatattttcaactgacttctacaaaaaaagacgaggaatcacttccccgtcttggatgttttcacaacggaataatccttattgtgatttgcttcagatagcacaaagttaataaacatatttagaaaaccaaataacattataacttattatgagaaaaattcttgggcttgacttgggaaccaattccataggatgggctgtggtcaatactgtagaagatgaaaatggcaacttcatatttaacagtatatcaagggctaacagtcgtatcatacctatggatcaagccactataggagacttcaacaagggcaattcaaaatcccagactgcagagcgcacaagactaagaggcgtcaggcggatactggaacggagccatctcagaagagagcgcctgaacagagtcttgtcgataacaggctgtctcccctatcattacgccaaatacctggataaatacggcaaactcatcaaaggaactgaaccgaaaatagcatggcaaacaaacgaatccggcaagcctgaatttattttcaaagacagttttcaggaaatgctggaagatttcgccgcaaacaatccggaagttctccaaaacggcaaaaagattccgtacgactggacattgtactatctccgcaagaaggctttgactcagccggtatccaaatatgaattagcttggatacttatgagtttcaaccagaaaagaggatattatcagctcagaggagaagaagaggaaaatccgtcaaaactggaggaatattattctttgaaagttgttgaagtaattgaaactgaggagaaaaaaggaaaagattcctggtttgaaattgtgttggaaaacggatggatataccgaaggacattcagtgaaactcctgactggacaggaaagataaaagatttcattgtcactacagcccttgactctgaaggcaagcctaaacttgataaggaaggaaatataaaacgttcattcagaatacctaatgatgatgactggactttgctcaaaaagaaaacagaatatgatatagacaactccggaaagactgtcggagcatttatttatgattctttgttgagaactccttctgccaaaatcaaaggaaaacttgtccgtacagtagaaagaaagtattacagaaaagagcttgaagccatacttgacacgcaaatcagactgaatcccgaattacagtcagaagaattgtatgttaaatgcattcaagcactataccccaacaatgaggcatatcgtaacagtattgcagacagagggtttaaatatctatttgtcaatgatataatattttatcaaagaccactgaaaagcaaaaaatcactgatcagcgattgtcctcttgaagaacgcatatatcttggctcagacggtaagaagacagcacatataaaatgtgcccccaagtcaaatccttattttcaggaattcagattatggcagttcctctcaaatctcaggatttatgaacgtgagagaaacattgacggcagcctaaaggaaaatatcgatgtgacagctgcgttcatacctgacctcaatgctttggctgacttattcgactggctcaatgacagggaatccattgatcagaaggccattctgtcatatcctgggtttcatatggataaggcctctcaaaagaagtaccgttggaattatgtcgaggaaaaatcttatccggccaacgagaccaggggttctatgcttaagtctttgaaaaaaacaggagttcaggctgactttcttactcctgaaaagcagtatgaattgtggcatattctgtactcagtagaagacaagatagaaataagaaaggcactggaaaagtttgcagaaagaaatggtttgcctgaagaattttcagatgtcttttccaagcagcttccttataaaaaagactatgcttcatactccgagaaagcactgaaaagattgctgactctgatgagggcaggaaaatattggagtgacgaagctcttgacagtcagactaaagaaagaattgaaaaaatcctttcaggagagtatgacgagaagattgcggagcgtgtcagacaaaaggctgttgaacttcagtctgtatctgattttcaaggacttcctgtatggcttgcctgctatgtaatttataacagacattcagaatcaaaggatattgagaagtggtcttccccagatgatattgacagatacttgaaaaacttcaagcaacattcgcttcgcaatccgattgtcgagagtgtcatcacggaaactctcaggactgtccgtgatatctggaaagcggaaggacagatagatgagatacatattgaacttggaagggaaatgaaaaatcctgctgacaagagaaaacgtatcactgaacaggttcttaaaaatgagaacaccaatttgcgtatccgtgcaatgcttacggaatttatgaatcctgagtttgatatcgacaatgtccgtcctaactctccgtctcagcaggaaatattgcgtatctatgaaaactctgtattggaaaatactgaaatccctgatgatatagatgctatacttaagaaatttgacagttcggatacagcaaaacgtcctacttcaaaggaagtcttgaaatataagatatggcttgaacaaaaataccgctcaccttataccggacagattattcctttgggaaaactgtttacatcggaatattagatcgagcaaatcattccgctatcaatatattttgacgactcattcaacaacaaagtcatttgcgaatcggaagtcaataaactgaaagacaattcattagcctatccttttataaagctgcacgaaggcgagataattacactcagcggtggacgtcaggtaacaatactgactgtcgaggcttatgaaaaattcgtaaaggaaaattatactagtcgggagagctctgccaaaagacgcaatcttcttgcggaagatattcctgagggctttatacagaggcagttgaatgacagcagatatataagcaaggtagttaaaactttactgtcaaatgtagtccgtgaaaaagatgaagaagaggacatttcaaagaatgtcatagtgtgcaacggctccattacgacacgtctcaaaaatgattggggtgtaaatgacttgtggaaagagctggttatgcctcgattcgagagattggattcaatgcttcctggcgagtcatttacggtggttaatgccaatggcaaaagagtgcctacagtacctttctcccgtcagagagggtttgaaatgaaaaggatagaccatcgtcaccacgcgatggatgctattgtaatcgcttgtgcgacaaggaatattgtcaactatctgaacaattcatccgcctgccgcaattcaaaagtcaaacgctatgatttgcagcatcttgtgtgtacaaaaacgcatcctgatgcaaacggaaattacaaatgggtggtgaatatgccttctcctgatttccttatgcagacaagaacggctctggaggactgcatcataagtttcaagcagaatctcagaataattaacaagacgaccaaccgctatgagaaaatagaggacggtaagaaggtccttgtacgccagacaagcggagacagttgggcaatccgcaagtctatgcacaaggatacagtatatggtgagattgacctgcgcatgatgaagtcggtttcactgaaacaggctgtgaaacaacctgagagaatcgtcaggaaagagctaaaaaccaagcttttgcagtgtactactgaaaaagagatgcttgcactcctgaaaaagcaatatccggaactgtcaaaaatagatgtctattactttacctctgaaaccaaagacagatattttgcttcaaggacagcattaaataaagatttcaaaaaagagatgattgaaaactgcattgcggataccggtatcaggaaaattcttcttaagcacctggaactttgcggcggatatcctgaaatcgcattctcgcctgacggtatagacaggatgaatgcaaatatagtcgaacttaatgatagaaagttccatcagcctatctataaggtcaggaaatatgaaaaggccgacaaattccctgtaggtgaagtgggtgcgaagtcaagaaagtttgtagaagcggataagggaacaaatctcttctttggtatttatatttccgaggatggcaaacgctcatattcttcaatcccgttgattgatgccataaaccgagaaaaggagggcttatcccctgtacctgagtcaaaagatggagacaggctgctattttacctttctccaggagacttggtatatctacctgccccagatgatttggagcgaggatatgtgagtggagagttggacaaatcaaggatttacaaaatggtgagctgtacaggctcagaatgtcattttgttcctcaaatggttgcatgtagcatagttgacaaggtagagttttcaaaactaaataagttagctagagccattacaggtgaaatggtaaaagaaatatgcattcctttgaaggttgaccgtttgggtagaattactgaatttaatagcaaaatcagatgataaagcgttcgttatattttggaaatccggcatatctgtccctaaagctccggcaactggtaatcagaaaacctgatacaacgggcgatatgcctgattttgatgcagatatgtcagaaagtgcagttatcaggactattcccattgaagatatagggcttataatccttgattctgcacaaataactgtcactcaaggtcttttggaagcccttcttgagaacaactgtgctgtagtaacctgtgacagaactcacatgcccgtaggacttctgcttccgctatatggaaacaaggtacagaccgagcgttattcagaacagataaaagcttcattacctcttaagaagcagctatggcagcagacgatccagtcgaaaataagaaatcaggctgcaatgctgaaatatgtttcaggctcggaggcaaaaaatatgcttatatgggcagatgcggtcaaaagcggagacacggacaatcttgaaggccgcgctgcagcattttattggaaatcattatttattgacaatcctaaatttaccagaggtgacaatgatattgcaaatataatgcttaattatggctatgccattctccgtgcgatagttgcaagagctttagtcggtgccggacttctgcctacattgggcattcatcatcataacagatatgatgcatactgtcttgccgatgatataatggagccttacaggccatacgttgacaagttggtcgtagatattgttaatgactatggagttcctgatgagtttgatttgaatgtaaagagaaaattactggaacttcctgtacaagaggtggtcatagatgatatgcgcaggcctcttatgattgctgtaagccagactgtcaattccttacggaagtgctttgccggtgaaatcaggaagttgatatatccggttatttagatactgtttaagaaaatttcaataatggacaggttcagtgaatatcggattatgtgggttttagttttcttcgatcttccgactgataccaaaaaagaacggaagaatgctgcggagttcagaaaacgtctgctcgcggatggtttcatcatgttccagttctcaatttatatgaggcactgcccttctgcagaaaacgctcaggttcacgtcaagcgagtaaagtcttttttgcctgaatatggacaggttggtatcatcagtattactgacaagcagtttgaaagtatggagctcttttcaggtaaaaagcctaaaaaatccggggatacttatgttcagctggagcttttctgatgaacctgagatttatgactattcttaatgccactctgctcggccttctgttcaaaatgacagagttggcatatctttcgacagcgaactcctgattaagtctggatgacagggagtaatcatttcaccatcagactcctgacctgttcttcagaaagcccggtcagggaagaaatctgttcaaccgacatagaagccatcaacatattcctcgcaatctcaaacctttcttcttgacgtccctcttcacgtcctttagcttctccttgcttcttcgcaaagtctatcgtattttcataatcgtaaatcatcttctgcgatttttggtaatcatagtactcatcaggcgtgaagttacataattc

SEQ ID NO: 762 - DNA, 6901 bp, synthetic construct
  source 1..6901: mol_type = other DNA
  misc_feature 1..6901: note = Synthetic
tttaaaataaatatgaaaaagcaatgcttgtattaataaaaaaaataactttgaatgatatataaaaaaataatattatgaaaacgatactgggacttgatttagggagcaatagcataggatgggctgtaataaattctgtaataaaagaacagctcgaacgaatttggatagaaatggcaggaagcagaattattccgatggatgccgctatattgggagattttgacaaaggaaattctatatcacagactgctgaaagaacccgtttcagaggggtacgccgtctgcgtgaacggcaattgttacgtcgtgaacgattacataaggttttgaagattcttggttttttgccggaacattatttaaaagaaatagatttcgaaaagcatcccggaaagtttttggcagacagtgaacctaaattaccatggcttatggatgaacggggaaaatatacttttttatttcaaacagcatttaatgagatgttggcggattttgcaaaacaccaaccttcattagtgtccgatggtaaaaaagtaccttatgactggacaatttactatctccgtaagaaagctttgacggaaatgataagtaaagaagagttggcatggattcttttgaattttaatcagaaacgtggttattaccagcttagaggagaagaagaggaagataatgcaggaaaatctgttgaattttatgcattaaaagttttgtcggtggaagcgactgatgaaaagaaaggtcgggatctgtggtataatgtgcacttagagaatggatggatatatcgtagaagcagtaatgttccattggattgggagaaccagataaaagaatttattgtaactactgacttgaatccggacggtactcccaagcttgataaatatggtgaggtgaagcgttctttcagagctcctaaagaggatgattggatgttgataaagaaaagaaccgaggcagacatagccaatactcataaaacgattggaagttatatctatgatactttgttgcagaatccacaacaaaaaataataggaaagctggtgaagacagtagaacgaaagctttacaaggaggaactaaacttgattttgcagaaacaatgtgcttttcatgcagagttgcaagatagagatttatacatgagatgtattgaagcattatatccaggcaatgaagtgcggcggaaaaatataattaatagagattttatttatctgttaatggatgatgttttattttatcaaagaccgttgaaaactaaaaagtcactgatttctaattcccttacgaggaaaatgaatatataaacagggaaactggtgaaatcaaaaaagctcctttaaagtgtatagccaaatcacatcctctgtttcaggagtttcgtttatggcatttcctttcaaatattcgggtataccaaaaagaaaaggaagtaaatggaactttacatttagatgtggatgtaacagcggagttcttgaaaacagaagatgattatgtggcttatcctttatttgattggctgaattctcgaaaggaagtagatcaaaaggcttttctgagatatccaaaatttgggttaaaaaaggaaatcaataattatcgttggaactatgttgaggataagttatatccatgtaatgagacgagatatgcgattctttcccgtttggagaagcttggtgttagtcttgattttttatcggatgagaaagaaacagccttgtggcatattttatattctgtaagtgataagctggaaatagagaaagctttgcggacctttgcggttaagaacggattaaatgaatcctttgtagaagtgttcaagaagtttcctccttttaaacctgaatatggatcgtattctgctaaggcaataaagaaattgttgcctttgatgagatgtggaaggtattgggatgcgtccttgattgacgatgcaactaaagacagaatagaaaggataatgacaggtgagtatgacgggaatatagctgccaaggttagagaaaaggcgataaacttgtcggatatatcttgttttaagaagcttccgctatggttggcttgttatgttgtgtataatcgccattctgaaaataaagaaattgctaaatgggagactcctgcggatattgatgcttatttggcttctttcaaacaacattcactgcgcaatcctattgtagagcaggtgataatcgaaacattgagggttgttagagatatttggaaacaggttgggaagattgatgaaattcacattgagttagggcgtgagatgaaaaatcctgcggacaagcggaaaaggatgactgcgcaaattcaggagaatgaaaatgctaatctacgtataaaggcattgcttgctgaatttatgaatccggaatatggggttgaaaatgttcgtccttattcgccaagtcagcaagaaatattgcggatttatgaggatacggttttgaaaggggaagaacagattccggaagatatagatgtaatattgaaaaaattcaataatagcaaactaccgacaaaatcagagtttttgcgttataaattatggttggaacagaagtatcgttcgccttataccggtgagttgatacctttgggaaaattgtttacggctgcgtatgagatagaacatataattcctcaatctcgttattttgatgattctttttctaacaaggtgatatgtgaatctgctgtgaataaattgaaagataatcaattggggtatgagtttatcaagaatcatcacgggcagaaagttgaagtgggttttggaaaaacggtagaaattctttctgtggatagctacgaatgttttgtaaaagaacaatatctaaatcgggcgtgaaaatgaagaaattgttgatggatgatattcccgagcaatttattgagcgccaattgaacgatagccggtatatcagcaaggttgttaaagggcttttgtcgaatattgttcgtgaaaagaatgatagcggtgaatatgagccggaggctgtttcaaaaaatatattagtttgtacgggaagcgtgacggacaggctgaaaaaggattgggggatgaatgatgtttggaacagtattgtatatcctcgttttgaacgtttaaacgctttgactggaacacagtgctttgggcattgggagaataaagatggaaaaaaagtttttcagacggaattgccccttgaatatcagaaagggtttagtaagaaacgtattgaccataggcatcatgccatggatgcaatagtgatagcttgcgctacgcggaatcatgtgaactatttgagcaatgagtctgcaagccgtaatgccaaaatctcccgttatgatttgcagagattgttgtgtgataagagcagagtagatggtactggtaattatagatggattataaagaaaccatggaatacttttacacaagatgcaagggaggcattggataaaatagtgattagctcgaagcagaatttgcgtataataaataaaacaactaatatttatcaacattttgatacagaaggaaatcgtgtttataagaaacaggaaaccggtgatagttgggctattcgtaaaccgatgcataaagatacggtttttggaacagtgaatttacgaaaagtaaaaagtgtacgattgtctgtggctttggatactcctaccatgattgttgataagagagtgaaaggcaaggttcttgaattgttatcatataaatatgataagaagaaaattgaaaaatatttcaaagagaatgttttcttttggaaggatttggatatagctaaagttgcagtctattattttacagaaaatacttctgaacctttggttgcggtgcgtaaaccacttgattctactttcaatgagaagaaaataaaagaatcggtaacggatactggcatacagaaaattcttttgaatcatttatctgcaaaagaaggaaaggcggatttggctttttctgcagaaggaatagaagaaatgaatcgtaatattttacagttgaatgatggaaaagaacatcagccaatatataaagtgagagtgtatgaaccacgtggaaataaatttagagttggtgcatttggtaataaagggactaaatgggtggaagccgctaagggtactaatttgttctttgctatttatgcaacagaagatggaaaaaggacgtatgagactgtccccttaaatttggttatagaacgtgagaaacaagggcttattcctgttccggatagaaacgaaaaaggggataaactgttgttttggttatctcctaatgatttggtgtatctgccaactgaagaagaacgggaatttggtaggataaatgagccgatagatagggggcgggtttataaaatggtaagttgtactgggaatgagggacattttattcctgtaaatgtggctaatccaatattgccgactattgaattaggaagtaataataaggcccagagagcatggaataatgaaatggtaaaagatatttgtatcccagtaaaagttgatagattgggtcgtattatagaagttaagtataaagcaaatgaataatataaagttatttcaagaaaagaaaatccgttccatgtggaacgaagaagagcagcaatggtacttttctgttgttgatgtagttggtgtattgactgatagcgtgaatcctacggactatctgaagaagatgagaaaacgggatgaagaactggctacttacctggggacaaattgtccccaggtagaaatgctgacagatacaggaaaaaaaagaaaaactttggcggcaaatgtacaggctttattccgtatcattcaatccatctcctctcctaaagctgaaccttttaaactttggctggcacaggtggggtatgagcgtgtgcaggaaattgaaaatccggaattggctcaggaacgcatgaaagaactttatgagcagaagggttatctaaaggattggattgataaacttctgagaggaattgccattcgtcagaatttgacggatgagtggaaagaaaggggaatcacggaaaaaagtgattatgccattcttacggcagaaatatctaaggcaacgtttggattaagcccttcggattataaaatatataaaggactgacaaagaagaatcagaatcttcgtgaccatatgtccgatttggaattgatattcacgatgcttggcgagcgtgtcactacggaaatctctcagaaagagaaaccggatacatttactaaaagtaaacaagttgcacagcgtggtggaaatgttgccggagtagcacgtgaacaggctgaaaaagaactgggtagaagtattatttcttccgacaattttttgttggattcagataagcaagatgataccttaaaacttccttttgaggaaaatgatgaatgaataatttgtaaaatctgtatactatgattaagaaaacgctttatttcggaaatcctgtttatctctctttgaaaaatgctcagttggtgattaaattgccggaggtcgtaaaaagctgtgccttgcccgaagggttcaagcaagtgtctgaggtgactaagccaatagaggatattgggatagtggtattggataataaacagataactgttacttcgggagtgttggaggctttacttgaaaataattgtgcagtcataacttgtgactctaaaagtatgccggttggtctgatgcttcctttgtatggaaatactacacaaaatgagaggtttcgacagcaacttggcgcttctctgccattgatgaaacaactttggcagcaaacgataaaggctaaaatagaaaatcaggcggcggtattgagtaaatgtactggagaggaaataaagtgtatgaagatatgggctgctgatgtgaaaagtggagatccggataacttggaggctcgtgcagctgcttattattggaaaaatttgttcaaaataaaaggttttacaagagatagagaaggtattccacctaataatctgttgaattatgggtatgctattttgcgggcggtcgttgcccgtggtttggttgcaagtggacttttacctactttgggaatacatcatcataatcgttataatgcttattgtttggcggatgatataatggagccttatcgcccctatgtggataggttggtatatgatatgattaaaggagaagaaataaattgtattggattgacaaaagaattgaaagcacagctgcttactattcctacgttggatactattatttcgggaaaacgtagtccgttgatggtggctgttgggcagactacggcttctctatataaatgttttagcggtgagttgcgcagaatatcttatccggagatgtaatggaacggtttagtgaatatcggattatgtgggtacttgtattgtttgatttgccaaccgaaacaaaaaaagataaaaaggcatatgcggactttagaaaaaatctgcaaaaggatggatttacgatgtttcaattttctatatatgttcgccattgcgcaagtagtgagaatgcggaggtacatataaaaagagttaagtctattttgcctgagcacggaagtattggaataatgtgtattacagataaacaatttggaaatatagaacttttttatgggaaaaaaacagtagatgtgaatactcccgagcagcagttagaactattttgaaaagaaaatcccgctatgtagcgggatttctttcttggaaactatatcttttttaaattctaatgtttaatataactgtatgtatattagtttgttactgatgttcggctgtttccaatggttcaaagatactaaaatgaaagcaaatcaca

SEQ ID NO: 763 - DNA, 6805 bp, synthetic construct
  source 1..6805: mol_type = other DNA
  misc_feature 1..6805: note = Synthetic
cgcgataagtatcttatatcgaactcacgttatcataatatcgctttttttatggccgactaattagttcctcataatcagtccctcgtaattccttgtaattagaactagaaacaattagcaattagattgtttcagtatagttttagtagatgaaaaacttgcattttccggtaacacaaacaatacgcattctgtatgccgtttgcgcatagacactttggtttcctataacaaaaaagggcgagacaacgtcccaccctaaatgtttacacaacggaataatccttattgtgtatatcactcaaatgttcgacaaaggtagtactttattttgaataatgcaaaaatattctactttttttgcattattcgttatttttctgtatctttgcgccaaagtgatttctattaaactatgcaaacacgtaaaattctcggattggacttaggaaccaatagtataggttgggctgtcgttaatgataatgaagaaagcaagtctatagcatctgccggtagtcggattattccgatggatgcagcgcagatgggcgattttgaaagcggaaatagtgtttcgcagactgccaatcgtacagcggcacggggtgcacgtcggttatatgagcgcagagcattgcgccgtgaacgtcttaatcgtgttttgtctatcttgggatttcttccgccacactatgcaaaagaactgaatcgttatgggcaactcaataagggagcagagcctaagttggcgtggtcgacagaaaatgggaaatcggtatttttgtttcagccatcattcgtggagatgacgcgtgagtttgctattgcgcaaccacaattggttgcgaatggaaaaaagattgcatacgattggacgatttattatcttcgcaaaaaggctcttactcaacctgttacaaaacacgagttggcgtggatactactgcagtttaaccagaaacgtggttacaatcaagcacgcggggaagaagatgaaaccaaagcgaatgagaaaaaagaactgaagactctcaaggtcgtagaggtgcgagacacgggtgaagtttccaaagggcgcatgtggtatgaggttgtgcttgagaatggggatatatacaaacgccaaagtgcttatccgcttgattgggtagggaaagtcaaagattttattgttactaccaaactcaatgaggacggctctgaggcaactgacaaggacggaaaggtaaagcgtagtttcagtgcaccccaagaagatgattggggattgcgtaagataaaaacggaacatgacattgctcaaagtggtaaaacggtgggtgagtttatctatgatgcgctcttacacaaccctgaacaaaagatattggggcagttggtgcgtgtagtagataggaaattttataaagaagaattgcgccgtattttagaaatacaaaaacaatttatccccgaattgcaagatgctgacctatatcagcaatgtatcgaatccctctatccgcagaacgaggcttatcgcaatagcattgcgaataaggattttacctatctgttgctacaagacattattttctatcagcgtccggtgaggagcaaaaaatcgcttatcaacgaatgcccttacgagtttcatatatataaggacaagaatggagaattgcgcagacggtatctcaaatgtatatctaagtctcatccgttgtatgaagagttccgcttatggcagtttgtggagaacctgcatatctacaaaactgcagagaatggtgtcagtaaatctgattgcacggcagaatatatcccaaacaaagcggagttggtgaagtggttgctcactcaaaaagaaattacggagcaccctcttttatcatatctcgcaggtaaaaaggcgaaagatatatcatggaattatgtaagcgacaaaaagtatccgatggctcctgttacagcaacaatatcttcagtgttggaagaggcaggaggaaaagttagtgctgaagcattagtacacatctggcacatactctattctgtttccgacaaagaacaactctctcaagcactttcgcactatgcagaggcgcatcatttgtcatcgctgtttgtggaaaaactgggcaaacaaaagccttttgctgccgaatacggagcatacagcgagaaagccattcgcaaattgcttagtctgatgcgttgtgggaattattggaaagaggaatctattaacgataagaccaaagaacgcatagaacatcttttaacgggagaagtggacgacaatatcagcgaccgggtgcgcgaaaaactgaaagagatgaatcatatctctgattttcaggggctgcctctttggcttgcggagtatgttgtctatgatgttcgcaagaatgataccaaatgggaaactcccgaagatattgacaactacctgcaatctttccgactccattctctcaacaatcctattgtggaacaggtggttatggagagcctgcgtactgttcgcgatatatggaaacaagaggggcatatcgatgagattcacatcgagatggggcgtgagttgaagcaaaatgcagagcaacgcaaaaacactctcgcacggcaagcggataacgaaaatgccaatcttcgtgccaagagtttatgaatccggaggcgaatatagaaggagtgcgtgcttactctccgagccagttggaactatttcgcatttatgaagacggtgtcctgaacaatcctaaatcggaaaaggatgatgatatccaacgtattatcaaggaactatccgaattgaaacaaccatctgccgcagatgtacggaaatatcgtttgtggttagatcaaaagtatatctctccatatacaggacaacctattcctttggcaaaactattcacatctgcttatcagattgaacacgtgattccgcaatcgcgtttcttcgacgattcaatgtcaaacaaggtgatttgtgaagcagaagtaaatgctcgcaaggatagactgttagcacatgagtttatttccaaatgtggaggtgagaaaatcacgctatcaggcggtaaagtcgtaactatcttaatgaaagatgcttacgaagaattggtgcgcgatatctacaaaaccaatccgcataaacaggaaaaactgatgttggacgatatacctgagaaattcacatcccgccaaatgaatgatagtcgctatatcagccgtctgatgttgggattattgagcaatatcgtccgtgaaaagaacactaaaggagagtatgaacccgaagcgaccagcaagaatgtgattgtctgcaatggtgccaccactacaaggctgaagaaagattggggcattaacgatgtgtggaatcagatcattttgccgcgttttgagcgactcaaccaactacagaataccactatttttacaaccaagacggtcaacgggcatatcattcccgctttgccgttggagttgagcaagaacttcgagaaaaagcgtattgaccatcgccaccatgcaatggatgcaatggttattgcgttcacaacacgcaaccatgtcaatctcttgagcaatgaagcagcattggaagcagataaggacgcgcgttacgatttgcagatgaaattgcgcaaacatgagatttggacaacagcggatggtaaacaacatacaaagttcaccgatttcattgcaccttacgaaggtttccaagaggatgtcagaaccacgctggagaatataattgtcagttttaagcagaacctgcgcgttatcaacaaaagcaacaaccacaacatacgctttgtggacggtgaaaagaaaagtgtcaagcagaccaagggcgacaactgggctatccgaaaatccttgcacaaggcaacggttttcggaaaggttaatctccagttcaaaaagaccgccacactcaaatacgcattggagcatttgaatgatattgtggatattgatttgcgtcataagttgcgtgaattgatagcacaagggtatgacgaaaaacagattaaaaagtatttctctacggaaaaagatatttgggcagatgtcaacctgcaaaagatagaggtgtactactacaccaatgatacgccttataactactatgcaacacgtactgcactgggagattggttagacgaaaagagcatccgcgaaaaggtaacggacacgggtatccaaaagattctattggcacatctggcacaatacaacggagacgctaaagaggcgttttcggcagacggtatcgaaaaaatgaaccagaatatcgtagccctaaatggcggagttcctcacaaaaccatctacaaggtgcgcaaatacgagaaagccgataagtttgcagtcggagaaaccggctccaaagccaagaaatatgtagaagcagacaaaggaacgaatttattctttgctatctatgtaatgaaagacaatgatggaaaagaagtacgctcgtatgcaactattccgttgaaagttattattgattatcagaaacagggtaagcaggaatggaaactgttgctcgaccaatgggtacatgagaataatatagtacctgccaatgctactttgaaatatatcctctcaccgggcgacttggtgtatgttcctaaggaggcaaatatggacttagataagactcgtatctataaaatggtatccggttcaagtaccgattggtattttactccttgtaccacagcgagcattattttggacaaaaaggaatatggacttcttaataaattatcacgtgccatcaccggtgaaatgattaaagaaacctgcgttcctattcatattgaccgtttaggcaacataatctcccttgagtcatgattaagcgtattctctgtttcaccaaccccgcctatttgagtctgcacctcaaacaactcgttgtggagcaaacgcaggcggataaaacagagactatcaagcataccattcccattgaggacattggcgtagtgataatggagagtccgcaaattactattacacaggcacttatggcggctttgcttgataataattgtgctgtcatcacgtgcgattcgcatcatcttcccgccggattgttgctcccgttggacaatcataatctgcaaagtgagcgatttagggagcaaatcaatgcttccgaaccgcttcgcaaacagatgtggcaacagaccattgtctccaaaatcaatagtcaagcctacgtcctacgccggcagaatatcgaatgtcgaaatatggagatgtgggcaaaatctgtccgttccggcgattccgacaaccttgaggggagggcggctgcctactattggcgcaatatctttggcgattccgatttcgtgcgcgggcagttcggcgatatgcccaatggactgctcaattatgagtattccatcgtgcgtgcgatgatggcacgtgctttggtggctgcgggattgttgcccacgctgggcatacaccaccatagtcgctacgatgcctattgtctggcagatgatattatggaaccctatcgcgcctttgtcgatttgcaagtgctggatatgtggaaacgctatggcgatgtggaagaactgtcgcccgcgttgaaaaaagaactgctttcgttagccaccatagatgtacagatagaggcacatcgcagtccgatgatgattgccatgcaaaccactgccaatagtgtacaacgctgtttttcaggtgtttcccgcaaaattgtttatcccgactggtagcgcgtttgcagtaggctggggatatggtgcgtacttgcggaaaaatggtggaaatctctgcacacgggagatggaacacgtttgttggggaaagatgtctcgatttagcgaatatagaatcatgtgggtacttgtcctttttgacctgccaaccgacaccaagaaggcacgaaaagagtatgctcaatttcgaaaacaactcttgcaagacgggtttacgatgtttcagttctcgatctatttgcatcattgccccagtgcggaaaatgccgatgtgcatatccaacgtgtgaaacgatttctacccccttcggggaaaataggggtcttgagaatcaccgacaagcaatttggtgatatggagattttcgattgtcggaaagaaaccatactctctcaaccggttcaacaattagaacttttctaataacgtcaattcgatataagatattttcatcgaatagtttttgttgataattgatttttgtttttgtccttttgtatatttgagtttttgtttcctttatatatttgtctatatctggtttaatttttcgtgtatttgtttccaaaacgcagcgcacattgcgcatgaacaagagacaatgttctattttgccatattccacatagccatttttacttctttatgccttacttctccatacctcacttttccatgctttatttgccccaaacaaccaatagcacgataacataataaaatcaggcttaaaatcattgcttaaacactgcctgataccggtatcgaatgaaacagcactatacaaatatattatcaaaataaaaatttgaataatagtattaatccgattgaaaaattatcgagtatagatttaggaattaaattgggcgtgaaaataagaccaatataaaatttaagattttataaatatagagaaggttaataaatatagaatgaaaatattttttaagatattaataattacggttcttttaagtagtttagcgtttgctaaaggcggttttgaatacggttttcaaattcc

SEQ ID NO: 764 - DNA, 6365 bp, synthetic construct
  misc_feature 1..6365: note = Synthetic
  source 1..6365: mol_type = other DNA
taaagtggcacgcgagctgggttcagaacgtcgtgagacagttcggtctctatctactgtgggcgttagaaatttgcgtggatctgactctagtacgagaggaccgagttggacgcaccgctggtgtatctgttgtcttgccaagggcatcgcagagtagctaagtgcggatgggataagtgctgaaagcatataagtacgaaacccgccacaagatgagatttcttttaagggtcgtgggagatgaccacgttgataggttataggtgtaacggtggtaacatcatagccgagtaatactaataacccgtagacttttcgcgcagcattctttttaagagaatagttagttaaatatttgctttttatcctcatatgttataatatgatagagttagtaattagtaagattagttattggttatgagttataagtaataatctaacgactaaggactagggtactaacgactaaaattttaaggtggttatagtcaaaggtctcacctcttaccattccgaacagagcagttaaaccttttagcgcagatggtactacgcaagtgggagagtatgtcgccgccttcttataaaaagagcaatctaaatagttagattgctcttttttatttaatctttaagtgatacttttttgcaaaaggctttatagtgttttgcacttttgagtagctatggaatagaaaagaaatctggtggcatatttcttgtggggtatttaggttataagaataattatttatgacatatatacatagaaaagatgtctttggtaaaatttttagaggtcttactttagatataggtatagaaaaaatagataaggactttctaatgtctaatcacattaatagtttggtcataagaatgtctacaaatgaagaaatgaataagttagatgatttaagtaatctaccttttttagagggactttcatttcctgatgtatattaccctacacttgatgtgctaaaaaagttgtccaatataatctatttgaaaattcagggaaaatcagggacacctattccttttgatttcctccctaagttatggtgtgtatatttaaactatgataaaaaaacttgtgcttctattttcaaagctcaacagctggaatatttattcatagataattatgtagggaaatcctcagaagattttgttgtacttaacagattaaaaagattaggcttgatgaattttaaactttctgaatttaatgctattgaaaatatgtctaatatagaacatcttgggatgggatataattcaagaatgacagatattagttggataaagaaagcaccgtctttgaaatccgttgcaatcagtaattgtaataagattactaattgggaaatgttaggtaatttgtctaatttagaggccatcattatagagaatgctggtgaaatatcttctattgattttctctctaatttacctaacttaaaagaagttcgttttatcgggaaaacttatgtgaaggataatcgcatcaaacatcttctgaataataataacttacaaagattttttattccaataagaaacagttatgacattactataaatgatttattttaataaatggttatagtaatgtttttcaggtatgttgttaaaatcttaactttcttctattgattgtttgtattgattaaatatttatggcaaaagaaggattttttactgtggaaacttctttaaatattcttaaaaatctttttaaagaagaccttatcagttttgataaacaatatgatgaacttactttaaagtttaaaggctactatttatggtgttatgtatataaagatactgaagaggaaataggaaaattaaacttgaatattaagtatgaagcagaagctccacaacaagtaattgcagattttaagaaaaaggctttaatgttaggacttaaagaaagattattatgatattaacactcaggaaacctaagaaatatgaagaatatataattaattctctagatgaactcatacaaaaattgattcctttttcacaaattgaagaggctaaaattcgtttagcaatagatgatacttgggatgctgattgcctttcttgtcaaatagataatggcaagtatttgtttctctattatactacagaccctgataatcctcaagagaaatatcctcgtagttataatagaagacttgccacccacaataaaatagagattaatggtgatttgtatgatgagaatactatttgctatgattttggttttgtattgatgctatttaaagagttttttcagcagaaagatatccctttatatattcttgattaataaaataaccaattaaaaaatgaaagagtatgagagtagtaattcaaaaagtaacacaggcttcagtaagtatagaaaatcaaatattaggctctatagagaaaggcgtacttgtggtagtaggtatagaagatactgacactaatgacgatatagcgtggctatcagctaaaatagtcaatttgcgtgtttttgacgatgataatggggtgatgaatctctctgtaaaagaagtggagggagaggtgcttatagtgtctcaatttaccttgcacgcctctactaaaaagggcaatcgtcctagttatataaaggctgcccgtccagaggtggcaatacctatttatgaagtttttataaagcaagtagaaagtctgttaggtaaaaaagtgcctacagggcaatttggtgcgatgatgcaggtcagcctatgcaatgatggaccggttactattcttatagatacaaaaaataaggaataaaaaaagccccgaagatagtcgaggcactaaatgttttcacaacggaataatccttattgtgaattgctttcaaattctgcgacaaaggtaagaataatattttttctaagcaaatttttcttaatgtttttgtttttatttcttttttgttatctttgtctcaccaaaatataaaaaagaatgaaacgtatattaggattagatttaggctctaactctattggttgggctcttgtgcagcaggattttgaaaacaaacaaggaaaaataatggctgctggaagtaggattattcctatggatcagggtatattgggcgactttgagaaagggaatacaatctctcagactgccgaaagaactacttaccgtagtgcacgtcgcctgcgagaacggcatttacttcgccgtgagcgacttcatagagtacttcacatattaggctttttgcctcctcactatgactcgcaaatagatttcaacaaaagatatggtaagtttatagatgatgctgaacccaaaatagcttataacaaagggaattttatttttatggatagttttaatgagatgattgaggatttcagaaaacatcaacctcagttattctaaaagaaatctaatggcgaagagagtaaaatcccttatgattggacaatttattatcttcgcaaaaaagcactttcgcaaaagattacccaacaagaattagcttggcttatacttcacttcaatcaaaaaagagggtactaccagttgcgcggtgaagaagaaattgaaaatcctaataaagaaattgcttttcactctttgaaagttgtagaggtagaggctgaagctcctaataaaaaaggtgagatttggtatacaattcgtttggaaaatggttggatataccgtcgttcaagtaaaattccattggacgactggaggggaaaaacgcgtgatttcattgttactaccgaccttaatgacgatggcacgattaaagtagacaaggaaggaaaagaaaaacgttctttcagagctcctgacgaaaacgactggaatttgctcaaaaagaaaacggagcacgatattgatttctctggaaaaacggtaggtgcttatatctatgatcatttattgcaaaaccctaatcagaaaattaaaggaaaattagttcgtacaattgaaagaaagtactataaagatgaattaaaggctattttagccaaacaaatagcacttcaaccagaattgttcactgaaaccctattagcggactctataagagaattatatcgcaaaaacgagacacaacagcaaaacctattatcaaaagatttccttcatctgtttgtagaagatattattttctaccaacgtccattgcgtagcaaaaaatctactattgccaattgtcccttagaaaaacgttcgtatatagataaggaaactaatgaacgcaaagatgttcctataaaagtatgtgctaaatctaatccttactaccaagagtttagagtgctacaatggctacaaaacttgagaatttacgaaatagaaaccgaccgtgagataacagctgagtttatcgaaacagctcaagactatgaggctctcttcaacttcttgatgtctcaaaaaagaaatagataatgaagggttactgaaatactttttacttgcaaaaaatcctcaaattaaagacaaagcagctaaaagcgagcttaaaaaatggcttactacttatcgctggaactatgtgtatgatgccacggataactcctccaaaaaataccctatgaatgaaacaggctatgaacttcagcggtatttgcagaaagtagaaggactccctgccaattttctaacttttgatataacatatcaattgtggcatttgttatattcggtgaaggacaaagttgaatttgaaaaagcattaaagaaatttgctaataaaaatcaattagacgaaacatcgttcgtagaaagtttcaaaaacttcaaaccctatcctaatgagtatggtagtttttctgaaaaagcaattaaaaagttacttcctctgatgcgttttggcaatcattgggattttagttgtattgatgtatctactcaaaaacgtatagacgaccttattaacggggtcgcaaatgacgaaatccgtactatcattagagaaaaagcagagaaatttcagctaaataacgaaatcagctttcaaggcttaccgctttggctagctcagtatgtagtctataatcgtcacgccgaagctactaatatagaaaaatggacttcagtgagtgatttagaagcatatttagaagatttcaaacagcattcacttaggaaccctatagtagagcaagtagttactgaaactttacgtgtagttaaggatatttggcaacaatatggcgggggacaagctaatttctttgatgaaatacacatagagctcggcagagaacttaaaaatacttctaaggaaagagaaaggctttctaaacaaaatcaggaaaatgaaaataccaacctacgcattaaaaaattactcgctgaattaaaagaagatgcaagcatacagaacgtgcgtccgtattcgcttgtacagcacgaccttcttaaaatctatgaagaaggtgtcttcagtagtacagacgaaatagacgaagatattcaaaaaattcgcaaaaaagctgaacctaataaaacagaattacaacgctataaactatggttggaacaaaaatataggtctccttatacaggagaggtgatttcacttacaaaactatttaccgaggaatatgaaatagagcatattattccacaaagccgttattacgatgatagtttatccaatgaggtaatatgcgaatcagctgtaaataagctaaaaacaaatcaattaggattggaatttatccagaatcaccacggcgagaaagtgcgtatagcgggtaataaagaagttactatcttcacagaagaacaatacaaagagtttgtaaagaaacattatgctggaaattcagctaagcagcaaaaactttttttgaatgaaatacctgaaaaaatggtggctcgtcaaatgaatgatactcgttatatcagtaagtatatttcagagatactttctaagatagtgcgttcagatgaaaaagatgagggcgtaaattctaaaaatgtaataccttgtacaggtaaaattaccactgccctcaaacaagattggggacttaatgatgtatggaacgagcttattcttcctcgtttttagcgaatgaaccagcttacacaaacacagctatttacttcatataacgacagacttcaaaaaaatctccctactgttccaataaaatacagtcaaggttttcaaaagaaacgcatagaccaccgtcatcacgctatggatgccttagtgattgcttgtgctaccaaagagcatatcaattatatgaataaccaacacgcattggataagagtaaggataaaaaagaaaaacaacaatctcgcatagaccttcgcactatcctctgtg

SEQ ID NO: 765 - DNA, 6084 bp, synthetic construct
  source 1..6084: mol_type = other DNA
  misc_feature 1..6084: note = Synthetic
ggttacaacatcttcgctacggcggttcttctaagttcctggcagaaaaacggagtggaaaaacacccgcgtatactggccaagcgaagaaggtcagctcaggcactggaaatgctgcacaagaaagaaatcgacatggtggtaaacattccgcgtgactcactcctaccgagctggaaaacggatacaagattcgtcgtgccgcagtcgacctgaacattcctctggtaaccaatgcccgtctggcaagtgcattcatcaatgccttctgctctatgagcattgacgacatcgctatcaagagctgggacgaatacaaataatccgtaccgcttaaaaatatagataaaattaatcccctccggaactatttgtaatgaatgagttctggaggggatttttatttatagaaaatacaaaacaataaaaaagcccaccgataaaggacgatgggcaagcgcctaaatgttttcacaacggaataatccttattgtgatttgcttcattttagtttttacaaaagtaaaaagaaacaataacaaaagacaagttttttttcataaaaaacatgcccgactggaaaagtcagaaaaaagatattattgcaatcatagaccttgataaaaacggaaatgacaaatatgatgaaaatggagagttaagccgtcgtttcaaaattcctaccgaacaagaatgggaagaacagtgggagcttattaaaacaaaaactcaaaaagatcttgacacatctcataaaacagtaggcgcatacatctatgatacactattacaaactcctagccaaaagattcggggaaaattgattcgcaccattgaacgcaagtattataaagacgaattaaatcagatattaaagaaacaagaagaatttcacccagaattgcgagactccaatttattagaagcctgcattgaagaactgtatcctaataacgaagcccatcgtaatgctattgcaaaatatagcattgcccaattgcttattgaggatattttattctatcaacgtccacttaaaagcaaaaaatcgcttattagtaattgtccttacgaagaatacacatacatcaataaagaaacaggagaaatatgcacttctccgttaaagtgtatagccaaatcacatcctcttttcaagagtttcgtctatggcaatttatatcaaacttgcgaatttatcaaaggaaggaaccataaacggaaattcactactgacatagatgtaacaagtcaatttctgaaaaccgaagatgcctacgcaaacttgttcgactggctcaatcagaaaaaagaaatcagacaagacacatttcttaaaaacccagcatttggattaaaaaagaatacagcaaattatcgctggaattatgtagaagacaagacatatccttgtaatgagactcactacaagatactttcatattgggaaaaagcaggaatagagcaatcagccttaacatcagaaatagaagagaaactatggcatattctatactctatttctgacaagaatgaactcagaaaagctttacagcatttcgctgataaaaactatttaagcgataaatttgcagatacttttcagcaaattcctcctttcgagaaagattacggttcctattctgccaaagctatcaaaaaactattgccacttatgcgtataggaagatattggaaagcagaaaatttcgacagtacaactcttgaccgtatagaaaaaatattaactggagagtttgaagaaaacataaagaaccgaaccagagaaaaaacaatccatttggacaatttatactcatttcagggacttccaacctggctggcatgctatatcgtatataaccgccattcagagataaaggacgttactaaatggcaacaaccttcagatattgatgcttttctaaacgcattcaagcaacattctttacacaatcctattgtggaacaaatcatcatggaaaccttacgcactgtacgagatatttggaaacagacagggcatattgatgaaattcatgtcgaattaggacgtgaaatgaagaatcctgccgagaaacgcagaaaactcacccaacaaatacaagaaaacgaaaacaccaatctgcgtatcaagcacttcttgctgaatttgccaatccagaattgggaattgagaacgtacgcccgcactctccaagccagcaagatttattgcgtatatatgaagaagaagctctaaacgaaactaaagatataccagaagatattgctgttattttaaagaaattcaatgaagttgataaccaaaaaacgcccgtctacatccgatgtcttacgttataaatgctggctggaacaaaaatatcgttctccttatactggagctatgattcctttaggaaaacttttcacccctgatacgaattgaacatgtaattcctcaatctcgttattttgatgattcattcacaaataaagttatttgtgaagcagaagttaataagctaaaaggcaatatgttaggctatgaattcatcaaaaacaatcaagaaagaatagtagaactaggattcggacaaaacgttaaaatacagacggttgaagcttatgagctatttgtgaaagaacattattcctacaaccgcactaaaatgcaaaagctattgatggaagatattccagatcagtttattgaacgtcaattaaacgacagccgttatattagtaagctaataaaatcattattatctaatattgtacgtgatgaaggagaagaagaagctacatctaagaatgttattgtttgtactggaagtatcacagaccgactaaaaaaagactgggggatcaacgacgtatggaataaactcattttacctcgtttcatacgcttgaacgaaattacggaaagcaatcgctttacgacaaccaatgcatgcaacaagacaattcctgctatgccattagatttacaaaaaggattcaacaaaaaacgtattgaccaccgccatcatgccatggatgccattgtcatagcctgcgccaatcggaatatagtcaattatttaaataatgaatcagccagcaagaatgcaaagatttcacgtcaagacctgcgacaaatattatgcaagaaaacaaaaaccgacaatttgggaaactatcaatggctcattgacaaaccttgggatacatttacccaagatgtgtattccattttaggcaacatcattgtaagcttcaaacaaaatctgcgtattatcaataaaacaactaaccattatatccactatgaaaacgggaaaaaagtaagttgctcacaaaaacaaggtgatagctgggctatccgtaagcccatgcataaagaaaccgtatatggagaaatcaacctgcgcagaacaaccactgctacattgaaagccgttcttgagaatcctcaaagaattattgaaaaagacttaaagaaaaaaataaaagagcttttaacgcaaggactcaatgaaaaacaaatcaaaaaatactttgaagacaataaagatatttggcaagaaataaatctaaagaagataccagtatactatttcaccaaagaaactgccaacagattctttgcttgccgtgaatcaataaatacaactttcaataaaaagaaaatagaagaaaaagttgcagatacaggaatccaacaaattttactgcgccatttggagcagaatggcaataatccggaacaagccttctcacctgaaggtattgaacaaatgaataaaaatattatgtccctaaataataatggaaaatttcatcaaccaatttataaagtcagaacatacgaacaagccgataaattcgctgttggacaaacaggaaataaatccactaagtttgtagaggcagcaaaaggtactaacctgttctttgcaatatatgaaactgcccataaacgcagtttcgcctctattccattaaacgtagtcattgaacgaccaaaaaaaggcttgtcaccagcacccgaaaacgaaaagggtaatctacctaaatttatattatcacccaatgatttagtatatgtaccaacaaaagaagaaatagaaaatggacatattaatcaaccaatacaaaaagatagaatttataagatggtgagttgtactgaaggggaatgtcatttcattccatatttcgttgcaaagcccataattcaaactattgagttaggaagtaataacaaagcacaaaaaacttggcaagatgaaatgataaaagaaatatgcatccccatcaaaacagacagactaggaaacattataacgtcaattagcctatgataaagaaaacattatattttggtaacccagcatacctatcattacgtaatgcccaacttgtcataaaacttccggaagtagaaaaatgtccttcacttccggaagcgatgaaacgtcaatctgaaataaccaaacctattgaagatataggcgttgttattttggataataaacaaatcaccattacttccggagctattgaagcattgcttgaaaataattgtgcacttattacttgtgacagtaaaagtatgcctgtaggattaatgctccctctctatggaaacactacccaaaatgagcgttttcggaaacaactggatgcttctttgcctttaaagaaacaactatggcaacaaaccattcaagcaaaaatcaacaatcaagcatcttccttatccatatgtataaacgaagatataaaatgcatgcgtatatgggctaacgatgtacgaagtggagaccccgacaatctggaagcacgtgctgcagctttctactggaaaacactttttcatgacatcgaaaactttacaagggaccgagatggcataccccctaacaatcttttaaattatggttatgccattctccgtgcagttatcgcacgttctcttgtaacaagcggattattacccacattaggcattcaccatcataaccgatacaatgcctattgcttagcagacgatattatggaaccatatcgccccttcatagaccggctagtctatcaactatactctgaaaacaaaatggaacttacaaaagaagtaaaagccagtttattatccatccccacaatagatgtcagaatcagtgggaaaagaagtcctcttatgatagcagcaagccaaacaacggcatcactatataaatgcttttctggagaatcacgaaaaatcatttatcctgaattctaatggaacgtttcagcgaatatagagttatgtggattttagttctttttgacctaccaacagaaacaaagaaagacaaaaaagcttatactgattttcgcaaaaatctacaaaaagatggattcacaatgtttcaattctctatctatgtacgccattgtgcaagcagtgaaaatgcagcagtgcatataaaaagagtaaaatccttctacctgaatatggtcaagttggaattatatgtatcacagacaaacagtttggagaaattgagctattttatggcaagaaagcaagtggggtaaaaacaccaggacaacaattagaactcttttaaaataataaatcccatggttaatatgggatttattatttcaagaaacaactttttctttttctaaatttacttataacctactgatagacaacaagaaacaatcaacaagttgtttctaatggttcaaagatactaaaatgaaagcaaatcacaacatcactttcacgcgctcgacgttccagcggttgtttctaatggttcaaagatactaaaatgaaagcaaatcacaacagtgtaatcaaaaaaagagatatattatgagttgtttctaatggttcaaagatactaaaatgaaagcaaatcacaactcgacgagctgcgaatcttattcgtaaactggtgttgtttcctaatggttcaaagatactaaaatgaagcaaatcacaagccgaccgttggcgacatgcttgcgcttgatactgttgtttcctaatggttcaaagatactaaatgaaagcaaatcacaagcagctcctgaagatttggactttttttata

SEQ ID NO: 766 - DNA, 5868 bp, synthetic construct
  source 1..5868: mol_type = other DNA
  misc_feature 1..5868: note = Synthetic
catcccttttgcacagcgcaagcacgtcgcgcacttcttttacgccggaatggactgccgacaaggtatagaacggggcttgcacttgcgcggctatgattttggcaagcgtcgttttgcctacgccgggaggtccccataggatgaatgatgaaatttgccctgattctatcattttccgaaggacgcaatctttcccgacaagatgtttttgtccgatgtagtcctctaaacttttagggcgaagtcgttctgctaatggttcaaacgtcattgtagccggcaccaattatccgaatgcaaaggtaatgaaagttggctgcaatgcaaagcgctttcacgatttgtatttgcattgtcgaagcgcgtttgtgttattggaaagagaaatgcaggccaatcgagaaacaaccgatcttactgattatgtcttgccgaggtgttgagattcgaaaagaagattttgttgaggtctcttaaaagagaagacgacatgcaaaatgcatgccgccttaattgtctacacaacggaataaaccttattgtgatttgcttcaaattctgttgcaaatataatgataaaagtacgaataacaaatttttttaggtaaagtagaaaatattttttatctttgaagatattaatcaaatgttttttatatgcgatatatattgggattagacttaggaacgaatagtgtaggctgggcagtcgtagaagctattatagacgaagatggaaaagagaaattggttaagattaattctcttggaagtaggataataccgatggatgcggcgacattgggtgattttaatgcaggtaaaacagtttcaaaaactaaaaataggacggaaagacgtcttatgcggagaattctccaacggaaagtgcttcgtcgtgaaaggttgcttcgggtgttgtcgttaatgaattttctgccaaagcattatgctcaatgtttggataggtatgggaaaataatttctgatcctgagcctaaattagcatgggtaaaagaagatggttgctatcgttttctttttcaagagtcgtttagtgaaatgttgtcagatttttatggaaaaaatccggaattgcgagcaagcggcaaaaggataccatatgattggacgatttattatttacgtaaaaaggcactgactcaaaaaatcacaaaagaagagttggcgtggattttgttgcattttaatcagaaacgcggttattatcaattgcgtgttgaagaagatcaacagtccaagtctaaacgtgaagactattatgaattaaaagttatttcggttgaagatacgggagagaaaaaaggcaaacggtctctctataaaattacatttgaaaatggttgggagtttgattattcaagtgttttatctccggattgggttggaaaaacaaaaagttttatagtgacgacggaacttgaaaaagatggaaaagaaaaaacagatgattcggggaaaattaaacggtcgtttcgagctcctaaagatgatgattgggaattattgaaaaagaaagctgaaagcggtattgaagagtcgcataaaaccgttggcacgtatatctatgatgctttgttgcaaaatccacaacaaaagattcgagcgaaattgataagtacgattgataggaaatattataaagacgaattgaatcgaatacttgaaaagcaaaaagaatttcatacagagttaaacgatagagaattatatgaggcttgtgtcgatgcgctttatccaaataatcttgcacatcgagatttattatataaacagtgtgattttactgatttattagtggaggatattttattttatcaacgtccgttgaaaagcaagaagtcgttgattgatgaatgtccttacgaatcacatgtctataaaaaggctggcaaaatagagcgtgtgccgttgaaatgcattgcgcggtcgcacccattatatcaggaattccgtttgtggcaatttatttctaatttgcggatttatcaacgtcaaaaagaagtaaatggaaaattggaggtagatgcagatgtcacgagtcaattccttaaatcggaaagtgattatgtcgtattatatgaatggctaaattcgcaaaaagaaattaagcaaaatgcgcttttgaaacatttgaggttgaaaagtgcggaatatcgatggaactatgtggaagacaaggaatatccttgcaatgcaactcatgcgctgctgatcgaacgattgggaaaagcaggggtaaaatcatcgtttttgaatggagaaacagaagaatctttatggcatttattgtattcaatctcggacttgaccgaattgaaaaaagcgttgcaggcttttgcgggaaaacataatttggatgtagagccatttgttggagcattccttcgtgtcccgccatttgaaaaacgttatggcgcatattctgcaaaagcgattaagaaattattgccgttgatgcggatgggcaaatattggcgagaagaggctattgattcaagtacgcgtgttaagatcaccaaaattataacaggggaatatgatgcgcagatttcagaacgtgtgcgtgagaaagttgggcatttggaagatgtggcggatttttgcggcttcccattgtggaaagcgtgttatcttgtatatggtcgccattcagagccaaatacggctgagcagtggaaggagccttcagatatcgatcgttatttgaaatctttcaaacagcattcgttgagaaacccaattgttgaacaagtcatcatggaagcgttgcgtacggtccgtgacatatggaaacaagtgggtcgtatcgacgaaatccacgtcgaattggggcgagaaatgaagaatccggcagacaggcgggcagctatgacaaaaaggattctggaaaatgaaaatacgaatttgcgcatcaagtcgttgctttatgagtttatgaataatccggaatggaagatgttcatccttattctccgatgcagcaagaaaagcttcgtatttatgaggaaggcgccatggcagaggatgcgaaaggagtaccggtcgatattttgcgaaagtttaatgagaaagatgccaagaaacgtccgacaaagtcggatgtggttaggtataaactatggttggagcagcattatcattctccctatactggggaagggattcctttggcaaagttgtttacgccagcttatgagatagaacacgttattccaagaaaacgatattttgacgattcgttgagcaataaggtgatatgcgaaagcgcggtgaataagttgaaaggagcgatgacagggtatgagtttatcaaaaaccgttctggcgagatcgtgattacaggagaaggcaatagcaaagtggaaatattctcggttgagaaatatgagcagtttgtgaaagataattattcccaaaacagggcaaaaatgagaaaattgttgatggaagacattccggatgactttatcgaccgtcaattgaatgatagccgttatataagtagaatggttaagtcattattgtccaatattgtgcgtgaggatggcgaactggaagcgatatctaagaatgtgatagtttgcagtgggggcgtaaccgatcgtttaaaaaaagattggggaatcaacgatgtttggaatagaattattttaccacgttttgagcgcttgaacgaactgtcaaaagatggaagcacttatacggtgtataacaaaagtgggaaattaataccgtatatgccgcttgagtatcaaaaggggttcaataaaaaacgtatagaccatcgacaccatgcgatggacgccatagtcatagcttgtgcttcgcgtaatattataaattatttaaacaatgaatcggcgaaagggaatgcggaggtgtcgcgtcgagatttgcagaaaattctgtgtagcaaacaagtgacagatgaacaggggaattatcaatatcttgtcgacaagccttggagtacgtttacgcaagatgtttatacggctttgagcggcgttattgccagcttcaagcaaaatgttcgtgtaattggcaaagcatccaattattattggcattataatgaaagcggaaagaaagttttatcgaagcaagtgaaaggtaatggatggaccgttcgaaagccattgcataaagatacattttatggtgaagtgaatatacgcaaagaaactacgacgacattgaaaaaagcaatggaaaatccgaaagttatcgtggaaaaagatttgaaacggaagttgcttgaccttcttaaggagagagccgattatgccggcatcaaaaaatattttgaaacaaacaaggatgcttggcaagatgtcaatttgcaaaaaataagggtgtattgtttcactggcgatacaaaagaccgctttttcgcatcgcgtaaatcattgaatgatttttctgcttcaaaaatagaaaagatagaagagtcgataggaaaagtaacggatacagggattcaaaaaatattgcggcggcatttggctgccaatggcggcgacccccaagtcgcattctcgccggagggaatagagcggatgaatgcaaaccttgttgcattgaatcttggcaaaccgcaccagcctatttataaagtgcgcatttgcgaacaagccaataaatatcctgtaggcaagcgaaatggaaagattgcgaagtttgtggaagcggcaaaaggaacgaatttgttttttgccgtttatgaatcggaaagcgttgatgggcaaacgggagaaatcgtgcgaaaacgagtgtttgatactgtgccgttgcgagatgttattgagcgtcaaatgcatggattgtcgtcagttcctgaaatggattcttccggaaatcggcttaagtttgtgttgtcgcccaacgatctggcttatgtgcctacggaagcggaacgcgcagctggcaaagtctttgaacctattgacaaagagcggatttataaaatggtgagttgtacaaatacacaatgtcattttattaaggcaaacgtagcaactgtattgcgtgatggcatcgaatttgaaaaacaaaataaaatggaacgggctctcacaggggaaatgataaaagaaatttgcatcccgatcaaagtggaccgattaggcaatattattgataaaaacttgacgctatgattaagaaaacgctctactttggaaatcctacgtatttgtcgctgcgtgatgctcagcttgtcattaaattgcccgaaatagagaagtcgccgcttccggaagatacgaaacggatgtcggagacttcgaagcctatagaagatttaggcgtggtagtcctcgacaacaagcaaataaccataacggcaggggtgatcgatgctttgctggaaaacaattgtgcattaattacttgtgatcgtcgcagtatgccggtaggtctgatgttgccattgtgtgggaatacaacgcaaaatgagcgatttcggcagcaattggatgcttcgcttccattgaaaaaacagctttggcaacaaacggttcaagctaaaatacgtaatcaggcatcagtgctggaagaatgcacacgagaagaggtaaattgtatgcgtgtgtgggcgaacaatgtgaaaagcggtgattcggacaatatggaagcacgggctgccgtgtattattggaaaacattgtttgccaccgtcgatggcttttcaagaagcagagacggtgttgctcctaataatttattgaattacggatatgccattcttcgtgcggtggtggctcgaggtttggtggcaagcggattgctgccgacattgggaatacatcatcaccatcggtacaatgcctactgtttggc

SEQ ID NO: 767 - DNA, 5209 bp, synthetic construct
  source 1..5209: mol_type = other DNA
  variation 1975..1985: note = n is a, c, g, or t
  variation 4059..4062: note = n is a, c, g, or t
  misc_feature 1..5209: note = Synthetic
agagggcactctccgttgtgtctttgaagtctttggccaggccgccggcgctggtctccttgtacagagaaggaaggtctttgcctgtctgcttcatcacttccacgacgtggtcgaacgacacgcggtgacggccgtcggaaaaagcagcgtaaaggttagcatccagcgccctggtcgcagcaaaggcatttcgctcgatgcaaggaatctgtaccagcccgcaaatcgggtcgcaggtcatgcctaaatggtgctccagagccatctcggcagcatattcaatctgagcaggagttccgccgaaaagctggcaggcagctgctgcagtcatcgcgcaggctaccccgacttctccctgacaacccacttcagcacctgaaatagaagcgttctgcttcacaacgttgccgactattccgcccgtcgctatggcatgcagaacctttatgtcactgaaattatgtcctttagccaggtggtaaagcacccctggcatcactccgctggatccgcaggtcggcgcagtgactatcgtcccgccagaagcgttttcctcgcttactgctagggcataggcatataccagtcctctggtctgaagcgtctgcttgtagcctgtggctttaatgtaatatgtcgctgccttacgagccaagttcaaaggtcctgggagccgcccctcgtggtttatcccattctccacggactgcttcatcgcaatccaaatctcctccagatagtcccaaatctccgaaccctcgcacaagtcgacatattcccaataattcctgccattgtcgtcgcaccagttcattatctgggagaggctgttcatatcgtaaacttctttcgtagagaaacggtcaggctcttttccttccgagagcgcgccaccgcctatgctgtagacggtccagtcatcgagcgtgtgtccctcccggttgaaagctttgaattccatgccgttagggtgatatggcaggaatatgccagccttccagactatttccactggagccgttggttccagcacctctttaatggcaatgtcggtcatgtggcccttaccggtcgccgccaagctgccatagagggtcacctcgaacttcgctgcatccctgtgcctttcgagaaaatctttcgccgccctctgcggccccatggtatggctgctcgacggccccttgccaatccgaaaaagttccttgagagatttcatgcgacaactgtcattttcttgcccaaactcgttcgatctggccgatgtacatcgtgtggagtttcatcctgctctcatcgccatacatgctgcggacagattccggcagcttctctttctcaaatgtatgggaatatattttcttgcattcaatcgtcatcactgcctccttgaatgatgggttgccttcattggtaaactctggcgtgagccccgcatccttcagcttgtcgccatcgcgaccagaatggctcccgatgtagagcagggctttccgtttgtcatttggaaaaagtgagaccgtgaaatggtcgtatttctccatgaatccgtgagtataacggcttcctgacacgtagacggtcacgacaggcatctcccacagctgacccaggccgccccatgagatggtcatggcattcatcttttcctcattgcctgcagcaaggaccatccagtccttggcgaataattccaccgcattcccagggatgtctccggcctttatttcctgccattgaccgtccgccttgagcgagcctgcatcgcagttgcctgcgctagccctgtactgtccggcacaagcagataatagaatactcataaatattgtaactatttgctttaatcgatgttcgttcattagccattattctcggtaacaaatgacaaatatagtgaaacttatccgaaatgactttaccaagcgtgaagaaacagacggggatatttattcaagatcaggaatcactnnnnnnnnnnntcccgctgctaagggcaacgggaaagaacctaatgttttcacaacggaataatccttattgtgatttgcttgaaattctgttgctaatataagaaaaaatatattactattcattattacaatattttttttaactttaggatgagaaaaacaagagttattgcgcttggcaatgatctctcaagcatgagtttactaataatcaataaataaaaatgaaaaatattctaggactagaccttggtactaatagcattggttgggctgttgttggaagcgtaactgatgcggctgaaaaagaaatacttgcgggcattaaaggctgcggaagcagaattattccaatggatgcctcgcagctaaaggaaatactgtttcacagacagctgacagacgaagcaagaggacggcccgtcgaatgaatgagaggttcattcttagaagggagcggcttcatagggtgctgaatttgatgggtttcctgcctgaacattatgccgcttctcttgaccgatatgggaaattcatcgatgccgatgaccacaagatagcatggaggacaaattctgacggtaggcaggagttcgtttaccgacaggcattcaatgagatgtatgaagagttcaaatcgaaaaaccctgaatttctcaaaaacgggggcaagattccttacgactggacaatatactatcttcggaagaaagccctctatagcccgattaccaaagaagaactttcatggatacttctgaacgcaaaccaaaagagaggatataaccagctcatggggatggatgagcagcaggagcaggaagataggtcaaaatcagttgaatatttgtcgtccacaatcgtagaagtaaccgacagcggcgataagaaggggaaagccacttggtggaattgtaagcttgacaacgggatggtatacaaacgtccttctgaagtcaagccggattgggaggggaagacaaaggaattcatcattaccaccgacctcgacaaagacggaaagccaaaactgaacaaatacggagaaatccagcgaagtttccgcatgccgggagaaaacgactggactctcatcaaaacaaggactgaagatcaggttaacaagtcaggagagttcgttggagagtacattttcaatgcgcttctgaaagaaccaacgcaaaaaatccgaggcaaactggtcaggactatagacagagagttctacagagctgaattgaaagcaatcctcggcaagcaggttggttttatcaaggaactgacagacagagacttgtatcgccaatgcatcgaagaactgtatcctagcaatgacggctatcgtaattccattgcgtcaagagatttcatatatcttttagcagatgatatcattctataccagaggccattgaaaacaaagaagagcctgatagacaactgcccatacgagagccacatctatacagacaaagaaacaggcgaggtgaaaacagctcccgtaaaatgcatcgccaaatctcagcctctttaccaggagttcaggctatggcagtttgtccagaacctgagaatctacgacaatttcagtggggaagacgagacttctttcgtcatcccgaccgaagcgaaacgggtcgaggtattcaaatatctcaacgatatctcatctaccaatcaagagtctttcttcaaagaattcttaggtgtaaaaaagccgaaaggcaaagattcgaaactcccatacgtttggaactatgtagaaggtaaagattatccttgcaacgagacacgcggcccgattctttcaaggttgaagaaatcgggaatcccttcttctttccttaccagagacatagagaatgatttatggctaattctctactcatccgagagcaggaaagaacttgaagaagcccttaggaaatttgcgggcaaacatgatcttgccgagacttttgtagaaaacttcaagaaattcccggcatttgagaaagactacggagcctactcggcaaaggcaattaaaaagttgctgccgcttatgagaatgggagaattctggagcgagacggcaatatcnnnnatgatgtcaaggccaatattgaaaacataattaacggaaatgtctccgcctccattccccagaaagtgagagatcagctgtcgtcatataaaagtatttccgatttcaagggactgcctctttatcttgcttgttacgttgtctatggcaggcatagtgaagcgtctgattcccagctttggacaagtcctgaagacattgatgcctatcttaacaatttcaaacaacattctctccacaaccctatcgtagagcaggttgtgaccgagactttgagaactgtcagagatatctggcggtgttttggcaagattgatgaaattcacatcgagatgggacgagatcttaagagtccggccgacaaacgcagacaatatcagatgagagcccttgagaacgagaatacgaatatgaggatccgcgctctattgatggagtttaccaatcctgattttaaaatcgattatgtcagaccctattctccttctcaacaggaccttctcaggatttatgaagaaaccgtcctaaatagtggagaagaattgcctgattacgttgttgacgttcttcgtaatcttggcaacggcaaaactgaacagccaacccatgctgagattctaaaatacaaactatggctggatcagaaataccgttcaccatacacggggcagccgattcctctggcaaaattgtttactccggcatatgaaatcgagcatgtgattccacaggcgagatacttcgatgattcatacaacaacaaagtaatatgcgaatcagaggtgaacaagctgaaatcaaacatgttgggccatgagttcattgataaacatggtggagaagctgtatcgctcaacatgggtggcactgtgagaatattgactaaggacaagtatgaagacttcgtcaagaaaatctacggaaacgaacgaatgaggatcaagtttaagaatctcatgcttgacgacattccggaggactttatcaacaggcagctcaatgacagcagatatatcagcaggctcatgcttgggcttctatccaatatcgtaagaaaagaaggcgagactgaggcgacctctcgcaatgtcattgccactaacggctcaataacagacaggctcaaggtagattggggtataaaaga

SEQ ID NO: 768 - DNA, 5101 bp, synthetic construct
  source 1..5101: mol_type = other DNA
  misc_feature 1..5101: note = Synthetic
gccgaaccacgccgaccatcgttccgacattcgtgccgtcgccccagccggaacactcgcatcacaccgagcagagccatagccacaactccggcgacatcatttcgacggcaggcaacttcttcggcggattcaacttcgatccgggccccggcgaagatgacaacgccccgatacccaagaagaaaaagaaaaaaccggagcagaaaaaaggacgctccatgtcataaaatagttaatcttaaatcattacagccatgagtaataaaaatgtcaaaacccaggaggacgaaacaatggataccggaaaggtatataccatgtttgaggaaatcaaagaaaatcaggccaaacaactgacggcgatagagaaattgcaatcgcaacccgaccctacattagcggaagccgcacccgcactcacctccgaggacggcgaaaaaatcgagacgctgacggagaaactcgaccgcgtggacgagaaactggatcgtccgctcaagcaccatcacaccctcgacttcatgtcgaattgggtgctgatcgcgttgatagcggcagtaggggcctttatcgtttcactgtgggtcataaacaatcaacggcagaccattgcccgatcccgcgacaacgacctgaaataccgctatatccagatgcgcggcgaggctatgccgaacgacatcctacaattacgcgaaaccttcgagttcaatcgaaatcccgacaacatcaaactcatccgccgacaggtggaacggtacgagcaactgattcaacagcaggcagagaacgaagctcgggcgaagctcaacgacgaacaggccaaacaactcaaacaggaggcagaaaccgtgaaaggaggaaaatagccgtcggcctgcgccggtaagcggaacccccatcgccccatctgcgcaaatatactgatggttgagatgcggagcaaggctatacaagcgccttcggcggccttgcaccgcaccccaaccatcgtttgctggtcgctacgatggaacaatggggtggtgcggcaaaacctattctcgtattctgtaagcctctctcgaaaatatcctcttcgctatttctatgcgattataggtaatgcagaacgagacagacatctttcgatgctgccccgccctaaatgttttcacaacggaataatccttattgtgatttgcttcaaaattgttcggcaaatgtagcgattgtttaattcaaaaacaaggttttgtggcgatgatacaataatttcgtacctttggacagctaacagttaggctatgaagaaaatattaggtctcgatctcggcacaaacagcatcggttgggcattaatagaaaaagaatccaaaacaggaaacggtaaaattttggggttaggtagtaggattattccgatgacacaggatgtactcgataaattttcaggaggaagccccaccgaaacgcaaacagccgtaagaacaggttttcgcggcacacgacggttacgggaacggtatctacttcgccgcgaacgattgcatcgcatgttgaatgtattagggtttttgccgaaacattatgccgctcggattgactttgaaaaacatttcgggcaatttatcgaaaactcggaacctaaattaccgtggtgtgaaacagacgagagaacggtcgagtttattttccagcaatcattcgatgagatgttggccgatttccgtgaaactcaacctgaactgttacacaaaaatagaaagggaaagccggctaaaatcccatacgactggacgatctattacctgcgcaaaaaggcgttgtctgaaaagatcgaaaaagaagaattggcctggctgatcctgaatttcaatcaaaaacgcggatattaccaacttcgtggcgaggaggaagaagaaaatccaaacaagtcggtagaattccattcattgaaaattattgatgtaattgcagacgaaaagccgaacaacaaaggcgatatctggtattcactccatttggaaaatggttggatttatcggcggtcgagcaaaacaccattattcgattggaaagacaaagttcgtgattttattgttactactgatttggatgataacggcaatgtgaaaaccgataaagagggggatgaaaaacgctctttccgtgcgccgggcgaagatgattggacattattgaagaagaaaaccgaagcagatatcgagaaatcacataagaccgtaggagcatacatctatgatacgctacttcaaaatccgtctcaaaaaatacgcgggaaattagtacgcaccatagagcgtaaatattacaggtatgaattgagaaggatacttgaaaaacagagagaattccatccggaattacaagatgaaaatctgtacaatgactgcgtgcgagagctttacagacagaatgaggtgcatcaaacggtgttaagcaagcgtgactttacacacctgttcgtggatgatatcatattctatcaaaggccgttgcgtggtcaaaaatcgtctattggaaattgcgcactggaatatatcatttataaaaaagagggaaccgaaatcaaagaatacctgaaagcaatcccaaaatccaatccatactatcaggaatttcggacttggcagtggctctctaacctgtcgatctaccgaaaagacaacgatgtgaatgttactgcggaatttttgaacgggcgcgaagcatacgcaacgctctttgaattcctaaacgaacgaaaagagatcgagcaaaagcacttgataaagcatttgcttgagtgcaaaggtcttagaggtaagtcgctaaacttggaaatagagaaatatagatggaatttcgttgaggacaagaaatatccgtgcaatgaaactcattatgatattacaagaagactggaaaatgtcgagaatctacctcatcaatttctgacgcgcgaaatcgagcaggagttgtggcacctcatttattccgttacggataaagttgagtttgaaaaagccctgaaacgatttgccaatcggcataaaatagacaagatctcttttgtagaggcttttaagaaattcccgccatttaagagcgaatacggtgcgtattctgaaaagacaatcaagaagttgcttccactgatgcgacaggggaaatattggacataatattaagaaggttcatgattgagaccattgtaattgtcctgaatttgtattaaaactgaaaaatcaatatcccggaacgggttcgggaaaatgctgctattttgacgcaagagagcgattatcaaggcctcccactttggctggctcaatatgtagtctataatcgtcattcggaagccgatgcgatagataaatggaactccgtggacaagctgaacgattggttgaaggcattcaagcaacacgccctgcgtaatccgattgtggagcaggtggttactgaaacgctgcgtgtggtgggagatatttggatgcaatatggcaatggaataagcgactttttcgacgaaatccatatcgagttgggacgcgagatgaaaaatacggcagatgaacgaaaacgggggaccagtaaaattacggaaaacgaaaataccaaccagcgcattaaagctttgttaatggagttgaaagaggacgaaaagatagaaaatgtgcgtcctcactcccctatgcagcaggatattctgaaactctatgaagaatttgtcctacaaaacaacgataacatagatgatgatattgtaaaaatcagccgaacggcacagccatccaagacagaactccaacgctataaattgtatctggaacagcggtgccgctcgccttacacggggcagataattcctcttgccaaactatttacaaaagaatatgagatagaacacatcataccgcgctcgcgttactttgacgatagcttcaacaacaaagtcatctgtgaagcggctgtaaatgctctgaaagataatagtctcggctgtgaatttataaagaattaccacggacagaaaattgagaccggtttcggaaagaccgtaacgatatttaccgaggaggaatatagggagttcgtgcaggataactatggtaaaaaccgtataaaacggaataaccttttgctggaggaaattcccgacaaaatgattgagcggcaaatgaacgacacacgctatatcagcaagttcatttcgtctgtcctttccaatattgtgcgggaagatactggcgatgacggagtgaattcaaaaaacgtagtgctttgtaacgggaagatcactgccgaacttaggcaggactggggtctgaacgatgtgtggaacgagatgattctgcctcggtttcagcgcatgaataaattgaccgattccaatgaatttaccgtatggaacgaaccgcatcagaaatacctacctgctgtgccgttcgagttatccaaaggattccaaaagaaacggatagatcaccgccatcatgccgtggatgctttggtaatagcatctgccacacgagatcacatcaatttgttgaataacaagcatgccaaatcggatcgcgaacgatatgatttgaagcacaaactgatgcgatttgaaccttatgtcaaagatggcaagcaaagagaacatgctaaagatttcataaagccttggggctcctttaccattgatgcaaaagaggcattgggcaaaacagtagtcagttttaagcagaatttgagagttatcaataaggctaccaaccgatatgagagatgggttgataaggacgggaagaaaataaaagagcaagttaagcaggaaaaaatgaattgggcgattcgtaaacctttgcatacaccaatgccttatggtaaaaaacattatgattttgatgttttaccgattgcagacatggttgggaaacgcgattttataattgatagtgcgattaaggaacaagttgaaattgcagtaaaagaatgtaacggtaaaataaccgaaacccaaaagagattgcaaaaatctcctatcacaattgattgtaaccccattcctataactgtattcaagattgataacgagaagtttcgacaacgacagcctatttct

SEQ ID NO: 769 - DNA, 5076 bp, synthetic construct
  source 1..5076: mol_type = other DNA
  misc_feature 1..5076: note = Synthetic
tcctggtttatctttttatccgtcaggcggagctttatattatctttgccgcccttatggctgtcattgcaaagttttattcgctcatcgttcctttctttcaagaaaggatacctgccatgaaactctccattcctgtcaagatgttgtatttattaaccatagcttatgccatatcgttaacagagacgaatctgacaggtggcggagagcagtttttgatgatgcagggaatgaatggaactcatgatatccagtggcttactatcatgatgcttattcattttgtttttacgctgttttctctttcttcaggtttgccgggaggaagtttcattcctaccttggttacgggaggattattgggacaaatcttcgggttggtattggtacaacgcggatggatagggtatgagaatgtgagttatatgatgctgatcgggatggtggcttttttggtggctgtggtgcgtactcctttgactgctattgtcctgataacggagattaccggtcatttcgaggtgttctatccttccattgtggtaggtggattgacttattatttcaccgaattgttacagataaaaccttacaatgtattgctgtatgacaggatgttccgtagccataatccggagtcttccgaagaggctggtgctcgctatcatctttttgtcgagataatggatgggtcttattttgacggaaaggaagtggatacattggctttacctaatcattgtatcattcgtagtatacatcggaatcgtaaaaacttacttcctcaggggcaaaccctggttcccggtgatcaagtggagatagaaatagatgcgcaggatatagaaaaattatacgaaccgttagtcagtatggcaaatatctattaaaagatgagtctaaaaaagcccccgttaaaggacgagggcagcctaaatgttttcacaacggaataatccttattgtgacttgcttcaaattagtattgcaaaactatgaaataaatatgtaaaggacaagtgattattagaataatttgataactttgaaaagttttgataaaatagttgtcttatgaaaaatatagtgggtcttgatttgggtaccaatagcataggttgggcagtagtaaatggaagtgtcaatgacgatggaagtgaacaattggttaagatacaagcttcaggaagtcgcatcatacctatggatgcagctatgataggagattttaataaaggtaattctatatctcaaactgccgaaagaaccagattgcgtggaattcgtcgtttaagcgaacgatatctgcttcgtagagaacggttgcatagaattcttgatattttaggatttttgccttttcattttgctcaagatttagataggcatggtaagatagttaagggcaaggaacctaaattggcttggcgtaagaatgaagctggtcagtttgaatttatattccaagattcatttaaggaaatgctggaggattttaagctaaatcatccgaatctgataacagatgataaaaaagtaccttatgattggactatctactatctccgtaaaaagggattgacttctaaaatttcaaaagaagaattggcgtggatattattgaattttaatcaaaagcgtggatattatcaattacgtggtgaggaagaggaggaaaataataataaattggttgaattctatgctcttaaagtggttgcagtagaagattccggagaaaaaaagggaaaggatatttggtataatgtgcatttggaaaatggatgggtgtatcgaagaacaagtaatatgtctcttgattgggttggaaaaactaaagaattcattgtaactacggatttagagaaggacggaactccgaaaaaagataaggaagggaatgtaaaacgctcttttcgtgctcctaaggaagatgattggtcattggtcaagaagaaaacagaagcggatattgatcaaactcataagacagtaggtgcctatatttatgatacgcttttaggaaatcctagtcagaaaattcgtggaagactggtgagaaccattgaacgcaaatattataaggaggagctgaaactgattttggagaagcagaaggagtttcacctggaattgcaagacagagcattgtatgctgcttgtattgaagaactatatccaataaatgaagcacatcggaataatgttggtaatcgggattttacttatttgtttttagaggatatactcttttatcagcgtcctcttaaaagcaaaaaatcattaatagacaattgtccttatgaggagaatcagggtcttgataaggaaacgggagagataaaatcttttcctgtaaaatgtattgctaaatcacatccgttgtttcaagaattccgcttgtggcaatttataataaatctgcgtatttataggaaagacctggcacaagatgtggatgttacaaatgagttattgaagacagaagaagattatgttgctttatttgactggttgaatggtaaaaaagaaattgatcaaaaggcttttttgaaatatccggtttttggactgaaaaaagagatagagaattatcgttggaattatgtgcaagacaaaccttatccatgtaatgaaacccgttcattgatgttggcgaggctggagaaatgtgatatttctattgaattcctgacaaaagagaatgaggaagctttatggcatatattatattcggttgaagacaagaatgaaatagtaaaagctttgcagaaatttgcggataaacacgacctgaatgcttcttttgttgatgtgtttcagaaattcccaccttttaagaaagaatatggttcctattcggcaaaagcaattaaaaaattattgcctttaatgcgtatgggaaaatattggagtgagaattcaatagataaaggaacgcgtgaacggattgataagataataacaggagaatatgatgagaaaatagaaaatagagtgagggagaaagcaattcatcttgctgatgtttctgatttcaaaggtttgcctctttggttagtgtgttacaattgtttatggtcgtcactctgaagcaaaagaaataatccagtggaaatctcctgctgatattgattcgtatttaagatcttttaagcaacattcattgcgtaatccaattgttgagcagattattattgaaacactacgtgttgttcgtgatatttggaaacaagtgggaaatattgatgagatacatgtggagttggggcgtgagatgaagaatccggctgacaagcggaagaaaatgacacagcaaatgtctgaaaatgagaataccaacttgcgtatcaaatatttgctcacggaatttttgaatcctgaatatgaggttgaaaatgttcgtccttattcgccaagtcagcaggatattttgcgtatttatgaagagggtgttttaaatagtgtctccgatttaccggaggaaatatcggatatattgaaaaagtttacagaaacagacttgaagaagcgtccttcaaggtcagaagttttgcgttacaagctttggctggaacagaagtatcgttctccttataccggtgaagtgattccattgggtaagttgtttacgcctgcatacgaaatagagcatgttattccccaatcatgttattttgatgattcttttagtaacaaggtgatttgtgaagcggaagtcaataagcttaaaagcaatttattgggacatgagtttatagtgaagcatcatggggagatagtggaacttccttttggaaaaaaagtaaggatcttcactgtggatgaatatgagcaatttgtgaaagataactattcgcgtactcgtagtaaaatgaaaaaacttttgatggatgatattccggaggagtttgttactcgtcagctgaatgatagtaggtacatcagcaaagttgtaaagtcccttctttccaacatcgttagagaaaaaggagaggaagaagcaatttcaaagaatgtaattccttgtaccggaggagttacggatcgtttgaagaaagattggggaataaatgaggtttggaataaaattatacttcctcgttttcaacgactcaatgagttgaccggcacaaataaatttacaactaaaaatgttgggattcaagaaattccgacaatgcctttggaattgcaaaaaggttttaataagaaaagaatagatcatcgtcatcatgcaatggatgccataataatagcgtgtgcaaataggaatattattaattatttaaataatgagtcggcaacagctaaggctgaattatcccgatatgatttgcagaaaatgctgtgtgataaagctaagactgataataacggtaactataaatgggtgatcagaaaaccgtgggcatcgtttacacaggatacatatttggctttggaaaatataatagtcagttttaagcaaaatttgcgtgttataaataaagctaccaatcgcttcttgcattataatgaagaaggcaaaaagatctttgtgaaacagggaaaaggggacaattgggctatacgtaaatccatgcataaagatacggtatttggagaagttaatttgcgtaggataaagactgtagctttaaatgaagcgatgaaaaatcctcaaagcatcgttgtgaaagacttcaagagaaaattattggaactttggaatttaggatttgacgcgaagagaataaagaagtactttgaagataatagagaaacttggagtgatataaatctgtctaaaatagaggtttactattttagtaaagatactaaagatcgattctttgctactagaaaaccgctggatactagttttgatagaaagaaaatagaaaataatattactgatacgggtatccaaaaaatattgttacgtcatttggaactgaaagataataatccggatattgctttttcgccggatggcattgatgaaatgaatcgtaatattattcagctgaataatggaaagtatcatcagcctatcattaaaattcgttggtatgaacaggctgataagtt

SEQ ID NO: 770 - DNA, 5058 bp, synthetic construct
  source 1..5058: mol_type = other DNA
  misc_feature 1..5058: note = Synthetic
atcctcaggcattggaaatgcttcataagaaggaaatcgacatggtagtgaatattccgcgtgacctgtcggcaggtgagctggataacggttacaagatccgccgtgcagctgtcgatctgaatattcctttggttacgaatgcacgtctggccagtgccttcattcatgcattctgtacgatgactatcgatgatatcgctatcaagagctgggatgaatataaataatccggctgacagataatctgatttttactggcgccactctgaaaggactgttccttttggagtggcgtttttttcgtgcgtatttattgatgatattgttttggggtaaatgcgaaagaataaaaaagaaagcgatcttttgcaagaccgctttaattgttttcacaacggaataatccttattgtgatttgcttcaatttagtattcgcaaatatatgaaaagtttttgataccgatatctttgtgagataaattttgtctatatttgagaaaaaataacttaagtagattatgaaaaagacattaggcttagatttaggaacaaatagtatcggatgggctgtaatcaattctaatatagattctgaaggtaaagaaaaactagtaggtatttcttcttgtggcagtaggattattcctatggatgctgctacattaggagattttggaaaaggaaatactaaatctccagtagcggaacgaacaagacttcgaggaatacgtcgcttgctggaacgtagcttacttcgtagagaacgcttgcatcgggttctgtctgttatgggttttttgccggaacattatgcttctcaactggatcgatatggcaagttcttgccggaaacagaacctaaactggcctggtataaagatgattctggcagatatcaatttctgtttcagaaatcatttcatgagatgcttgaagactttcgtctgcatcatccggaactggttgcgggagagaaaaagataccttatgactggactatttattatttgcggaagaaagctctttctcaggaaataactaaggaagaactggcctggatacttctcaactttaatcagaagagaggatactatcagttgagaggagaagaagaacaggaagaaaataataaatcagtagaatatcatgcgctgaaggtcgtatctgtggaagactccggagagcgtaagggaaaggacatctggtataatgttacattggaaaatggctgggtttaccggagggccagcaatattcctttagactggaccggtaaggtgaaagagtttgttgtaacaacagaattagatgatgccggaaatcccaaaaaggataaggaaggtaacgtgaagcgttctttccgggctcctaaagaagatgattggggattactgaaaaccagaacgcaggcgcagattgatgaaagtggtaaaactgttggtacatatatttatgaatcattactttgtatgcccaatcagaaaatcagaggaaaactggttcgtacgatagaacgtaaatattataaagacgaacttcgacagatcttggttaagcagtctgagtttcacgcagctttgcaagatcataatttgttgctttcttgtattgaagaactatatcctaacaatgaagcacatcgtcggttattatctgcttccagttttatctattttctgatagaagatatattgttttatcagcgtccactgaaaagccagaaaggattgatagacaattgtccctatgaatcacatatatataaggataagaaggatggcagtttgcatcatgttccattaaaatgtgtttccaaatcacatccgctgtttcaggaattccggttgtggcaattcctttctaatttacgcatatatcagcgtgaaagaatgacggatggatctcttaagctggatgtggatgtaacacgtgaattcttgccgagtgaggaggattatgtaaaattattcgactggctgaatgaacggaaagaaatcagtcaaaagcttcttctggcatataaacctttcggattaaagaaaaatgagcaggctaattatcgttggaactatgtagaagacaagagttatccatgtaatgagacaagagcggaaatcaagagcagactgagtaaggctggagttccggaggaattcctgacagaagaaaaggaagaggctttatggcatatactgtattctatatcagataagaaagagttgacaaaggctttaggtacttttgcagcgaagaacggtctgaacgaaagttttgtggaagtctttgccaaaattccgccttttgaaagtaattatgcagcttactccttgaaagctatccgtaaattgcttgcattgatgcgcatgggaaagtattggaatgagcaggccattgacaggcaaacccgcgatcgaatagaaaagattctgacaggagaatatgatgaaactattcgttctcgtgtgcgtgaaaaggctatgcttttgacagatatatcttctttccgtggacttcctttgtggttggcatgttatattgtttatgatcgtcattctgaatcaaaagaacttgtgaaatgggaaactcctgctgatattgatcatttcttgagtaagttcaaacagaattcattgcgtaatcctattgtagagcaggttattacagaatctttgcgtactgtacgagatatttggaagcaagaaggtaaaatagatgaaattcatgttgaattaggtcgtgagatgaagaatccggccaaagaacgtgctcggataacagctcaggtacaggaaaatgaaaataccaatttgcgtataaaagcgttgcttgcagagtttatgaaccctgaatttgagatagaaaatgttcatccttactcgcctgggcagcaagagattctacgaatttatgaagatggagttttgtcgggtattgcagaaaaggatttgcctgatgatatcacagcaatattgaaaaagtttagagaaatgatataaagaaacgtcccacaacttcagaagtcttgcggtataaactttggctggagcaacgatatcgttcaccttataccggtagggttattccgcttggtaaattgtttactccagcttatgaaatagagcatgtgataccacagtcacgttattttgaatgattctatttccaataaggctatttgtatgaatcagctgtgaataagttgaaagataattgtctgggatatgaatttatcaaaaagcattccggtgagatggttgaactggggaatggtgaaacggttcctgtcttttcggttgaagagtatgaacgtttcgtgaaagaatcttactttggcaatagcaagaagatgaagaaactgttgctggaagatatacctgatagttttattgagcgtcagttgaatgatagtcgatatatcagtagggtagtgacatctttactttcaaatttggtatgtgaagagggagaacaggatggtttgtcaaagaatgttatagtttgtacgggtggaataacagatcggttgaagaaggatttggggagtacaggaggtatggaaccggattattcttccacgttttttacggttgaatgagattactggcagaacagatttcacttctacaagtgtaaacggccatctgttgcctgccttacctttgtatctgcaaaaaggatttaataaaaaaagaatagaccatcgtcatcatgcgatggatgccatagtcatagcctgtgctaataggaatattgtaaactatctcaataactcttctgcaagaaagaattctgagatatctcgttatgatctgcaacgcttgttgtgtgaaaaggtgaaaacagacgcaaacggtaattacaaatggattcttcgtaaaccttgggagacatttacacaggatgtatatgcagcattgacgtcaaaaagaagctatcgagatgcattttcgccggaagtggcaatggaaatgctcattgatgaagtgaaaaattttgatatgaaaatatttcttgcatttcaaagaacaatgcatgaggaagagaaagaaaaggagaaagtgatatgcagttaaagaaaaaaccagtaacaggaaatgaaagacattttaccaagagagatggaaatccgtgattacttaatcggattaatcaaagagacttacaaacagtttggttttacttctatggaaactccttgtgtagaacacattgaaaacttaaccagcaaacagggtggagataatgaaaaactgattttccgtatcttaaaacgtggagaaaaattaaaaatcagtgaagcaaaagaagaaaatgatttagtagacagcggtcttcgttatgacctgactgtaccgctttgccgtttctattcaaataatgcaaatgagctgccatctccgtttaaagcacttcagattggaaatgtattccgtgcagacagaccgcagagaggacgtttccgtcagtttatgcagtgtgatatcgatatcctgggtgagccgacctatcttgctgaaattgatgttatccttgcaacttctactctggtaggaaaactggacttcgacagctttactatccgtatcaatgacagacgtttcttaaaagcaatggctgcttacagtggatttgcagaagaatcttatgatcaggtatttattatcttagataaaatggataaaattggtttagacggtgttgcagcggaacttgaagaatccggatttgcaaaagaaagcattgaaaaatacattgatttatttgataaaatcagtgatggaatcgatggagtactttactgcaaagagaaattggaaggcttccttgcaccggaaattgcagacaatatgacaacaattatcgaaagtgtattagaagcaaaacagcaaactttgaaattaaatttgatccgacactggttcgtggaatgtcttactatacaggaccaatctttgaaatcagtattgatggatttgcaaggaagtgtaggcggtggcggacgctatgatgaaatgattggaaaattcacaggaacaccgacaccggcaaccgga

SEQ ID NO: 771 - DNA, 4290 bp, synthetic construct
  misc_feature 1..4290: note = Synthetic
  source 1..4290: mol_type = other DNA
ttttaagccttcttctgcacaagaacgaagtatgaaaaaaaattaagaaaagttgcaagtctataaaattattactaaatttgaatccatatataaaataaggagggtgagtacacctgaagtgtcccacccaatttgttttcacaacggaataatccttattgtgacttgcttaaaaagtcgagtgcaaatttaagcatttaataattaaaaaccaaattaaaacaagataaaatgaaaaaaatccttggattagacttaggacccaatagcattggttgggctaaagtagaagtagacgatgaaggaaactacttaagaaacattaagcttggcagtcgtattatacctatgactcaagatatgcttggtgatttcgacaaaggagtaaaggtgtctcaaacagcaacaagaacggattttcgaggcaatagacgtttaatagaacgacatttgttgcgtcgtgaacgattgcacagggtgctacacgcattaaagtttctacctaaacattatgaagatgccatagggtgggatagaaacgaacctgccacatacggtaaattcgttaataatagcgagccaaaattagcttgggagagacaagaagacgggtctatgcgttttcttttcatggaatcgttcaacgagatggtggcagattttgcccagaaccaaccatcattagtatctgatggaaagaaaataccgcttgattggaccatttattatctgcgaaagaaagcattgacacaaccaataaagaaagaagaattggcttggattctgcttaatttcaatcagaagcgtggctattaccagttgagaggcgaggaagaagaagataatctaacgaaacgtaaagagtattataagttgaaagttgttggagttgaagccgatggagcaccaaaaggtgggaaaacgtggtacaatatacacttagaaaacggatggacagctcgttgtcagagtaagatagcattagatgactgggttggaaaggtaaaagaatatattgtaaccaccgaatatgaggacgatggaaaaacgcccaaatgcgataaggaaggcaaagttaagcgttcgttcaaatctcctgaaaaagacgattggcaacttataaagacccgaacggagaaatttatagacgattcgaataaaactgtaggtgcatttatatacgaccgtcttttagaaaagccgttcgataagattcgtggaaagtatattcgcacgatagaacgcaagtattataagaatgaattgcgtgaaattctgcgcgaacaagctaagtatcatgaaggattacatagcttagaagcattgaaaatatgtgctgaagaactgtataagaataaccaacagcatcgggaatacttgttgaagaaagatatgacatttcttcttctcaatgatttgatattctatcaacgaccattaaaaagcaagaaatcgttaatagccgattgtccgtacgaagtatataagtacgatgataagctgacaggcaaaaaggggcagaagaaaataaaatgtatagctaagtctaatccttattatcaggagttcaggttgtggcagtttatagccaatcttcgccttttcagcgtaacagacggcaaagaggttacagcagaatatcttaagacggaagaagattatgtccgcttattttcttttctgaatgaccggaaagatataaaacaagaaacatttttgagaagtttcctaaagctgaagaaggtacccataggttcagagaagatatatcccattcgttggaattatatagaagatgctaataaaagctatccgtgcaatgctactcgacatgagttgcttcttgcattcgacagagcagacataccgcgtgaattgttagatgtggaagggagagaatacaggctttggcatctgttatattctatagaagcgaaagaagaaacagaaagcgcattgcgtaaactgaaagcaaacaaagcattcggcgaccttaacatagatgatgcttttgttaattcgttcctaaaaataaagccttttgagaaggagtatggggcatattccgaaaaagcaataaagaaactgttagctgttatgcgtagaggcagtttgtggaaagaagctgatatttgtgaggcaacaaagcagaatattgccaaaatactgcaaaacgatattgatgagaagctaaaaaagaaaatagcaatacacttctcgtagataatggagatacaatccaaggaacgccacttggaacttacaaggccatcgttaacccagtcaaagaaggggaacagcaccctatgtatgcagccctccaaaagctcggttttgaagctggtacacttggaaaccatgagtttaactatggtttagactaccttaaacgtgtcattgatacagctggaatgccgattgtcaacgctaatattgttgatcctaaaactggtgcttatgtctatgacccctataaaatcatcagcaaaacctttgttgataaaactggtcgcaaaacgaccatcaaaattggggtgactggaattgttccccctcaaattctcagctgggataaggccaacctcgaaggaaagattcaggtcaacgattctgtagaagctatccaaaagattatccctgaaatgcgtaaagcaggtgcagacatcactcttgtactctctcactcaggcatcggagatgataagtacgaaaaaggggaagaaaacgaaggctatcaaattgcaagcctacctggtgtggatgcagtcgtaacagggcattctcacgctgaatttccaagtggaaatggcactggtttttatgaaaaatatgctggtgttgatggcgtaaatggtaagattaatggtactcctgtaaccatggctggaaaatatggggatcacctcggcattatcgacctcaaccttatctacaaaaacggaaaatggactgttgccaacagcaaaggctctatccgcaagattcatactaagtccaaagacgctgatgaacgaatcaaagaaattgccaaaacagcccacgaaggaaccatccaatacgttcgccaacaagtcggaacaacaactgcaccaatcacgagttattttgcccttgtcagggacgatccatctgtccaaatcgtcaataacgcgcaaatctggtatgctaagaaagaactagaagggactcctgaaggagatcttcctattctctcggctgctgcaccgtttaaggcgggaacccgtggagatgctactgcctatacagatattccagctggcccaatcgccatcaaaaatgtagcggatctctacctctacgataatgtcacagctatccttaaagtcactggagctcaactcaaagaatggttggaaatgtctgctggtcagttcaacacgattgatccaactaaaaaagaagcgcaacagctcatcaatccaagctaccgtacttataattttgatgtgattgacggtgtgacctatgagtacgatgtcacccaaccaaataaatacgaccgcgaaggtaagttgatccacccagatgctagtcgtgtccgcaatctaaaataccaaggaaaagatgtccgtccagatcaggaattcatcgtagtaaccaacaactatcgcgcaaatggtaatttccctggtgttcgtgatgccagcctcaatcgtctcctaggacttgaaaatcgccaggttatcatcaactatatcctcgatgtaaaaaatatcaacccaagtgcagataaaaactggcacttcacaaatagcataaaagggttggatgttcgtttcttgacagctgataaggccaaaaacttggtcggcacagatggtgacattcaatatctagcaagctctgaccaagaaggtttcggcgaatactgccttctctatgtagagcctaagactgaacctgcagaaacaaatcaccacgaagtccaagatacgcagggacaaaatcaaggcgatgcaatcactctttcaaacggtgggcaaactattattttaccaagcgtaaataatccagcagctactaccttaccaaatacaggtgagaaaacgtctatcctaaccttcctaggtatcattctagccgtgtttgggctttctctcaagaaaagggaagaataacaacaaaagaagtaagacgagactcgtcctgcttctttttaatcagcaaaaacactgccagatttctctagcagtgttttgacatttcatttgcttagtagactgttttttcagtttctacatcgaagaagtgtgctttgttcaagtc

SEQ ID NO: 772 - DNA, 4287 bp, synthetic construct
  source 1..4287: mol_type = other DNA
  misc_feature 1..4287: note = Synthetic
actgcgtggagggtttgatttctgttgaatcttccattgcttgttatcttttttgggggggatgaacacgagaacacagaggcacagagattcttttcaaagagataaagcattaatttctgtgtctttgtgcctctatgttcgccccctaaatttcgtttgctgtgtctttttcttgccgcacatagaccgttgaccttcccatcccgcggcggcgcaggaacccttgcaggatgaatttgttcagttcgtctatggcggcatgtctggtcagcccgctcaattggatgtattcgtttttgttgatgcatacattccgcttgaggaacagttccagttcggcttttcttgtttcttcggtggtctctactgcctttttcgattttttggtagtggagtgtacacgttccaacgtcattttcttcttgatgttgttgcggaacgtgctgctgatgcgcaggtgtacgttttggaattggacggattcggagcggattttctttttctcgtcgtcggtctcacgcaggcatttcagtgaagtgctgaagaatccgagttctcccagctccacgatgtttccgttggccagcaggtcgcaaagttcgtcgatgcaggcatccagtgctgcccctatcacattcttgggcagatgttggaatgtagagacatgttccacaaactccttttgggtataagtccctttcgggcagatacgtgcatggagtgatttcttgtcttctttcccgtcgggcgaaggcgtttcgtaaaggtcgtaatacgcgctcataagatatctatttttgtttatagcgataaacagttctcgtcgcttcggggaattatttttgtcgctaagcggattaattttcttcttcctaaaaactaatcgtccgacaactgttgcattatcgttcgacagttgtttaattatcgtccgacagctgtcggacgaaacagaaactggtatgggacgattaattcttagtgagcaaaggtataaaatattgtgatacgaaaggtagtgtttggggagaaaaaaaatcccccgttaaggacgagggaacctaatgttttcacaacggaataatccttattgtgacttgcttcattttagtatggcaaatgtataaaataaatatggaaatacaatacttatattaataaaaaaaaatacctttgaagagaatactcaaaatatgatactatgaaaacgatacttggattggatttgggaaccaatagtgtaggatgggctgtaataaactctgtaattaaagagcaggccgaaagaatttggatagaaatggccggaagcaggattattccgatggatgctgctgtattgggagatttcgacaaagggaattctatatcgcaaacatctgaaaggacacgactcagaggggctcgccggttgcgcgaacgtcaattgttacgtcgtgaacgattacataaagtgttgaatattttaggttttttgcccaatcattacttagaatatattgattttgagaagcatcccggaaaattcttagccgatgccgagcctaaattagcgtgggtaaaagatgagcaagggaaatatacttttttatttcaagctgcatttgatgaaatgttggcggattttgcaatacatcagccttcattggtttctggtgataaaaagataccttacgattggacaatttattatcttcgcaagaaagctttgacagaaatgattagtaaggaagaattggcttggattcttttgaactttaatcagaaacgcggttattatcaacttagaggagaagaggaggaagacaatgccgggaaatcagttgaattttatgcgttgaaagtgctgacagtggaagcgactgatgaaaagaaaggccgggacgtatggtataatgtacatttggaaaacggttggatatatcgtagaagcagcagtgtgcctttggattgggaaggtcaggtaaaagagtttattgtaacgactgacttgaatccggatggtactccgaaattagataaatatggagaggtaaagcgttctttcagagctcctaaggaggatgactggatgttgataaagaaaaggactgaagctgacattgccaatactcataaaactgttggagcctatatttatgatactttgttgcagaaaccgcaacaaaaaataataggaaaattggtgaagacggtggagcggaaactttatagggacgaactgagcttgatattgcagaaacagtgtgcttttcatgctgagttgcaggacagagctttatatgcgaggtgtgttgaagcattgtatccgagcaatgaagtgcgacggaagaatatagccaatcgggattttgtttatttattaatggatgatatcttgttttatcaaagaccgttaaaaaccaaaaagtcgttgatagccaattgtccttacgaggagaatgaatatgtagatcgggaaacgggcgaaataaaaaaggctcctttaaaatgtatagccaaatcacatcctctttttcaagagttccgtttgtggaatttcctttctaatattcggatataccagaaagaaaaagaaataaatggaactttacatcttgatgtggatgtgacagcagagttcctgaaaacagaggatgattatgtggcattgtttgattggctgaattctcggaaggaaatagaacaaaagactttcctgaaataccctaaatttggattgaaaaaggaaatcagtaattatcggtggaattatgtagaagataaacagtatccgtgcaatgagacacggcatgctattctttccagtttggaaaaagccaatgtctgtattgatttcttgtcaaatgagaaagaggtagctttgtggcatattctatattctgtaagtgacaagcaggaaatagagaaagctttacgcacttttgcggcaaagaatgggttggatgaatcttttgtggaagcgtttaagaagttccctccattcaaatctgaatatggggcttattctgccaaggcgataaaaaaaatgttgcctttgatgagatgcggaaaatattgggacgtgtcttcgattgatgatacaaccaaagaaagaatcaaaaagattgttacaggtgagtatgacgagagaatatccgtcaaggttagggataaggtgatgaacttatcggatatttcttgttttaggaggcttccattatggctggcttgttacattgtgtacaatcgtcattcggaggataaagaggcggtcaaatgggaaagtcctgcggatattgatgcttatttggcttcttttaagcaacattcattacgcaatcctattgtggaacaagtgataaccgaaacattgcgtgttgtacgggatatttggaagcaggtggggagaaatccatatagagttaggacgtgagatgaaaaatcctgcggataaacgtaaaagaatgactgcgcagattttggaaaatgagaatgccaatctgcgtataaaggcattgcttgctgaatttatgaatccggaatatgagatagagaatgttcgtccttattcaccaagccagcaagaaatcttgcggatttatgaagatacggttttacatgccgaagaccaattgcctgaagagatagatgcaatattgaaaaagttcaatagcagtaaagtgccgaccaaatcagagttcctgcgttataaattatggctggagcagaaatatcgttcgccttataccggtgagctgatacctttgggcaagttgtttactgctgcttatgagatagagcatgtcattcctcaatcccgctattttgatgattcattttccaataaggtgatatgcgagtctgctgtgaataagttgaaagacaatcagctgggatatgaatttatcaagaaccatcatgggcagaaagttgaagtgggttttggaaaatcggtcgaaatcttttctgtggatagttacgaaagatttgtaaaagagcaatatgccaaatctgccgtgaaaatgaaaaaattgttgatggatgatattcccgaacaatttatagaacggcagttgaatgatagccggtacatcagtaaggtgattaagggacttttgtcaaatattgttcgtgaaaagaatgatagcggtgaatatgaaccggaggctgtttccaaaaatatagtagtttgcacaggaagcgtgacggacaggctgaaaagggattggggaatgaatgatgtctggaacagtattgtatatccccgttttgaacgtttaaactccttgactgatactcaga

SEQ ID NO: 773 - DNA, 4118 bp, synthetic construct
  misc_feature 1..4118: note = Synthetic
  source 1..4118: mol_type = other DNA
ttttcctcggcgtatcagtacgatgatagcggtagagatgggtggatacatttcgtaaccgcaagaaggacattttttcatgataggcgtttgctgttcggtaggcataccgcatacggaacagaagcgactgtgctggtcccaatacaatatctggtatgcttttccggcggctttatattcttccagggtgatgtattcataagacccccgtaggttgaccataatccattcttctgtttctgcaacgagctgttcgatagcaaatgtatgtaccatttcatccgtaggcagaaatacttcgtggattgtactgcctgcgtcggttttcaatggtgcttctgcaccataaggtacacagtatttaatttctcctttttctgttttttcctttttcagcagcagttggtctttaaagaagacgaaccactgcgtagggttttgatctaattctttcattttccttcttcatttttgatgtatactacgtttctgcctgttccgcgccggcgtaggataccttcagtgataaatgcattcaactcgttcatggcagttcgctctccgctaccggttagcctaatgtattctctccgtgagacgcagacatttttatcgagaaatgcgagcaatgcttcttttttcttttcgatattgatgtctccctttgaagggcgggtaggtgactggatacgttctaatatcatttgagttctcattttctttttgaacgccttgctagtgcgcagacacacatttttgaagacgattgattctgcacgtatctttttctccggtgtggcttctcgcaggcacttcagggatgtactaaggaagccgagttctcctaattctacgatattaccgtccgatagtaattcgcacaattcgtccataataccctgtagagctccttccaacagggcgtacggaaggtgttggagcatagctacttgtttcaggaactctttggtggtgtatgtctttttgggatagatgcgggcatgtagcgcttttttttcttttttccctttcggattgggcgtttcgtaaagatcataatatgcactcataagattttgagttaaagggttaatgatgttagttttttagggtgcataaatatattcttgttccttcagtaattaaattctttagtttcgacgaattaatattgcattcgcatgaatttatttgtgcaacaagtgtaactctttcatgcaatatttgtatatgtttcgtgcaacaactgttgcatgaaaatatcatatcctttgcatggaaaaaatttagtatgcaaaggtataaataatagtgaaacgatggagggttttcaggaaaagaattaataattgtgcatggtgttgaaagtgtagggggtaaggtataaaaaaatcccccgttaaggacgagggaacctaatgttttcacaacggaataatccttattgtgatttgatttcattttagtacgacaaagatatgaaataaaaatgatataatctatacttttgatatttattttttctacttttgtgaatatgaactttaaaacatgatattatgaaaaaagtaacagtggggttggacctaggaaccaatagtgtgggatggtctgtcataaattcgataattgccgaacagactgaaaaaatatggttagagatggctggcagtcgaataattcctatggatgctgctatattgggagactttgataggggaaattctacttcacagacggcagaaagaacccgccttcgcgggataagacgtttgcgtgaaagatgtttgttgaggcgtgaacgattgcacaaagtattgcacatattaggatttttgccggaacattattctgaacagataagctgggataaacatccaggacaacttatgaatctgacggagcctaaattggcctggaagaggagtgaaacaggaaaatatgaattcatctttcagtccgcttttaacgagatgctggctgattttgcacaacaccagccaacattagtggcaaatagtaaaaaagtaccttatgattggactatttattatttaagaaaaaaggctctggcagagaaggtatccaaattagaattagcatggattttattaaattttaatcagaaacgtggatactaccaactgagaggtgaagaggaagaagaaaaatccaataaacgggttgaatattatgccctgaaagtagtgcgtgtggaagcaacggacgagaaaaagggaaaagatacctggtataatgtacatttggaaaatggatggatttatcgtcgttccagtaatgtcccattagattgggagggtaaaattaaggagtttattgtgacaacggatttgaatgaagatggaagtcctaaagtggataaacaaggtgaggttaaacgttcgttccgtgccccaaaggaagatgattggacactgataaagaagaaaacagaagcggatgtggccgatagtcgtaagactgtgggctggtatatctatgatatattgctgcaaaaacctcagcagaagataagaggaaagttagtacgtaccatagaacgtaaattttataaagaagagctaaagcagatattggaaaaacaatctgttttccatactgaattgcacgaccgtgatttatataagaaatgccttgaatgtttgtatccgaaaaatgatgcacataagcgcaacatcgctaatcgtgattttgtgtatatgtttacagaagatattcttttttatcagcgcccgttaaagagtaagaagtcgttgattgacgattgcccttatgaaaagcatgaatatgtggacaaggagactggtgaaataaagcatgcgtcattaaaatgtatagctaagtcgcacccattatttcaagagtttcgtttgtggcattttctatcaaatatcaggatttatcaaaaagaaaggcagcaaggagacagattgttgactgatgtggatgtgaccagtgaatttttgaatacggaggaagatcgtgtagctttatttgaatggttgaatgaacgtaaggaaattgatcagaagaattttctgaaatatcctcagtttaatctaaaaaataaaacagccaactatcgttggaattatgtggaagataaaatgtatccttgcaatgaaacaagatatttaataaaatcccgattggacaaagcacatgtcttctccggcgactttattttatctacagaaaatgagatggctctgtggcatatattatattcagtcagtgataaagttgaattagagaaggctttaaccacatttgcaactaagcatgctttggataaggtcgctttcgtttaagaaagcgcctccatttgaaaaagagtatggggcttattctgccaaagctataaagaagctgttgccattgatgcgaatgggaaaatactggagtgcagatgttattgataaaacgaccaaagaacgcatagacaaaatcgtaacgggcgaatatgatgaaaatattcataataaagttcgtgagaagtctatacatttgcagagtgttgatgacttcagaggtttacctttgtggttggtctgttatgttgtctatggacggcattctgaagtgaaggacatcactaaatgggaaacgccgtctgatatagacgcttatttgaaagcattcaaacaacattctttgcgtaatccgatagtagagcaaatcatagtggaaacactacgtgtggtccgtgatatttggaagcgtgtagggactattgatgaaattcatgtggagttagggcgtgaaatgaaaaatacagcaaaggatagggcaaaaatgacgatgcaagttttggaaaatgaaaatgctaatcttcgcatcaaggctctgttgacggaatttgtgaaccctgaatataacattgaaaatgtgcgtccctattcgccaagtcaacaggaattgttacgtatttatgaagatggaatattaaattatgtagcagatattccggaagatattgagaattttctgaaaaagctgaaagacagcaaatctccttcaaagtcagaatttatgcggtataaactatggttggagcagaagtaccgttctccttatacaggagaaattattcc

SEQ ID NO: 774 - DNA, 3634 bp, synthetic construct
  source 1..3634: mol_type = other DNA
  misc_feature 1..3634: note = Synthetic
aaatataatactatgagaacgatacttggattggatttgggaaccaatagtataggatgggctgtaataaactctgtaattaaagaacagaccgagagaatttggatagaaatggctggcagtagaataattccgatggatgctgctatcttgggagactttgacaaagggaattctatatcacagacagctgaaagaacccgttttagaggggtgcgtcgattgagagagcgacaattactacgccgtgaacggttgcataaagttttgaagattcttggcttcctgccggaacactatttaaaatgaatagattttgaaaagcatacgggtaaattcttgtcaggcagcgaaccgaaattgccatgggtaaaggatagatggggaaaatactcttttttatttcagacagcgtttaatgaaatgttggcggattttgcaaaacaccaaccttcattggtttttgatggtaaaaaaatcccttatgactggacagtttattatctccgtaagaaagctttgacagaaatgataagtaaagaagaactggcatggattcttttgaactttaatcagaaacgtggttattatcagcttagaggagaagaggaggaagacaatgcaggaaaatctgttgaattttatgcattgaaagtcttgtcggtggaagcgactgatgaaaagaaaggccgggatatatggtataatgtacatctggagaatggatgggtatatcgtagaagcagtaatgtcccattggactgggaaggacgggtaaaagagtttattgtcactactgacttaaatccggacggtactccaaagcttgataagtatgaagcgttctttcagagcgcctaaagaggatgattggatgttaataaagaaaaggaccgaagcggacattaccggtactcataaaacgattgggagttatatatatgatgctttgttgcaggagccacaacaaaagataataggaaaattggtgaaaacagtagaacgaaagttttacaaggaggaactgaactttattttgcagaagcaatgtgcttttcatgcagaattgcaggatagagatttatacatgaggtgtattgaagcgttgtatccgggtaatgaagtgcaacggagaaatatagctaaccgggactttatctatttgttaatagatgatgtcttgttttatcaaaggccgttgaaaaccaaaaagtcattgatagctaattgcccttatgaggaaaatgaatatgtaaaccgcaaaacaggtgaaatcaaaacagctccgttaaagtgtatagccaagtcacatcctctttttcaggaattccgtttatggtatttcctttccaatattcgggtatatcaaaaggaaagggaagtaaatggaactttacatttggatgtggatgtgacaacggagtttttgaaaacagaagatgattatgtggctctatttgattggctgaactctcgaaaggaaatagatcagaaagcttttctgagatatcctgcgtttggactgaaaaaggaaataaataattatcgttggaattatgtcgaggataagttctacccatgtaatgagacgagacatgcgattctttcccgtttggaaaaggccggtattggtattgactttttatctgatgaaaaagaaacagccttgtggcatatcttatattctgtaagtgacaagcaggaaatagagaaagcattggcgacttttgcggttaagaacggattgaatgaatcctttgtggaagtgttcaagaagtttcctcctttcaagtctgaatatggcgcttattctgccaaggcgataaagaagttgttgcctttgatgaggtgcggaaagtattgggatatgtcgttgattgatggtacaaccaaggaaagaatagaaaggataatagcaggtgagtgtgatgagagtataggtgccaaggttagagaaaaggcgatgaacttgtcggatatatcttgttttaagaggcttccgttgtggttggcttgttatgtagtgtataatcgtcattccgaagataaagaaataaccaaatgggaaacccctgctgatattgatgcttatctggctgcttttaagcaacattcactacgaaatcctatcgtagaacaagtgataaccgagacattgagagttgtcagggatatttggaaacaggttgggaaaattgatgaaatccgtattgagttagggcgcgagatgaaaaatcctgcggacaagcgaaaaagaatgactactcagattctggagaatgaaaatgccaatttacgtataaaggcattgcttgctgaatttgtgaatccggaatatggggtagagaatgtccgtccctattcaccaagtcaacaagaaatattgcggatttatgaggatgcagttttaaagggggaagaacagattccggaagatatagatgtgatattgaaaaaattcaataccagtaaattaccgacgaaatcagaattcttgcgttataaattatggctggaacagaaatatcgttcaccttataccggtgagctgatacctttggctaaattatttactgctgcgtatgagatagaacatgttatacctcaatcccgctattttgatgattcattctctaacaaagtgatatgtgaatctgctgtgaacaagttgaaagataatcaactgggatatgagtttatcaagaatcatcatggacagaaagtggaagtgggttttggaaagacagtagaaatcttttctgtggatagttacgaacgttttgtaaaagaacaatatgcaaaatcgggcataaaaatgaagaaattgttgatggatgatattcccgagcaatttattgaacgccaattaaacgatagccggtatatcagtaaggttgtcaaaggacttttgtcgaatatcgttcgtgaaaagaatgatagcggtgaatatgaaccggaggctgtttcaaaaaacatattagtttgtacaggaagcgtgacggacaggctgaaaaaggattggggcatgaatgacgtctggaatagtattgtaagtcctcgttttgaacgtttaaatgctttgagaataaagacggaaaaaaagtttttcaaacagcagtgccccttgaatatcagaaaggattcagtaagaagcgtatagaccatcggcatcatgctatggatgcaatagtaatagcttgtgctacacggaatcatgtaaactatctgaataatgagtctgcaagccggaatgcgaaaatttcccgttatgatttgcagagactgttgtgtgataagagtaggggggatggtaatggtaattatagatggattataaagaaaccatggactacttttacgcaagatgcaagggaagcgttgagtgggataatagttagcttgaaacagaatttgcgtataataaataaaacaaccaatatctatcaacattttgatgcaaatgggactcgtgtttatgagaaacagaaaatcggtgatagttgggctatccgtaaaccgatgcacaaagatacggtttttggagcggtaaatttaagaaaggtaaaggtggtacgcctatctgtcgctttggatactccttctatgattgttaacaaaagagtaaaaaataagg

SEQ ID NO: 775 - DNA, 3469 bp, synthetic construct
  source 1..3469: mol_type = other DNA
  misc_feature 1..3469: note = Synthetic
caggatatagaaaaattatacgaaccgttggtcagtatggcaaatatctattaaaagatgagtctaaaaaagcccccgttaaaggacgagggcaacctaaatgttttcacaacggaataatccttattgtgacttgcttcaaattagtattgcaaaactatgaaataaatatgtaaaggacaagtgattattagaataatttgataactttgaaaagttttgataaaatagttgtcttatgaaaaatatagtgggtcttgatttgggtaccaatagcataggttgggcagtagtaaatggaagtgtcaatgacgatggaagtgaacaattggttaagatacaagcttctggaagtcgcatcatacctatggatgcagctatgataggagattttaataaaggtaattccatatctcaaactgctgaaagaaccagattgcgtggagttcgtcgtttaagcgaacgatatctgcttcgcagagaacggttgcatagaattcttgatattttaggatttttgccatttcattttgctcaagatttagataggcatggtaagatagttaagggcaaggaacctaaattggcttggcgtaagaatgaagctggtcagtttgaatttatattccaagattcatttaaggaaatgctggaggattttaagctaaatcatccgaatctgataacagatgataaaaaagtaccttatgattggactatctactatctccgtaaaaagggattgacttctaaaatttcaaaagaagaattggcgtggatattattgaattttaatcaaaagcgtggatattatcaattacgtggtgaggaagagaaaaaaaatgataatgttatgattattaattcaaaagtgattgatgttgttaaggcagagaaagataagaaatatgaaaaatattggtataatgtactattggagaatggtttattgtatcgagctgcattttataatgatatttctttttggaaaggacatactaaggaatttgttttaaaaactattaaattaaagagtgggggtacaaaacaggaattatcttttttaccatcttttgatgaaatagaaaagatggagaaaaagcaaaaagataaaatgtacttcaaaataaaattgaaaacagaagcggatattgatcaggctcataagactgtaggtacctatatttatgatacgcttttaggaaatcctagtcagaaaattcgtggaagattggtgagaaccattgagcgtaaatattataaggaagagttgaaactgattttggataaacagaaggaattccatccggaattgcaagatagagcattgtatgctgcttgtgttgaagaactatatacaataaatgaagcacatcggaataatattggtaatcgggattttacttatttgtttttagaggatatactcttttatcagcgtcctcttaaaagcaaaaaatcattaatagacaattgtccttatgaggagaatcagggtcttgataaggaaacgggagagataaaatcttttcctgtaaaatgtattgctaaatcacatccgttgtttcaagaattccgcttgtggcaatttataataaatctgcgtatttataggaaagacctggcacaagatgtggatgttacaaatgagttattgaagacagaagaagattatgttgctttatttgactggttgaatggtaaaaaagaaattgatcaaaaggcttttttgaaatatccggtttttggactgaaaaaagagatagagaattatcgttggaattatgtgcaagacaaaccttatccatgtaatgaaacccgtttattgatgttggcgaggctggagaaatgtgatatttctattgaattcctgacaaaagagaatgaggaagctttatggcatatattatattcggttgaagataagaatgaaatagtaaaagctttgcagaaatttgcggataaacacgacctgaatgcttcttttgttgatgtattccggaaattcccgccttttaagaaagaatatggttcctattcggcaaaagcgattaaaaagttattgcctttaatgcgtatgggaaaatattggagcgaggattccatagataaaggaacgcgtaaacggatggataagataataacaggagaatatgatgagaaaatagaaaatagagtaagggagaaagtaattcatcttgctgatgtttctgatttcagaggtttgcctctttggttagtgtgttacattgtttatggtcgtcactctgaagcaaaagaaataacccagtggaaatctcctgctgatattgattcgtatttaaaatcttttaagcaacattcattgcgtaatccaattgttgagcagattattattgaaacactacgtgttgttcgtgatatttggaaacaagtgggaaatattgatgagatacatgtggagttggggcgtgagatgaagaatccggctgacaagcggaagaaaatgacaataccaacttgcgtatcaaatatttgctcacggaatttttgaatcctgaatatgaggttgaaaatgttcgtccttattcgccaagtcagcaggatattttgcgtatttatgaagagggtgttttaaatagtgtttccgatttaccggaggaaatatcggatatattgaaaaagtttacagaaacagacttgaagaagcgtccttcaaggtcagaaattttgcgttacaagctttggctggaacagaagtatcgttctccttataccggtgaagtgattccattaggtaagttgtttacgcctgcatacgaaatagagcatgttattccccaatcatgttattttgatgattcttttagtaacaaggtgatttgtgaagcggaagtcaataagcttaaaagcaatttattgggacatgagtttatagtgaaacatcatggggagatagtagaacttccttttggaaaaaaagtaaggatcttcactgtggatgaatatgagcaatttgtgaaagataactattcgcgtactcgtggtaaaatgaaaaaacttttgatggatgatattccggaggagtttgttgctcgtcagctgaatgatagtaggtacatcagcaaagttgtaaagtcccttctttccaacatcgttagagaaaaaggagaggaagaagcaatttcaaagaatgtaattccttgtaccggaggagttacggatcgtttgaagaaagattggggaataaatgaggtttggaataagattatacttcctcgttttcaacgactcaatgagttgaccggcacaaataaatttacaactaaaaatgttgggattcaagaaattccgacaatgcctttggaattgcaaaaaggttttaataagaaaagaatagatcatcgtcaccatgcaatggatgccataataatagcgtgtgcaaataggaatattattaattatttaaataatgagtcggcaacagcta

SEQ ID NO: 776 - DNA, 3399 bp, synthetic construct
  source 1..3399: mol_type = other DNA
  misc_feature 1..3399: note = Synthetic
ctcccccaagtccaagcgatgtgaccgcctcagtcatcatcgcatattcggtggcccagatctccatcggatcgtgctccaccatccccggcttcgggaaatgctgtgtgaattccttctggcgaacagccatagcctcgcccctcttattgaaaacaatggctcttgacgagctcgtgccctgatcaagggcaatgacatattctttcatattcaagaactaatcttcattaacgtgttaataatcctggtcacgcctgcctggaaagcaagcagacaaacgattccatgacgaccgtttgtccaaacaaatgtataaaaatttcctttcaactccaacctttcctctaaaggttaatgaatatgctaatgaatattcaagtgccggaatattccgcctccattgcccttcgcatctatgaatatgccatcataattcatagcactcgcactcacggcaacactttgcctcccaaaacgttgccagatagggcttgaaacacatcttcatcaacaaaaacgccattgatcgtttccgtcctatatgtcactagcacggtcgtgattgataaagaactattaatcagcaagttacaaaacattaccctccagccatgaccggcaataattcgtaacacattgatagtaaatcgataagactccacaataagcgatcactttgtcgagaacactttgtgacatttcagcttccgtcgaagacaagcagtaacactacagaagcaattttgtgcgatatagcacctgttgcaagtatagattactgccaaaattcccttgttcacctcattcactgacatcagtcatagcgtactattacatttagttgatttacagcatacaaatggatgaacgctaatcatgcttttcaaaacacaacaatagtctatttttattgaagtatacaatatttcatattttttatgtaagtttgtgacagacactaatattgaagccaataaaaaaggcgaggaataacttccccaccttggatgttttcacaacggaataatccttattgtgatttgcttcagatgcaacaaatatatgttttttttaggtaaaaacaaaattttaactacaatgaaaaaaatacttggtctagacttgggtacaaactcaattggatgggcactgatcaatgtgtcccaaaatgatgatggggaagaatccttcgagaacatcgcaatatcgggttctcgcattatccctatggaccaagcttctatcggtgatttcaatagaggcaacactatatcacaaaccaaagaaaggacacaacaccgaggtacacgcagactgtacgagcgtggacatttaagacgtgaacgtatgaaccgtgtcctatcaatcttaaattttttaccggaacattacaaaatatgcttggatgaatatggaaagattaagccagatttggagcctaaaatagcgtggaaattaaattcttgtcagcattatgaatttctatttatgaaatcatataatgaaatgttgcaagatttcaagaaatgtcatcagacattattagaaagcgggaaaaacatcccctatgactggacaatctattatttgaggaaaaaagcgttgagcctaccggtctcaaaatatgaattagcttggatattattgaacttcaatcaaaagagaggctattatcagttacggggagaagatgtttctgagaatacacaaaaagcagaagaatactactcgcttaaagttgttgatttaatagagaccggtgaaaagaaaggaaaggatctttggtataatgtagtgttagaaaacggattcatctatagaaggacattcccagaaaaacctgactggatcggtaaggtaaaagatttcattgtaaccacagatttagaaaaagacggaaagcccaaagtagataaagaaggaaatatcaagagatccttcaggatgcctaaagaagatgattggggattgttgaagaaaaagactgaagcagatattgacaaaaccaataaaacaataggcgaatatatttacgatgccttacttgctgaatttgaatgcaaggtaagaggtaaacttgtcggagttgttgagaggaaatactacaaagcagaactggcaaggattttagaggcacagaagaaatttattcccgaactcaacgatataggtctgtacgaacgatgcataactgctctatatcccaataacaccgcttatcgcaatagtatagcaagcagggatttcacttatctttttgttaatgatattctcttctaccagagacctctgaaaagtaaaaaatacctaatcaatgattgcccgatggaaagtaggcactacatagataagggaactggtgaatgcgtgacaataccgttaaaatgcatcgcaaagagtaatcctctgttccaagaattccgtttatggcagttcattacaaatctaaggatatatgaaagagaaagaaagattgacgatagtataaaagaaaatatagatgtcacatctcagttcttaccgaattatacctcatactcaaaattatacgattggcttaacaacaagcaatctattaatcagaaaacttttctctgctatccagaattcgggctgccccaatcggcaagagacacttatcgttggaactatgttgaagagaaagattacccctgtaatgagacacgttcattaatgttgaaatatctgtcaaaggcaggtgtcccttctgaatttctcacatcgaatacagaaagagaattatggcatattctatattctgtagaagataagatagaaattgccaaggctttgtcttcattcgcgaaaagacattttttaggagacgctttcgtggaagtattcagaagaatcccttcttttaagaaagactatggcgcatattcggaaaaagccataaaaaaacttcttccattaatgaggatggggcaatattggaaagaagattctattgattccaatacccatgaaaggatcaacatgattcttactggagaatatgatgaaagaatcagggttatcaaagattatgcaagtgctactgtgcttgttgcgtgcatctttgcgcttatagtttgtttatttgtattgataaggagaattgtataaatgaaggaattattacttgaaaaggcttttgaagccatggagaatgcttatgcaccgtattctaactataaagttggtgcttgtgttttgactaaggatggtacttatatcaagggttgcaatattgaaaatgcttcttatggggcaactaattgtgctgagagaactgcgatttttgcgacttatgccaatggctatagaaaagaagatgtcgtggccttagctatcgtgtctaatggcgatagattagctgcaccttgtggcatt

SEQ ID NO: 777 - DNA, 23288 bp, synthetic construct
  source 1..23288: mol_type = other DNA
  misc_feature 1..23288: note = Synthetic
aggcccgtccagagcttccagcacttccaggcaggccgtctgagccgccggttttttgagcgaaaagcctccccctattccgcgggtcgaggcgataattcccttattcgccaggctttggagtatcttggccatgtagctgggcgaaagaccgagccgttcggccgccgcgccggcggcgatgcttcccccgttgcactccgccagcgcgagggcgtggagggccgcgccggttctgtccgaaataccgataatccggtccacattctctcctggttcacctaaatcggatattggtatcttatttatcgattttccgatttttagtcaagtgccctagcgcgggtattcgtatcggctacacatccgtcgcgtttcatggcacaattgttgacggcgcatttacgcacccaggggtatcatcatgctcgtaccattcatcaaccgccttctccattggttcgtgaccggcgtcagcacgaccgttctgtccctcatgatgctgtcgaaaggatgctccctcgaaacattgggattggtgatggcgatcgcatcgttgttcgttgtggtattcgagtttcccagcgggattctttccgacatggtcggacaaaagaaagtttacctcttctcgttaaccatttccatcgtcggttacgccgtgattttgatgacgaacagttttctggggcttatggtgggtttttcgttttacggcatagccagggcgttttcctccggatcggtggaagctttgttcatcaacaattacatacggatagagggtaaggaaaaactgcataccctcatcagctggatgaacagcggcgagatcatcggactggccaccggcgccctgctcggaggtttcataccggccatctgggcgaggttcttccccgataaaaacaagtacaacggcaatctgatcatccagatatgcgtcctggcggtgctattggtttttactttattcggcgtaaaggaaggtgccgaaacggaaaaagggaaacagacgttgggcgaccatgtgcgcgagtccacgaaactgattttaaacaacagaagcatcctgctcctggtgatcggaaccatggtctggggtttttgcttcaactcgatcgaggttttctggcaacccaacgtaaagggaattctgggctccgattcccaaacatggattttcggtcttatcaacagcggctacttcctcgcctcactggtcggcgtgggggtaatcaacctcgtgctgcggaaacgcagaatctcccagagcctcattctcgtgatatccagattatgcgtaggtctgctgattgtggttttggcgcttcaaaaaagcctcttgtccttcgccggcatttatctcttcctgtttatgatcaacggaataatgaatattcccgaaggaaccatgctcaattcactcctgcccgacgacaagcgctcatcgcttctatcgttttcatcgcttatgctgcagttgggcggcattataggatcggtcctcttcagcaggctggtcaagacgctccggatctcaggagtctggataatagcgggcattgtcttcggaatttccggcctgttgtacctatacattcgaaatccagccatgccgggatcgagggtgcgcccaaatgactaagctgaccagggatttctacaccagggacgcgttgagcgtcgcaagggaccttctgggaaagcgcctggtccgaatagtcgatgggcgggaaatctccgcgatgatcgtggaaaccgaggcgtatatgggcatcgacgataaggccgctcatttttacgctggacgaaggacgccccgcgtggagatcatctatggaaagcctggcttctcctatgtttttttcatctatggcatgcatcattgcttcaatatagtgacaggccccgagggcattccccaggccgttttaattcgagccgccgaaccggtcagcggactcgaacggatggcccaaaacaggttcggaaaggcctatgcgcggctcgaaaaaaaacaactaattcaattgaccaatggtccggggaaattatgcgcagccctggcgattcacagggactgcaacggcatggatctctgcggcgacgaattattcctgacggaccacgacgccgaggctttcgaagtcctatcatcgaggagaatcggcatcgactacgcagaggaagccagggagttcccgtggcggatgtatatcaaggataaccgatatgtatcggtaaagggataaggcccccgccacccttttcaaaacacgcggggctgccccggattcctccaggacagccccgcacacagcaggcttactataaaacttattccagcaccgcgcccttgttgcccgatgtggtcacccggcgataacggtccagaaaatcgctgtccacgggttgcgcatagggtttccattgggctttgcggcgcgccagttcggcctcgtccacgagaatatccagcttcttggccgggatatcgacgctgatcatgtcgccttcgcgcaccagcgcgataggtccgcccgcggcggcctcgggggagacatggccgatggaggcgcccctggaagccccggagaatctcccgtccgtgatgagggctacggtcttgtccatgcccatgccggccagcgcggaggtgggggtgagcatctcgcgcatccccgggccgccctttgggccttcgtagcggatcaccagcacatcgccatccaggatctttctcgccttgatcgcggcgaaggcgtcctcctcgctgtcgaacacccgggccggtcccttgtgcaccagcatctcgggggccaccgccgactgcttgacgacggcgccatcgggagccagggagcccttaagaatagccagacctccggtggcgtggtaaggcctgtccaagggtcggatcacctccggattcttgacctgcgcgcccttgatgttttcccgcacagtttttcccgtggccgtgatgcactcgccgtggagcaggcctttagccgacaactgggccatgagggcctggacgccgccggcctggtagagatcctggatgtggtgagagccgccgggcgacatggagcagagatggggcaccttgcctccgatttgattgaagagttcgatgtcgaaatccactcccgccgcatgggcgatcgcgggcaggtgcagggtcgtgttcgtcgagccgcccaaggcgagatccacggctatggcgttttcgaaagccttccgcgtaagaatatccctcggcttaatgtccttttccacgagattcatgatagccctgccggcatccttggccaggcggtcccgggcggcgtatacggctggaatcgtgccgttgccgggaaggcctatgccgagggcttccatcatgcagttcatggtgttggcggtgaacatgcccgaacaggagccgcagcccgggcaggcggcgttttcaacctccagaagttcctcgtcggtagctttaccgacaatgtgcttgccgaccgtttcgaagaccgtgttgagatcgacctccttgccgtggagcaatcctgtcagcatgggaccgccggatactacgatcgaagggatattgagccgcgccgcggccatggccatgccgggtattatcttgtcgcaattggtcaccagcaccaggccgtcgaaggcatgggcccgggtcatcacttccaccgaatccattatcaactcccgggaaggcagggagtacttcatgcctatatggttcatggcgattccgtcgcagaccccgatggtggggaactcgatgggcagcccccccgcggcgtagatacccgccttgaccgcgtccacgatcctgcgcagatggacatggccgggtattatctggttatacgcgttagccacccctatccagggccgctctatctcccaatcggtatagcccgccgccttcatcaaggaacggtgcggggcgcgctcgggaccttttttcgcttgatcgcttcgcattatatgctcctatttctggtcttaccaaggtaagaccattgttgcttaaatcgtagaccggcggtattatgatgtcaagcttatttaggagcgcttatggagaaaaaaagggaagacttggtaaggtgtcttcaaaaaatgattttaaatcccgatgttttttccagcggtaagctgcctccggaacgggaactggctctacggctgggcgttagcagggctctcctgcgggaagcgatcatcaccctggaagcgctgggatatatagaaatcagagagcgccagggcgcgttcataaaagccccggaatccgccgatttctccgccagcatgaaatacgccatcttctggcccggggatttgctcataaacctcatggaaatgcgtcttctcatcgaaccgcccatcgccggccaggcggcgcttcgccggaccggggaggaactctcccgcatgcgcgcctgcatcgcccaactcgccgccgcgcagaatactcccgatgcaggctcttcctcaggcgcccaatgggactcgatgctccacatgctggtcgtggaggcggcgaaaaatcccctccttacccgcctttacgaaggcatgcgttccaccatggataattacatcaccatcagccgccaaaggctcctcgccctggaaacctggccggccaaaatcttgggcgagcacaccgctttggtcgacgccatagaagcgcgaaacgccgtaaaagccgaagaagcgcagcggcgtcatctgtccagcgccctggagaagttgcgcgacatctcaaattccccggggcggaaagccgatatcggcgaaggtctcatatagggtatggttcgatcatggatatcatcgaagtaaaaaactcggtcggccgggccgccctgttcgaattctcccgttccggcggtcccggcggccagaacgtcaacaaggtcaacaccaaggttaccctcaaagtggcggtggacgcgatagaaggcttgaacgaaacggagcggcgaaggcttcgggagaaattggccggcagaataaacggccaaggctttctcgtcctccaggttcaggacgagcgcagccagaaagccaatagagccatggcgctggaacgccttttcaaactcgtcctcgccgccgccaagcgaccggcgccccgaatacccaccaaacccggcaaggccgccaaacaacggcgcctttcgatcaaaaaagcccgcagccagtccaagatcgatagaaggaaacctgtcatcgactaaaaaggcggatgggcggaagagcgctcaatcccgattttcgaactggctgttgtagaggccggcgtaaaaaccattcttgcgcaaaagctcctcatgactgccctgctccacaatatcgcccttgtccatgaccagaatcaggtcggcgtcgcgtatggtggaaagcctgtgggcgatgatgaagctggttcttcccttcatgagattgcccatggccttctgaatcagaacctcggtatgggtatccaccgagctggtcgcttcgtccaggatcagcaagggaggatcggccaatatggcccgggcgatggtgagcagctgtttctgcccctgggagatattgctcgtctcctcgttcagcaccgtatcgtaaccatcgggaaaggcgcggataaaatggtcggcgtgggcggccctcgcggcggcatagacctcctcctcgcccgcttcctgtctgccgtagcggatgttctccatgatcgtgccggaaaaaagccaggtatcctgcagcaccatcccgaacagcctgcgcaggttctttctcgggtagtcgatgatatttctgccgtccaacgcgatttccccttcatccacatcgtagaaacgcatgaggagcttcaccatggtagtcttgccagcccccgtggggcctacgatggctacccgcattcccgcccgtatttccgcggaaaaagagcggatgaccggggcatccttggaatagccgaatttcacgccccggaaatcgatatccccttcaattccgggcttctccccagcggcgccggcatcgggtttttcctcttcctcctccaagaacgcgaaaacacgttccgccgaagcggcggtctgctggaggacattggagatattggcgatctgggacatgggttgggtgaaggatcgaatgtactggatgaaggcctgcacatcgcccagggttatcgccctggatgcggccagatagccgcccaggatggtcacgcccacgtagccgaggtttcccacgaaattcatcaccggcatcatgatggaggaaaggaactgggatttccacgccgaatgatagagggtatcgttgagttcgtcgaaagcggcctgattcctggcctccccgttgaacgctttcaccacgccgtggctggagaatatttcctctatgtgcccgttcacgtggcctagatattcctgctgccggctatagtatttttgggatttccccaccacgaagcgaatgatacccagtgaaatgggaatggtgacaaaggcgaccagcgtcatcaaccaactgatgctgagcatcatgacaaaggcgccaagaatacccaccacggatatgatcatctgggaaagactctggttcagggtttggttgaccgtatccacgtcgttggtcattctcgagagcacttcgccgtggctggtcttgtcgaaatagctcaggggcatgcggtgtatcttggcctggagatcctgcctgaatcgttccgtcatcgccgccgagacccccgccatgatccagccctggagataggacaaaagcgccgagaaaagatagagtcccaggacaattcccagtatgcccgccaaagcttcgaaatctataccgggtccgccccgcaggctcgacatgactccttccgccagctttgtcgtcgcctttccgagcaccttaggcccgaagatggagaacactgtcgaaaaggcggcgagcaggataaccatgccggtccggtatttgtaaacccccatgtaccccaggagcttcttcatcgtgcccgaaaaatccctgggcttttcgcccttgagcatcgcgtggggcccccctcgcccgagggcggctccgggacgcatgggccttgccatggaagaatcggccgcgttccgaccctggggcgacgccgcgctattgttcggcttattctcggcggcgctcataccaactcctcggcgctcagctgggacagggctatatccctgtatacctcgcaggtttccatcagctcggcgtggcggccctttcccaccatcttgccttcatccagcacgatgatttgatcagcccccttgatgcttgcaacccgctgggtcaccaggatcaccgtgctatcggccaacttctccgtcagggcggccctgagttttttgtcggtagtgaaatcgagggcagaaaaactgtcgtcaaagatgaagacaggtccctttttcatcagcgcccgggcgatggtgaggcgttgacgttggccgcccgagaagttcattccgccctgggacaccggagctgatatcccgccgggaagggcccgcacgaactccttcgcctgggcgatttccaaagccctgtccaggtcctcggagccagcttcgtccctggcgtagcgcagattgctctccacggtgccggagaaaagcgaagccttctggggcacaaaaccgattaaatcgcgcaatgccttctgctttaccgacctgacatccactccgtcgatactcaccgacccttcggtgacgtcgtaaaatctaggcacgaggctcaccagcgtggtcttgcccgcgcccgtggtgcctacgaccgccgtaaccttgccgggacgggcggtgaaatctatcctgtgcaacacgtcctcgttcgatccgggataacggaaactgacattgtcaaagcgcacaacgccgccgggcttatcgggaaataccgcgggcgaaggcgggtcgacgacactggtcccggtggtcagcacctggtggatcctgtcggcggaaatggaagcccggggaataatgatgaacatcatggacatcatcatgaaggaaaagaaaatttgcatcgaatattgcatgaacgccatcatgtcgccgatctgaatctgcgactgggcgatttccttggcccccacccagacgatgagaatggagatcccattcatgatgagggtgatcaagggcatcatgagcgccatgatcctggatacgaagagcatgataccggtgagttcggcgttgacttctccgaagcgttgttcttcctttttttccgtggcgaaggcccggatgaccatcatgcctgtcaggttttcgcggagcacgagattgagcctgtccaccaaggcctggatccgcttgaacctgggcagggctatggaaaacaccgccagcacgatcgccaggaggattcccaccgccagggcgatgatccaccacatggatgaggctttcgaggtggctctgattattcccccgattcctatgatcggagcgaagaacaacatccgcatggccatattgctgaccatctggatctgggtgatatcgttggtggaacgggtgatgagggacgcggtggaaaacttgtccatttcggcggacgagaagtcctggaccttggaaaagatcgccctgcgcagatccctggccacgcccgaggcggtccgggagccgaagtaacccaccgctatggtggcagccaccgccagcagggtaagggcgagcattatgccgcccatcttgagtatgtaagccgtctgcccctgtccttctccgcccctcatgatgccgatatccactatcttggacatatagtcgggcagggccagctccgcgttggcctggatgaagaggagcaagaaaacaaggagaatgttcccgatgtagggtttgtaatacttgagtattttgagcatagttgtgcctgctctaaaatacgtaaagggcggtcaggggtcaaataggacaggtaaatatttttccggccgccggcccgcttcgacggccgaaacttctaggaaacgccccggcctattctgtttttacccgccgtatccaagatagtactttgtttttatcgacccaacatggcttgccttgcttttatcacacatcgcccgagagccgtaaactttcaatcctgcctagaggctttccagcaccttgtccgcgtgcccggcgggagtgaccttggggaagaccttgatcaccgtacccgagccgtcgataaggaaggtcgagcggatcacgcccatcactttcctgccgtacatggttttttcaccgtacgccccgtaggcttgcatggtctttttatccggatcggagagaaggataaaggaaagggaatgcttgcggcggaatttgtcgtgggatgcgccggagtcggggcttatgcccaccaccttcgcgcccttggccgcgaattcaggcccccggtcgcgaaaactacaggcttcgacggtgcagcccggcgtatcgtcccgggggtagaaatagagcaccagggggccgccggcgaaatccgccagggtccacactttgccgtcggcatcggaaagggaaaaatcaggggctttagcgccaacttcgatcatcgaaaggcctccttatatgtcgaactcttacattatatatcgagttcttacatttagtttatttaatataacattgttcgagcctggggtcagtataagggaatctttttcactccagacgcgctcgtaacgggacaactggagatattgtagttaaggccagaagcagctttccttcatccttttcaaggaaacaaggccgatacatcaacaaaaaaggagggcgcaccctcctttttcctcgccgcaacggcgacattttgtggcacacccataaagggggccttgttagcctgccaaccatttttctgaataaactgtaaaagctatgatataatagccattgattattgtcaagttaaaaagggggacgaaatgaagtggcgcctcgggcttgatatgggaacaggttctattgggtgggcagctgtccgactggcaaataaaactcctaccgagcttatggatatgggtgttagggtttttcccgatggacgcgaaccggcaggagacggcagaacaggcgaccctttgaatgaacgcagacgaactgctcgacagatgcgccgacaacgggaccgacggatacgacgaaaaaagactatgctccgatatcttattgcctcaggatatctccccgccgaaaaagcaagcagaaaaacaattgaaagacttgacccatattctttacgcaacgaagcagtgtcaagactattaagaaaagaagaacttgcccgcattcttatgcagttgactggtcgtcgtggttttaaatcaaatcgtaaagagcaagtcgcctcacagaataaagaaacagcgggtatgttagctggaatcgcacgtctttccgctactctaggagggaaaactttaggacagtggatgtataaggagcttaaagaaaaaggtgttttacgttttcgtcctgaaactattaaatcgaaaataaattattcattttatccttcacgggaaatgtatgaaaaagagttcgaggcaatacggagaattcaggaaagcggccactcaaagctcgattgggataagttatacagaataatctattttcaacgaccattaaaaagacctgcgcgtggtacttgtttattttatacggacgaagagcgcggatatcgggctctgccctcagcgcatcgctttagaattctccaagagatcaacaacttaaaatattttgatgaggataacaggcttgtcgatatagcggaacatttcaaggaaacactttataatcttctcgaaaaacagaaatcactcaaatttgaccaaataagaaaagaattctctcatataataggcgagccattcacatttttgttcaaccttgaggacataaaacgtaaggaactcaaaggtaacacaacatcctgcgattttcgtaacgaaaaatactttggtcagcagtgggatttccttaattggcaaacccaagatgaacttgttgagagacttattatcgaagacgatgagacaaaaatcatcgagctactagaaaaatacaacctttccgctgatcagaagaataatatccttaaatggacttatcctattggtacaacaatgctttccgcacgatttatgagggaatgctcggatataatgcttaatctttttataccgtatcatgatgcggtagctaaaatgggaatgcatcactccgattttgaaaaaaaaccaatacgttcatcattgccatactatggagaaatattaacatcgttaactaccaaggcaagtggcaatcaacaggatacagaagagattcgttatggacgtatttctaatccgacagtgcatatcgctttgaaccaattaagaaaacttgtaaatgctctaattagacgttacggaaaaccgtccgagattattgtagaagtaggccgcaatttaaaaactaacgcgaagaaaaagctggaagacttccaagcacaggcattaaatcaagagaaaaatgaacaagtaaaagaagagcttaaaaagctcgggtttattcagccttcaagcaagctcattaaaaaatatcgcctatgggaggaacttgtacccgaaggtaccggttttgcgcgaagatgcccttattgtggcaagcccatatccgcaagtcagcttctatcagaagaagtcgaaatagagcatatccttccctattctcggacattactcgactcgaaagacaacctcaccgtggcgcacaaagcttgcaatcagattaagaaagaacacacaccatatgaagcattcgggcattcccctcttggatttgattgggagacaataaaggaactctctgaaaaatggccatctaataaacgggcaaagttttctcctcaggcaatggatctctttgacgaaaaaaattctggctttatccaacgtcagttgacagataatgcctatatagctaaggcaacgaaaaactacctctccataatatgtgatcgagatgctatttggaccacatcagggagaatgactgcaaaatttcggggcgaatgggggataaataccttactcaacgctaaccatgatacatggtttaaaaacaggtctgatcatcgtcatcatgctttggatgctattgtaatagcactatgtgatagatctatcgtagctgaaacatccagaataaacagaatgctaggctatggggcaattacggttccaccttgtcctttgcgtcgtgaggatatcgaaaaaaaactgcaaagtgtcattgtttcgatcaaaccagatcgtggtcccgaaggcaaactatatgatgaaacagccatgggagcgataagagtactgacaagaatttctcccaacgaacttacggagaaagatattccgaatattaacgccttgaaggtccgcgagtacctacttaggctgatgcaagaaaaaaagtcagaactaggcgatgaagcttttatagaagtaaagaaatatttacagcaaagatacaaatttttcgatgtattgcgaacaaaatgggcaacgacgacagcgctccaaaacctttctgatcgagacattatatcaattgtcgactcccatttacgcgaggatgtacttagacatgtcaaagaaaaatccaatggaagaaaactaaccattgttttacaagaatacgctgataaacatcaaattcgctctgtccgttatttccctaaaggccaagttcctgtgcccatatcttctaatcataataaagcttatctaccctatgatttctaccgtgtcgatatttggctcttacctgggaaaacaaaaaaatatgagggagtattcatttcaaggactgagtattttcaacaaaagagaataaaccaaaaagcaccgataagaaagccccatcctgcggcaaagctcatgatgtccctacataaaaatgacgttgtggaaatattgtcgccacaaataaatgaattagcccgtattgctggatatgcaaccacaaaaaacctaattgacattagacctatcgcggcagctgattctattgctgattggactcgaaataccaagcctgaattaacaacgtcattttggcctcgtgattgtgacggccaaaactttaaatcgattaatatgttattcactacatacacaattaaacaggtgaatataactgtagagggccgattgagtacccgataattgatacatgatacctcgaattgtcgaaataagtgaaagcgggcgttttttggcaaagcgtcacggagtaatgacagtctctgatagagggaaagactatggggaagttcccatcgacgatatcggcgtattgatggtttcggcatttggcgcaactttttcaaaagacattttagtttccctcgcagagaaaggcgccattaccattttatgcggtgggaatggacatcctgccgcttttgtcacacccgtagccggtaattatgaaacggcgcaacgaataaagtaccaaatcaatgccacattacctttaaaaaaacgtttatggcaaagtattgtcaaaacaaaattatctcatcaagccgaagttctccgctggaaaggagaaatttctgtggcagataaaatagtctcttataagaatcgggttcaatctggagatacagacaatcgtgaggctatcgctgcacgaatatattggactgcactcatgggtaagggctttcggcgtaatcctgatggagattggccaaacgcattatttaattacggttacgctgtgttgagggcttcggcagcgcgagctatctgcgctgctggcctcttaccttcattgggaattaaacataaaaatggtaccaatacattcccgcttgcggacgatttgatggaaccttataggcctctcgtcgattactatgtactcaatactattgaccagggctatgcagaggtatcacctgcatcaaaacaagaacttacaaagtttttgtgggcagatttactgatgcgagggcaaatgaccccattttttaccgcaatggagcgtatggcggtttccatcgtcaaatcattcaaagagaagaagcctctcattgaaatagctgaaatcacccgtatgactatcatgacatgacagaactaagcagttatcgacttatgtggatgattgtattgtttgaccttcctgtcatgacaaaaaaagaaagaaaagcggcgtcccaatttaggacaggattactgaacaagggcttccatatgagtcaattttcagtatattatagacttatatcggggagagaggcatttgatagctatgtggcagatattaagaaaaaccttccaaaagcagggaaggtcgatattgtctccattactgatcgccaatacgaagatattgtttccttttccgggaaaaaacgtgaaaaaagcaaacaaaaccctactcaactcgtcttgttttagtccatttttttgcaggcagatgggaaataagtgctttttaaaaagcaacttactccccatcaattcagtttactcagaaaaatggtcggcctgcaactcgacggctcgatgctcctggagagcgccaaattcagtttactcagaaaaatggtcggcctgcaacacaagtaagacaacacaacaaccataattaattcagtttactcagaaaaatggtcggcctgcaaccctagtgggcgatgcgagtacctcaaataaattcagtttactcagaaaaatggtcggcctgcaacgcctgctgagatacagatacgtggtatgataattcagtttactcagaaaaatggtcggcctgcaaccatcttgcccgcttgtctcgagctctacctaattcagtttactcagaaaaatggtcggcctgcaaccttcccaccccttaatatacccgagaacaaattcagtttactcagaaaaatggtcggcctgcaacgctcaagccacgctgtacgccgcgtcatggaattcagtttactcagaaaaatggtcggcctgcaacaatcacctcacgcaattccacgagcttgtgattcagtttactcagaaaaatggtcggcctgcaactggacaagggcgatattacgttggccgattattcagtttactcagaaaaatggtcggcctgcaacatctggcgcgacgacgtttaatgtttccgaaattcagtttactcagaaaaatggtcggcctgcaaccaaggacggtggccattccgagcgccgtttaattcagtttactcagaaaaatggtcggcctgcaaccgaattgttgttctattttttttagattttattcagtttactcagaaaaatggtcggcctgcaacagtgacgcaactagcggagcagctaccggaaattcagtttactcagaaaaatggtcggcctgcaacctgttatcgttgaccgctacgctgagctcaaattcagtttactcagaaaaatggtcggcctgcaaccataaccgtcagtgccgtaggggctggtaaaattcagtttactcagaaaaatggtcggcctgcaactgtcaaagacagcaacggcatcgttgaggtaattcagtttactcagaaaaatggtcggcctgcaacagacgtagcggacgggagttctctccctgatgagatcggtgaactccttggagaggacagggacatatgcgtatttttcgagaattgcggtaaggaaggcaagagtcaggagagtcttttcgtcggccgcctggagacagtcccaagcttcggcgtattcataacgccgcctggaggctttccacacgatgggagcccccagtctgtcgcgcatgtactctatgtcacgctttacttgccgtgcgcagacctcgaagcgcgaggccacgtccgccaccgaaacgcccccaccctcgcggatggacaagtcgatgtagaagatccgttccgtctggctcaccgaaagccctcctcttatcacaccatgatatggtatctcggcgcaggggacctataatgtccctggcgcgtttaggctaggaggcgcggaaagctccactgttaaggactggggacgaagggctctaggaactcaagcctcagcttggtaatcccgcccgggacgaaacctgggcgaggtccagcgtcagtagctccgcccgtggacctttctgctgtttatgcaaaagtacaacatgccgcctctcatgtacacatccggaaaggtgggggttcgcgcttgttgatgttcgaaagagatatccatgccactttggcttcggtctttatcgggtttttttgcctgacggcgtagaaacgccagtcacccggcgggcggatgaaagcgatgccggaaagcgaagcgtccgaatcgacggcttccacaaatccgtgcatcgtagcgcccggctcgatccatcctcaaaagacaaatgtcctacttgccatatatcccgtcgataatctcacacttattttcaacagcagggcttgacacattccactgttgttacataacatagatacataattagtttttgtaaccaaaggagtgtgtatgcctaagttcaatttcaacctcggaagcttcatcgtcaacctgaccatcggatggtttctcatgtcgttcatccaagccgcggttcgcgccctgcgttcgggcgggcgcggagaactcatcccgcgtttcaagaccatcgcgtttttccacgacaagccggcggcgctgctcaatatcgccatcatggcgggaatctggatcgtcacgacgagtctttattttaccttgaaacgaaggtaagacttttacatggccaaatttcccgccttcatgaccgccttccggctcaccgcgaaggcggcgatccacacaccgctggtgttccgcgcagggcttttctccggcgatggcctaccctggccttcactggaaggtattagggatttcgcgcgtttcgccggaatcgaagacggggcgatccgcaccgccctttccagggcaaagcgcgaagggtcgttgatcgctgaagcggatggagccagaggcgcccgctatgtactggcgcccgagaccttcgccagaggaatcgcccaggttcgcgcggacaagaggcccgaaggatttcttctggcggtcttttcgttttcgacacccgagcaggaagaacgcgcctccttgcgcgcccttctcaagtcgtacgggttccgcaaactcgcccagaatacctatatccacgggagaatcgaaacggaaagcctggtggccgcgatacgcgacctgggcctggagcgaaatttctttctattcacctgtccggacatcgaagacgaaaacctcgtcgcacgggtactctcgcttttcgacctggagtctcggcggaaggatctgcgcgaatatctcaggcttttaaaggacttcctttccgaagaagtgtcgcgccaggcggaagccggcgatcaggccgcgggcgacgaattcgcacggcgcctcctctacgcggcagcggtgcactgggaacgcgtcgagtcaagcgagccgcccattccggcgaggcaccttccgcccggctatgcctttggcgaaatccaggccttctatgggcgcaggctcggggaggggcgccgcgcgatgctcggatactttaaaagagtgttcgaagcctgaagatcctatgcgctcagcctgcggccagcgatttttctccatgtgataaaagtaattaaaataaacttgaccgatagttataccatagtcatactattatcatgaaaaccgctatttcattaccggatcgtctttataaggctgctgaaaagaccgcaaaatccctgggcctcccccgcagccaattgttcgccaaagctctgcaggagtttatcgataagcatgaggcggaggatattacggcagccctgaaccaactgtattcgaatgagtcgctgactgaagaaggcccccggaaagaagcaggcgatatttctatcgaatcactacggcagcttacaaaaaatgatacgtggtgagatttggtgggccgacttcggcatgcccttcggcagtgggccgggatttttcaggcccgtcgtgatactccaagccgataccttcaatagaagcaagatcggtacggtgattatcctgcccttgacgaccaatcttatcctttccgaagcgcccggcaacgtgtatttagaaaaaacggaaacagaattgccaaaagattctgtcgccgtagtatctcagataacggtgatagataaaaagagaatgagggaaatggctggtactcttaaaaaagagaggctgaaagaagtagaagaaggaataaagctcgttttgggactttgaaaattcaatcctatattctatgaaaatcgccatctgggctatacctgcgcccttccatcttgttcaccaggatcaggctggatacaatacgcggtcatggaatattccaagcgcacggtcacctgtggccagttaagagcggcggatatcggcaattcggtcgtcctcaacggttgggttcatcgcaaacgcgaccatgggggtatttccttcataaatttaagggatcgctatggcatcacccaggtagtggtggacgccgattcccccgcggcccttctggcgacggcggcggagcttaaaaacgagtattgcgtcgcggtcaagggccgggtgcgcggcagacccgaatccatggtaaacccggacatggacacaggagctatcgaagtggtatgccaggaccttgttatcctgtccaagtgcgataccctgcccttccagatcgacgagcggagcgacgcgaaagaagatacccgcctggcctaccgctacctggacctgcgctcggcctccatgcagcgcaagatacgcctccgccacgaagcggctttcgcggcgcgggaatacatggtcggacagggtttttacgagatagaaacccctaccttcatacgttccacccccgagggggcccgggactatcttgtcccctccaggctctatccgggcaagttctacgccctgccccagtcgccccagctgtacaagcagatactcatggtttcgggtttcgataaatatttccagctggcccgttgttaccgcgacgaggatgcccggggcgacagacagcccgagttcacccagatcgatatcgagatgtccttcgtaaagcgggacgatgtgcttgaaatgtgcgagggcctcatgggtcatgtattcaagaaggctcttggagtgactttgcctgggcatttcctgcgcctgagctacgacgaggctatggacctctacggaagcgacaagcccgatctgcgattcgacatggccatgcgggatttcacgccctatgtggacgcctgctccttccaggcctttaaagacgccgtcgccgcgggcggaacggccaaggcgcttgtggtgcccggcaaggccgattattcccgcaagcagattgaggagctggaagcccaggccaaggtctacaaggccaagggtatggcatggatgaaggtcgccaaggccgccgatggcgggacggccctggaaggcggggtgtccaagttcttcgccgccaatgccgccgcggtggtaacaggcttgggcgtcaagccgggcgatctggtcctgatggtggccgatgccaaggccaaggtagcctgcacttcccttggagcggtgagaagcaagctcgggcgcgatctcggcctgttgaaccccaacgagttcaagttcgcctggatcgtggactttcccatgttcgaatacaacgaagaagaaggccgctgggaagccgcccatcatatgttcaccatgccccaggaaaagtaccacgccaccctggaatccgatccgggatcggtcaagggcgatctctacgacctggtgctcaacggctacgagatagcttcgggttcgatacgaatccacgatccggagcttcagcgcaggatcttcaagatcgtcggtttttcggaagaagaagcccagcgcaagttcggctttctggtggaggctttcaaatatggtcccccgccccacggcggcatagccccgggcttcgaccgtctggtcatgctcatggcgggcgaaacttccatcaaggaggtcatcgccttccccaagaacagtttcgcggtgagtcccatggatcagagccccaacgaggtggacgaaaagcagttgcgggaagtccacatacggatcgtgccgaaagaataggcttcgacccgccggcaaggcaatcgcgcggcgtatcaaccgtaactgtgcaaccccggcagaaggtaattgacaccgaagaaggtgaataccgtgcagagaaagcccacgacggcgatccacgagggggcggcgtttttctttttcatgatcaggcgcacatggagatagagcgtatagaccagccaggttatgaaggcccaggtttccttggggtcccagctccaccagcggccccaggcctgttcggcccagatggcgccgaaaatgagggccccggcggtgaaaatcggataccctaccgccacggcggtgtacgtgatccgatcgaagtcgatctttttcttttcgtccttggtaaaaagaaaggccagggatgccacgaatgaaatgacaaaaaaagcctcgcccacaaacgagagcgccacgtgaattaccagccacagggagcgcagggcggggataggcggcagggcttccttaggcaggaggggcgaggacgcgatggccgccaggaccaaagcagcgatggtcgccccgaaaccgatgattctggaataatggatttttttctgaaaacgatagacgatatcgagaatcattataaacgccgaataaaaaagcagggactcgtaggtgctcgtcagagcgataaagccgattttcacgcttcggctcagcatgacgcccaggaaagccgccgcggcggcggccatgagccaggggcttaggctttcttttttgtcgcctttgcggaacagcgaaaccacctgcgccgccgcggcggcgattaccaaaatgaaccctatggtcgcgatcatgctttttcttccttgagagtatcgttaagcttctgggcgaaggtaagcgccgtccccagaccgatgagaatgagcgaaaccaggacgaaaggatagccggggtcgctcaccgcctgaagccccgtggatagaacctgggtcgtcgcgacagcgtaccgcccaaccaaaattccctgcgagtccacccttaccgccccgtccaggcctccgccttggacccttaaaaccgcctgagcctccccggtttcgacgccgggcttcttttccgtcgtcatgaagaagatgcgaacaccctcggcttcaaaactttcccccctggccagggtggtgaccgagccgtcgggagcgctcaccgcgacggccaaggccgcggaatacgaattctgatatatggtaatggctccgattctcagcggcttattgacccggatttccacattttccttcaacagggtcccgtctttctcaagatttaccaggctggtccaatcttttggccgtccgtcctcgtatcgctcatcgctgaacttgatcaagtgaaggatttccccattgggcaaagccaccgattccccggcggcaaggcgaaccatgccttcttgccggccggaaaacgaaacgatgccgcctacgataagcagcaaaagaccgacgtggagaacatcgggaccatgccggcgcttgtttttcttgcgcagctcccggacaagacgatccagggcgcaagcgccaagattgatgaaaaacaacagcgcgggaacgaggaaaaggatggaggaaaaaaatctgttcaaccctgtttgcacgaccagctcggcgacaaacttaggatagagcttgaaatattcttccgaagcctttccctggggaatgagcgttgccagaaggctacccgtcacgagaatgacaataagcgctatggcgagcttgatcgatttaagttttttccaaaattcgcgcaccctgtgttccttcgagcctgactcttcaatatcccgttcgccataccataggcaagacgataaccgagcctatccagcggtttcggtccttgtcaagttcatcaagccggcaagataaataacgctttttttatatatacccaccctttacacctcacaaaagttgttttataatacaaaagtctccagtacgccgttggcggaagagcggcatcgcgctgcacagctttataatgaggagatatacgcggatgaaaataaaactcctgtcggcgctcgccctgctggccttgttcggtgcggtccccgcaatagccggcgagtcgagctgcatcgactgccacggcaacgccgatatcatgaagaccctggttccgcctcccgtggcgagttccggcgaaggagaggggtgagcgggcgcacctcccccggtccgggcggattaccacatggggtatgtcgtcgataaggaaacaatcgagaccgacccccacttcgagtacggatgttccttctgccatgagggcgacgccgacggcgtcacaaaagcggaagcccataagggcatggtcaagcgaccatcggacaatctggacacctgcggcgtctgccatgaaggcatcgccgcgacctataagctctccctccattatacgaccgccggatttaaaaacggcgtttctccccgcttctcccaggaagaaaaaacagtattcgacgaaacggttttcgagcaatcatgccgaagttgccacgcttcctgcggcgactgtcacgtccagagccctgtcgtgtccggcgtcaataccggcctcatggacgggcataaattcgtgcgcaaagacgaatccaagtcctgcgccctctgccacggaggccgggtctatcctgaatttaccggcgactatggcgggcgccccgatgtgcactatcgcaacggcatgagctgcctggactgccactccgcggaacaaatgcatggcgacggcgtcgcctacgatggccgtcgagacgtggagaacaagccttcctgcctggaatgccatgaaaagagcctttcagccacgcaggaagctgaagaagcccatgcgatacacgaagaggccgtttcctgcagcgcttgccataccgcgacggggtacaggcagtgctcttcctgccaccttggcgaaggcgccacatcgagccccgccatcgtattgggagacaatcc

SEQ ID NO: 778 - DNA, 23255 bp, synthetic construct
  misc_feature 1..23255: note = Synthetic
  source 1..23255: mol_type = other DNA
ttcccggcaatttcaaaatacgtattcccaaaatcatcggcaactacaaccccgactggggtatcgtccgcatcggcaatgacggcagagcaaaaattcaacttgtccgtgaaactaaaggatcgatcgaccccaatcaattacgtttcagcaacgaaaagcgcaagattgaatgtgccaaaaaacactttaatactttgggcatcagttaccggcaagtgaccgacaaaataccggactggtggaaagaaaactgaagtcctaccagcagcaaaatccatgaaagaaatgggtgaagcggcggtaggggggatacggtataataaaaatctggtatactacttattatgtcaaagaaggtgaatatgattttaataaaaaatgccatgataaaaacaatggcaggaaaagacatcccgaatggctgtatcttgattgaaggcgacaagataaagaagattggtgaaaatttaactacgcctgcaggagcgcatgttattgatgctaccggacggcttaccactccagggctcattgacgggcacagccatgtcggcctttttggagaagcctgcggctgggagggtgatgacggcaacgaaatgaccgatcccataacaccccacatgcgcgccatagattcgattaatcccatggacgagggattcaaaaccgccgtaaccggaggcgtaaccgtcataggaaccggccccggaagcgggaacgccattggcggaacatttacctgtataaaactgcacggaaaccgggttgacgacatgattctcagagacaactttgccatgaaaattgcgttcggcgaaaaccccaaatgggtctacgggcagcatcaaaaaaaatcacccagtacccgcatggccactgctgcgctcattagagaaaccttgtttaaggcacagcgctacagcgacgagctgctggaatatgagaaatccacgaagaaggataagaagaaacctccctttgaaatgaagatggaagctctcctgccggtgatgaggcgaaaaattcctctgaaagcccatgcccatagaacagatgatatattcactgccctgcgaatagcgcgcgaatttaatctggacatcactctggaacactgcaccgaggggcatctgattgttgatgcactggtacaagaaaataaatttatttttatcggcccgtcatttggatcaaagtcaaaactggaactgctccatatgtcatttgataccgccaaaattctttccgatgccggtttgaaaattgccatcatcaccgatgctccggtgatacctcagcagaaccttgcgatgtgtgcagggtttgcggtaaaagcgggaatgaacgaagacaaggcatgggaagccattaccgtaactcccgcaaaagcaatgggcgtatttcaccgggttggcagtctggaaaaaggcaaggatgccgacatagccatattcaacgggaatcccctattcgaaattggatgcacagcggcttacacgattataaacggaaagattgtgcatgatgcggggtagtccacgattattggttccaaatagtgtaagcaccatacatttattggttgcaataaatgtagatttccagtatacttgtctcgagtaagaggcaataaatgaaaaatatgagacgatatgaactgaattccttaaaaaactggaaaaattcgccaaaccgccggcctttaatgctttttggggcacggcaggttggaaaaacatggcttgtccggaattttgccgcctctgaatacgacgatttgatggaacttaatttctttacggatcattcaataaacgagatttttgcaaaagatatttccccggcatacattatccagcagcttgaactccggtttgaaaaaaaaattgacccggctcgaacccttctgttctttgatgagattcaagagtcccagcgggctatggatgcgttaaagtctttcaatgatgcagggcgcgaatataccattgtcgcagcaggcagttttcttagcgtcatgcttgggcagagaccggtagggcaaactgaccagatgaccttatatccaatgtcattttgtgaatttttggaagcaatggggcataagattctggcagacactatcaaactgcatgataccagagctttgtccggcgcaagtgatttactggaatcattactcaagcaatacttttatgttggcggaatgccgccggttttatccgaatatgctgaatacggcgacttgtcaaaagtacgcgaaattcagaatggattgctttcatcatataaaggtgatttttccaaacacataaatgacccacgcacagagccgaaaatcagaatgttgtgggattcaatctctttacatttagtacgggaaaataaaaagtttgtttataaaaatataaaatccggcggacgtgccgctgagtttgaaacagcaatgcaatggctggttgatacaggattaatatataaaataaacaaagtagaaactccaaaaattcctctaaagatgcactacaaagaagatttttttaaattgtatatactggacataggcttattgggcgctcaggcagaaataaaatccgctgacatactgaaagccggctcagacatagtagatgacatgtacggtgcgcttgcggagcagttcgtctgccaggaattaaaagccgcaaaagtcagccccctgttttactgggggcggcagaacagtacagcagaagtagatttcttaacacaggataacggcgaaattattccgatagaagtaaaatctgcaaaacatacaaaatcgcaatcattaagagtatacatgcaggaatacaaaccaaaatatgcagtgcgcacctcattaaaaaattatggtgttatggaaaatttatattctgtgccgttgtatatgatttctgaactgccggggattattttttgaaattggatgcaccgcagtctgctgggtagcccaagtatctggtgtacaatttttcggttgaaacctttacattttagcggttgaaatagtcatattttagcggatgaaacctttacattttagcggttatatattaaacttataatagagatgtgatgatggatacttaccgagggcgttttgccgaccaaattctgcataaccggcttcgcaataccggtgcggttttgatacagggcgcaaaaggctgtggaaaaaccgagacggcaatgcaggctgcaaaaagcactgcacggcttgatgttgatgatgagattcgaatccgcatggaacttgatccaaaatcggtgcttacagggcctgttccccggcttattgatgaatggcaggaatatccgcacatttggaagtatgtacggcgcgaagtagatgatcgtaaaaagaaagggcaatttattctgactggatcggcaaatcctgaggaacgagtgaaactccattcaggtgcgggacggttttctgttataaaaatgcgtcccatgtcactgtatgaaaagggctggtcaacgggagaagtgagcctttctgctttggtgaagggcaaggctcctaattctgctcaggcggaatttgaccttgcaacgctggcagaaaaactgactcttggcggttggccgggtcttttgggagccacacaccgtcaaggcttgcggtttgcgaaggactatattgcgcttcttgcagaagtcgacataaaccgggttgccgggaaaaaaagagacccacaaaaagtcatgcgactaatgcagtcgctggcaagaaatatttctacggaagcatcgcttactgccatagcaaaagacaccggcggatcagggctaccgcttaacgatgagacaataaccgaatacctggaaacacttgaacgcctcatgacactggaacagcttccggcatggactacccatatccgcagtgccgacactctaagaaaaacgcccaagcgtcactttgtcgatccgtctttggctattggcgcattgggtctttctgtcgataaattgctggctgaccttaattattttggcctcttgtttgaatcgctcgttattcgtgatctgcggatttatgccgatgtgcatgacgggaaaatttaccattaccgtgattcacgaaacatggaaatcgatgccattgttgagtatcccgatacctcctgggcggcttttgaagtgaagatgggcttcaatgcccaggatgaagccgccgcaaacctgcttaaatttgcaaagaagattgattgggaaaaggcagggaaaccaaaggcgcttacggtaattaccgctaacggctttgcctgccgccgcaaggacggggtgaatgttgtgccgttgggggttttgggagggtagagggggggggcctttaggcagagatttaaagatatagcctaagacctcgaagcatttatcaactactgggacggatgcgagcggatagtaaaccgcttgatggaaatgttacctaccaccgaagcagacctgcgggctgccgttgcggctaacccccagggaattgaagcacgggtgctgcagcaacttgaaagcgggcggattgctgcacaacagacagggaaaatagtaggcggtcagcaggttaagcaaacggtcggcggcgggatggctgccattgcagttgacgaaaacggcaacagcagacttgtcaccgaccaggaagcggcaaacattgcgtatgaccagctccgggcaataacggtactgaccaacgatttcaaccccgccacactgctccatgaatggctgcactttatgacaagggttattatacccaacagccctcagtacaaggcgctggtggaagacgcggtgagcaaggcgttcaaagaggacatcaagctggagaactttcaaaagaaacaccacgagtggctggcggataactttgagcattaccttaaaacaggagaggcgccgacagccgggctgaaggcggtgttcaggcggattgccgccgcctttaaagattggatagctaaaagccctctggctcgcgatacaaaatggaccggcaaccccgaacttaaatttttctttgaccagatactgagaggagaggaaggggccgtgctgggcggcgacgcccaatcccaggaaacgacgcgggtgcagacggacaacgcccagcagcatgaatacgcggagatgaccgagccggagcgggtgctgcaaagcgacctgcacacggcggaagaaaaggcggagatgctctactcgatggccagggcgcaacaggaagcgctcaggaacatggaagctattgaggttcctgccgaagccattgaaaagaaagcagccaaaggaatctatgcaaagatacaaacacggcaaaataaacagacaggccagacagcgttatttgtgacaaggtctctaaaaaaaatattaagacacaagggatttgataacagggtaatatcggtacttgctgaggcttttgaaaacgccgtattcatgtatgatgagacagtagacgtatcacataaaaaacatactaattttacagggtacagtcattatgctgcaaaaataaccattgacggacagccggtatatgcacgatttacacttgaaaacttgaaaacaaaacccggaaaacctaaaataagccaatttcattcggtacatttatcacacgaagtaaaaaataatgccgctggcccccgcgtaaatccgtcaattatcacgacggcaacttggggtgcaagcggcaccactgatttaaagttacaacaatggctcaataatgtcaatagcaattcttcgaaaatgaacttccagatcatcggcgaaaagggagctcaagccttagaccaagcgagggaagccacagcccggctggataaccttgagaccgcccggcacatggagcaggcgggtaaagacgccaaggcggtccgcatggccacgggctgggagcggggggcggacggcaagtggcggcacgagatacgtgacatacaattaattaaaagggatattttcaggatagggaaaaacgtcaccttaaatttatcccatatcgttaaaaacaaagaactgtttaccgcctacccgcaactgcggaaaatgcccgttcgctttgaatcgcttgacggcggcggcgggatgtaccgcaacggcgagataacactggattcgcagtacctgtcggtcgattacgataactggacgggggtgtttaagggcgaagcggaaagcattttagttcacgaaatacagcacgcaatacaagacattgaaggttttgcgcaaggcggaaacccccaggggatagatgccacgctgcgggatcaggctgtcgcaataattgaaacattaaatgacgagcagcttgaagcacatgacacatggaaacgcgaagctatgattaaagatatgcggttgcacggtataatgcaggtgttcggaagaacagctgccggttgtggcctttgttgggacatccgggtccaaaacccgtttgatcaccgtaaacgcgaataacaaccggcagccgcatttgcttaatgggggttgaccttggtccgccaataccccgaatagacgcatggtaattataccgtagtttaaccggacaatcaaatcattttgaggaggcttgtatgcagtttgtgggaattgatttacacaccaacaggttcacctgctgttaccgcggtgaagagaaagaaaaaaaggaaacggcgacatttgaattgaccgattacgggctggcgcagttctatcagacattgaccgatgaaacgtatgtgttggtagaagccacaaacccgacgttcgcttttgtccggctgatagagccgatggtgaaggaggtgataatagcaaacacctacgagttgaaacagataagccttgcccgcaagaatacggacaagatagacgcggacatcttgtgccgcatcctgaagatgcaagtgctttccggggagcgtgcggtatccccggttacggttccgcccgttaccatacaggatttacggagtttgttcaccacgtaccggctgtaccgcaagcaaaccacgcaaatcaagaaccgggtacactcgttattgaaggaacggctgtacggttttacgcaggaagagattttcagcaaaaaagaccaggaaaagatacggaagttggagaacggtacggctatggctttccagatacaccagctattggataatcttgcctctaaggaggttcaaattgatgaacttgaggccaagattaaagaacatgccgaaccatatatgacggagatagcgatactgacgagcatgaaggggataggggtatttaccgcgatagcggttattgcggatataatcgaagttaaccggtttaagaactccaaagcgtttacctcatatttacgctctgcaccgaaggtgtcaaattccaatacttccaagtcagtgcttggaaccaacaagaaaggccggaaactggccgccacacttataacacagtctttaaaccatgtgctttccgccagcccaaaattgaaccgctggtacgaacatctgacccagcttaagaagaaagggctggtaagaaccgggctgcgcagaagggttttcgcagagatgtatcaaatgctcaagaagggggaataccattatggcagggatgcacggatgcatgatgctaaaatgcttcaatacaaaagatttcttgaaaaaagaaaaaatcttttgaaaacagcttgacttttatcatagacggatgctggtacaggagattgaaaaatggcggcctgcaagcgagcgggaaagctacccggaagtacaagaactgcggcggcagttaagcgaagcggatgcggcatttattgaggcggctgggcaagaggcctttgatgttttatcaaaaatcactaccagcaggtatgatgaagacacagcgcacggcttgtaccgccgccttgccggagaggtagaagccagaaacgcccaggtgcggcaagggttcaccgatgccgaacggcggcagaccctgctggagcagaccgaggacgtggcccgcgcggagcagattttcattgaaaaagggctgacagccgccgcgagcgcaatagaagcccatgacggcgcagaacaggacgaaacgcaaaatgacacggcaaggggagctgcggcgcagcctggggcctctgtggggcaaatacaggcaaaccaggcaagggctgcggaacggcagagctaccaaaacgagttacggcaggtacaagacggcacaataaaccccggccggatgatacctttgggcatggctccggaagcatacgcgaggcacggactgccggattacccgataaaattatctgtaaaagctatagagaaagccactggcccgcataaagtggatatgcagaccattgaaaaattgccggaactgctgaatgaacctgtcctcatttatcattctttgtcagaatccggaaaatttattacacttattgatgccgttgacaaagacggagaccctgtaatagttattcaaaacccggttaaaaacgaaagaggcaattatacaaacataattaacctttacgggaaagaaaattttgatagacatattcacaacataattattgaaaataagttaatagcggtagataaaaataaggccaccaaatatgttagcacaacagagcgccaattgctcaaggcgacattatttgatgacctttcatctcaaatatctaacacttccgcgaatttgtcaagcggtttagaagaaaactctggtttactcttccagctcacccgcgaagaaatccacgagcaggcgctgcagcacgacacctagcaggagtggatgcaaagcgatgaattcaccgaagcggtgacctacggggaataccaggccgccttccgcctggacgatgcggacgcggagccgcagaccagggaagcgctgaaaacctggtacgaaaagcagtggaacgaggcgcgggtgctggcgcgggaaaacgcgctgtgggacgacggggagcggacggaggcaaacgccgaatcggtcgaccccgaattactggacgacgccgggagcattgagtttaacccggaattatacgaggaggaagcgcatgagcttacagacaacatttcaggggatgagcgggccggaccggatagaccggatactggcgttgaccaagcggctccgggacattcgtggatcgatagagacgatccggtacagcgaggatctggtgacggagttgccggacgtgctgaagacgctgggggacgcgaaggacgcggtgatagccgaactcaagaccgtgtaaaggacggcccgataaccacgagcgaggcgaaccggcggcttgccgccaagctgccccgcgtggttgacggctttgtactggggattggccgtacaatacgcatgagcctgaagcactttgaagcgcagacagcggaagatgccgcagaaagggagcaaatagggcgggaccagcggcgcattgaccgcgagatacacccgtacatcagggcgctcgcaaggactgggttaatgttgtgcctttgggggttttgacggcgagagagggagccagagaataaaaaaaaggagggcgaaccctccttttttgccaccatacgacgtcattttgtggcacaacccttgcgggaggccttgttaacataccgaccaattttcttaataaactgtagattaaatatatatgatagtgtaggatttgtcaagatgtatgcaacaaacttattgaatgcgaatcgataggtttgtgttgcaaaccgaccaattttcttagtaaactgattatttattacagagtggtagttaataataccatattttctccaggtaggtttgtgtattcccttgacattatttgataaatgaactacaatttataacctccctatcaagaccatgtgtcttcatagttgagcttgtctttttggggaggttgttatttgatctcttaatataggaggcccccatgtggcgcttggcattagatttagggacgaattcaataggctggaccgcgttacaactggaatttgaaggtaaggacaaacccaaaccaacagaaatcttggatatgggtgtacgcattttcaccgacggcagggaagccaaaaccggaacacctatgaatgaggcacgcagaaatgctaggcaaatgaggcgtcagcgggatcgaaaaatacggcgaaaaaaagctatgcttaactttcttatcaacaacaagcttatgccccatgacaaggaaaaacggctgattgtggcacgccttgatccgtatcaacttcgtgtagctgccctggaacgtaaattaaaaccttacgagctaggtcggattatgatgcagttctcagtccgccggggttttaagtccggcagaaaagggcaaacagaaaaaaccgcagaacaggaaggaatgctcggcggtattcaaacactggaagcagacctgcaggggcttacccttgggcagtggttattcagacaaaaggaaaaaggcaactctgttcgttttaaacctgtaatggaaaaatcaaaaattctgtattctttttatccttccagagaaatgtatgaaacagaatttattgcgattatggacaaacaaaaaaaatattacaaagaattaaattgggaaagggtttataaaatcatctttttacaacgaccacttaaaccttcagagcgtggatcgtgtcagttttatactgaagagaaacggggctacggggcatttgtttcggctcatcgttttagaatattacaagatattaataacctaaaatactataacgatgaaaacattgaagaagaaatctcctccgaattaaaacaaaaattatttgatgcactcaatacacaaaaatctcttgcctttagcaaaatacgaaaaactttaggcaaagacaacactggttcatttaatcttgaagacagtaaacgggaaaatctcaaaggtaatgaaacatcgttcgtgttacgaaaacccgaatatttcggttccatctgggatgatttaacagttcaaaaacaggatgaaattatcgaacaattgatgatcgaagatgatgaaaaggttatctatgattttttagcaacttttagcttaactacagaacaaataaaaaatatttcgggatataattttcctgccggaacaactatgctttcttcaaagttcatgattgattgttcggaagttatgttgaaagaatggattggttattcagatgcggttaaaaagatgggactttcaaaaaaagaagcacgtcaaatacagcgttctctcccttattatggaaaaatacttacaggacaagtaagcggcgccaaaggcgaagactacgagggtaacgatgaagaaaagtatggacgtatagcaaatcccactgtgcacattgccttgaatcagctgcgaaaattggtgaatgcccttgtccgtcgttttggtaagccaactgaaatcatcatggaagtaaatagagaactaaagtcaagtagaaccaaaaaagaagaagaaatgaaaaagcaagcaaaaaaccagaaagacaatgagcggataagaaatgagataaaagaacttggatatttgcaagtaggcagtgaagacatcaagaaatataaactgtgggaagaacttgccccagaagggatcgcaaggcgctgcccctattgcggaaaaacaatttctgctaaacaattaatgtctggtgcagtagagattgatcatattcttccatattccagaactttactcaactctcgcgataatcttatcgtggctcatcgggagtgtaatcaagcaaaaaggaacagaagcccttttgaagcatttggcaataatacaggcggatttgattggaatcaaatcatggatattactgctaagttgccatatagaaagcgaagaaagttctttcctgatgcaatgactagcttcaacgaagaagaaggaggttttcttgatagacagttgacagatacagcttatctttccaaagctggcgaaaagtacctttctgttgtatgtaaaagcaatgcaatatgggttagcccgggaaagcttaccgctttacttcgcgggttttggggatttaataccctgcttaaccggggacaggaaacctggtataaaaacagaagcgatcataggcatcatgcgctggattctctcgttattggcctgtgtgacagaaacattatcgccgaggctgcccgaattaacaacaacatgagttatagagaaattcatgctccgccatgtccaatagacaggaaagtaattgaggaacatttaaaatcaattgttgtttcctacaaaccggatcatgggatagaaggaaaactgtacgcagaaactgccatggcaaaacattcctatttggaacagattaatccaaccgaacttggagaaaatgaaattaaccgtattgttccaaaaagcataaaagaggatatagctcttttagtagaaaaggaagggtttagaaaagcaaaatcattgattcaaaaaaaatacaaattccttcgggtttttagagacaaatgggtgtcccgcactccactggaatccattaaggatatttccagaattgcagaccttgttattcgggatagaattcaagcgttacttaattctaagtcaggtaaagttggacaaaaattggaagatgtcttagcccaattcagtaaaaagaacggaatatattctgttcgttattttcccaaggatcaagttccggttagcattaaagataatgctaacaaagcctatatgcctgatgatttttaccgagtagatatttggcggctgcctgaacaaaaaggaaaaaccaaatatgaaggggtgtttgtttcccgtcctgttgctatgcagggacatgaatataatgaagaaacaggttttttacagaaacctcatcctgcggctaaattgattatgagcctatgtaaaaatgatgttgtgcaattatccaataaaacgacacaggaattttgtagaattgcagggtatgcaactacacggaataaaatagatattcgtcctatatatgccagcgatacaattgctgcttggaagaaaaacacaaacaccaatcttacatcagctttttggccttcagatattgagggacaaaattttaaatcaataaatgttttattcaatgaattcgatgttaaaaaaataaaaataactatagacgggaaacttaattgccgatcttaatagtttatgataccaagaattgttgatgtaagtgaaaacggtcgttttattgccaaaaaatgcggattcattacaatcaaacagggcaatgaatcattaggcgaagtgccgctggatgatattggcgttttaatgatttcagcatttggcgcgacttgcaccaaagatgcactcgtcagtcttgctgaacgcggggcagtaacaattctctgcggctccaaagggctgccatctgctctggtactaccggttaacgccaattatgaatctgccttacggataaaactccaaactcaggcaagtcaacctttaaaaaaacggctctggcaatctattgtaatagcaaaactaaaaaatcaatgtgaagtattaagatattttaataagcagaaaaaagcaaatcagattgatgtatatgctcggcaggttcaatccggtgacccgcaaaacagggaagccagcggtgcaaggatttactggaaaactctttttggcgatgaattttcccgtaatcccgatggtgattggcctaacagtctattaaattatggatatgcaatactgcgggcatccgctgccagagctttatgtgcagcaggactgaatcccatatttggcattcatcatgaaaacagcacaaatccttttcccttagcagatgatattatggagccttatcgtccgcttgtggacttctatgtaaagcaaattttaactacagaaattaatgaaatgaactcaactgctaaacataaggtaagcgcttttttatgggcagatcttagttttgaaggagagaccacgcctctttatacagccatggaacggctggctttttctctggttaaatcctataaatccaaaaagcctcaaattgaaattgccaaaatccgattatcaaaaaatgactgagcttagttcatataaacttatgtggatgattgtactttttgatctgcctgtaattacccaggaggagcggaaagcggcatctcttttcaggaaaaccctgttggataagggttttcacatgagccagtattcggtatactacagactactttccggcaaagaagctcttgatggttatattagggaaatccaatcgcagcttccaactaaagggaaagtggatattcttgcgataacggataaacaatatgaaggaattatttcattttcaggtaaatcaaaaggaaaaaacaagcaaaaaccatcccaattattgcttttttgacccgtttttttacccgaccttaacggctaattccttatcatgcaaggaattagccgttaacgaatacagtttactaagaaaattggtcggtctgcaactaatcgcctcttggggatcgaacgggtcaaatacagtttactaagaaaattggtcggtctgcaacaaagcttcagttggagctaattcagtgatgaatacagtttactaagaaaattggtcggtctgcaactcattattgttattggtttccttgtctttaaatacagtttactaagaaaattggtcggtctgcaaccggtacggtcaaaacgagtagacatatcgaaatacagtttactaagaaaattggtcggtctgcaacaaccgccattcgatttcgtcatggaaccagaatacagtttactaagaaaattggtcggtctgcaaccgtcgtaaacgtttacctctgcctctacgaaatacagtttactaagaaaattggtcggtctgcaaccgccatagaaaacccgttcaagggaactaaaatacagtttactaagaaaattggtcggtctgcaactaatgtacgcatgacaacacaacaaactgaatacagtttactaagaaaattggtcggtctgcaacgatgaaggatcaaacaatacacaatgctggaatacagtttactaagaaaattggtcggtctgcaacctgcagcttgaagtttatagtattgccaataatacagtttactaagaaaattggtcggtctgcaaccaggcaaagcagcgctcgagtgctccgcataatacagtttactaagaaaattggtcggtctgcaaccttgggctatgaaacatatccataagcatgaaaatacagtttactaagaaaattggtcggtctgcaacggtagatgatcatcatcatacgtgagagtgaatacagtttactaagaaaattggtcggtctgcaacgtgaattcacagtaccatttttcataacataatacagtttactaagaaaattggtcggtctgcaaccataacaccgaagccgaggcagagcgcgaccaatacagtttactaagaaaattggtcggtctgcaacgcggatggagtgaatacgataatttggcagaatacagtttactaagaaaattggtcggtctgcaacttgcgctccccggtggagaaacagccccaaatacagtttactaagaaaattggtcggtctgcaactctcagaagttttacaaacctctgaatctgaatacagtttactaagaaaattggtcggtctgcaacatagccagtccgtggtgggaagacgtgcataatacagtttactaagaaaattggtcggtctgcaacttgccatctgcgccgggttgcccgtcaataaatacagtttactaagaaaattggtcggtctgcaactgtttacggggtcgtagttgtcccgatcagaatacagtttactaagaaaattggtcggtctgcaacagtcttctttgctttcaaaggtttccgttcaatacagtttactaagaaaattggtcggtctgcaaccaatggatatgcttctcacttgtgatagtgaatacagtttactaagaaaattggtcggtctgcaacgtgccgcgcgtttcaatgttaatacaagcgaatacagtttactaagaaaattggtcggtctgcaacggtggtggtttgtaattcagaatttgctgaaatacagtttactaagaaaattggtcggtctgcaaccgttttttacggttgctttttatggatgctaatacagtttactaagaaaattggtcggtctgcaacaaaaacccccagtaagaggctgaagtgctaaatacagtttactaagaaaattggtcggtctgcaacataatgggtatcatgtcgtcagaagtgatgaatacagtttactaagaaaattggtcggtctgcaaccgccctctgacacaggtattgttattgctgaatacagtttactaagaaaattggtcggtctgcaactacacctcactcttcccgccattcgctggcaatacagtttactaagaaaattggtcggtctgcaaccaggcggcttgcaatatgagcttaccttctaatacagtttactaagaaaattggtcggtctgcaaccatctccggcctctgcgtacttttgtaccaaatacagtttactaagaaaattggtcggtctgcaaccaccacctgcaaggcccgtttgaggttgactaatacagtttactaagaaaattggtcggtctgcaacgaaaagctgtaaccactattactgttaaataatacagtttactaagaaaattggtcggtctgcaacttacgctgtaggctttaagctcttttttctaatacagtttactaagaaaattggtcggtctgcaacttattgagtacgtcttcttgttccaaagtaatacagtttactaagaaaattggtcggtctgcaactatggcgggagtaccctttagggataaattaatacagtttactaagaaaattggtcggtctgcaactttaggaaatcaagtgttgcgcttgttgcaatacagtttactaagaaaattggtcggtctgcaacgcgcgacttcctcaacctttttccctgaataatacagtttactaagaaaattggtcggtctgcaactggcggtgcatttacagggataaagggtataatacagtttacgaagaaaattctctaacgaatatatccaaacctattatatcgttaagattcctcatctgccataaaccaaaagcccttgcccttcgtctatatattaactatggtgtaacgatcatgggcagcagggagcaaagtgaaagtaattttcggagtgcgaccatgctgattgcaaacacaattcaacgatcttttagaaaccacttcacatttcccaccaaaagcgctcacggtaattaccgctaacggttttgcctgccgccgcaaagacgacgtgaggagaacatcatgaagacatcaccataacacggtcgcataaatattctgcggcgtttctgtcatgggaaataaagatgacggttagtccgagactttggcgaagctcgctgaacaagttgagtatctgcgctccggtggaaacgtccagcgaactgatggcttcgtcggcgatgagaatttttggttccagcatgagggtgcggccaatgcagatccgctgtttctggccgccggataattcatttacctgcctgttacggtacaggggatcaagcccgacgcggacaagcatttcatccgccttacgggatcgttctattgctgttccgcgccggtgaatgaccagcggttcttccagcagccagccgactttttttgtcgggctgagtgaggcgccgggatcctgaaaaatcatttgtgaagccggatttaattgttttcccggctgctgcaatgtgccatcaatgaaaatttcacctttataatcaatgagacccaatatgcagcgggcaagggtacttttgccgcagcccgattcgcctgaaatcccgaatatttccccggcggcaatgtccaggttaatattatttaatacaggtttaacttccttttttccgaacataccataattgcggctgacatatgcctgagtaagattacggataacgatgatcggtttgactgctgtgcgagtttcagtcattgcttctggtacttcatgcattttcggctccggggaaaaagcagcgtactttcctgtcattgccggtccttgccgttggcggaaaagccgatgtacagcgttcctgttgtctcggacagcggggggcaaaagggcagccgcgaaaattgtcttcgacagacggcgctttgccgggaataaccgcaagtggtttgcctttggattctctgcatggaattgttcccgaaagagcagtggtgtacgggtgcatgggtttggaaaaaattgtttcggacggtccttcttcaataatacttcccgcatacataatcagactacggctgctgaaacgctgtgccagagaaagatcgtgggaaataaacagaatcgctgtgccatattcccgatttatctgctctagcagggataaaatactgccgctgttttccgagtcaagggcgcttgtcggttcatctgcaataatcaatcgggggcggtttattgcggcaatggcaatcattacccgctggcacattccgccggaaagctgatggggccatgcctggattattttttccggctgcaagaacctgaggttgtgcagtatttccaatgccgccccttctgctgtttttttatcagcgccgtgcaatttcagcacctcggagatttgtgcaccaattctcatcagcggattgagcgactgccggggttcctggaagatcatggtaatgtctttacctctgattttgcacagggatttttcgtttgcggaacagaggtctatttggttagggatcggggatcggggaccggggacctgggaatggggggaagtattcagactaccgggagataactcggaagcaatgtaatttctcgtataacaatccctggtccctggtccctggtccctggtccctaactttatctcaccgccggttatttcagcggcaaggggaagcagacgcattatggaaagggcggtcagggttttgccgcaacccgattcgccgacaagggcgactatttctccggtgttaatggtaaacccgatttgattcaccgctgtgtaacaatgccgcccccgtcgtataccgacagaaaggttctgtacttccagcaacggctgcgcagcagatgacgacatggctctattccccaaacttccgccgcaggccttcgccaaggcagtgaaaggcaatgaccgtaagcatgatggcgaaacccggtgcaagggcgcaccagggcgcgttgtacagaaaactttgtgattcagagagcattcttccccagcttggcagcggcggctgtatgcccaggccaaggtaattcattgccgcctcggcaagaattgcgttggaaaatcccagcgcggttgccgataacagtgagggcgccaaattggggagaatatgtataaatacaattcgtgcgtggcttgcccccagcagcctctctgccaaaataaaatctttatgtttgtactgcaatgcgccgctccgcataatacgggtaaagctgggaataaacaggatcaatagggcgataaaaagggaaaattggctgttgccgagaattgcaaccatgacaagggcaagtaaaattcccggaaaggagtggatcgcgtccataaggcgcatgaccatttcatcacgaataccgcccgaataaccggcaaaaagccccagcgcaacgccaagtacaacggcgccggcaacggtgcaaacagcaaggacaatggtatacctgcttccggcaattatccggagcagaatattcctgccgaagttgtctgttcccaaagggtgagtaaggcttggcttttggaaacgaatgtttgaatccatcgcgttataatcctgatcaagccagaaaagacttgtcaatgatattaacagtattaatactgtcagtatgattcctgtttttaatgtagtattcatttacttacatcccccgccagccgaattctgggatcaacaatctgaatgacgatgtctacaagggtgtttgcgattattacgataaaggcaatgtatactacaagcgtttgtatcaacgggtaatcccgtgatgtaattgcggcaataagcagccgccctatgcctggaatggcaaaaacctgttcaatgacaatgctgccggaaaaaatttctgcaataatcatccccagtacggtgattgcgggaataacggcattgcgaaaagcatgacagcgcagggcaattgaagcagaagcccctttgctgcgcgcggttctgatataatcgccgcgttgttccttaaaaagcgaggaacggaggaatttaataaggattgccgcgttgggaatggcaatggcaagagcgggaaagatcagataaccaataaagccggtaaagctgtcacggtaatcaacgtacactcccgtgctgaacagacgcagacctatcccgaaaatccagatgaataatactcccagaaaaaaattggggatgctgatgccggctgcgctgaagacattaaccgatttatcaacaaagccgttttcgcggtgtacggtaaaaacagaaaccggtacggcaattaacagaacgaagaacagggaaagcaaagcaagtgcaaaactcaccggaaggcgttcaagaataagtgcggagacagactcaccctggaaacgaacggaattaccaagattgccggagagaaaattccctagccaatttatgtaacggacaggcaggctgcggttcaaccccatttcttcgcgaaatgtttccacttggtctgccgttgcatctattcccagtatcaaacttgccggatcgccgcgaatgacgttaaacgcaataaaactgaataccgacacaataaaaagggttattaatgcggcacctgttctttttagaataaaatgcaatgccggtttacctgctgtacatagatgcaaaatcgatggcgtataacggatagttcagcacgccgccgtatgcaccggcacggaaagccctgaatcgcataatgtcctgaatgaacgcacttgcggcattgtctgaaactatttgctgagcttctttgtacagggcaatgcgcatgtcttcatttgtttcaatcagggttgcatcaataacttcatcaaacccggcatcggaaaaattgatgaaattcccgttattgtctgaacggtagcggattaaaaaactctgcggcgaaacgtgtgggctgtccagagagataatcgttgcctgatagttgcggtcccggtatacgtctgatagccaagttgcccagtcaacaagctgtatgccggcttgtatgccaattctcgcaagctggcctgtaattacctgggctgtatcaacatgcatggtgaaatttgaggggacggtgattaccagtgaaagactttgtcccccttcgtcaaagcccgcttccgccagcaatgcccgtgcatattccggatcatacggataaggatcgcttaatgactggttataatacaccgcaagcccgggtatcagcggactgccggaaggctctcccctgccgtaaaaagccgtgtcaatgatttcctgaacattgatcccgtagttaatcgccctgcgtacacggatgtcgtttaacggcgctgccgcattgttcagggcaagaagctgaaccgcagcagagtagccgggtattatatcaaaacgttcccggctgagttgatgggcatgaccgctgtaaaatgttgccccgtcaatgctgcctccgtgcaagccgaggatcattgcatcagaatcggcaaaaaacagtaccgttattttttccaggtttggtacattatcctgccaataatcattgaattttcgcagtacaagcgactgctggacagtgtaactttcaatataataaggccctgttccgattgcattattttcacgatcaacgctgtcggctttaactatgccaacggtaaggtaaggcaggaattcgggatcagggcggcgaagggttaagtgaatatcataatctccgccggtttcaatatcttctatcgagtccaagccggtaaaaccagcggcttgtgctgtttccaatgaaaattttacatcagttgatgtcagcggagaaccatcgtggaaacgtacattttcacgcagtttaaaacggtacacgcgccccagttcttccactgttactgattctgcaatgcacggcaggagccttccttcggtatcgggttttaccaaaccttcaaaaacattaaaaagtatgcttctgccgtccgctgtatttgaaggactcaatggatcaaaggtagcgggttctgaagcaataccgtagcgcatttcagttcccgaagcatcggctttttgccggagacaggatgtgaaaataatggttaaaactgccggtaataaaaacgaagcggcaaaacgcagagtttttttcatggttttttcctttctgcctattcttccggtgacggcggcggcggtggtggaggtggtggtggcggtgccggtggcggcggaggtggaggaggcggaggtggaggcggccggggcgctggcggcggcggcggagcggataaagtaatccgtatccgctcatcaacggtacggtgtctgatttttaccacaagggtctgttcgtcattgatatacagccagccgggagtatcataattactttcaaaaccgggagagctgttgtaattcacattgtgaatgttaagctggtagaatggccgcatattgcgaagcatgagataatgagtttcaccggcgggaaaccggacatttatatccattatattgttggcttgagtaattgctaccgatgaagctgcgctccaaacccacatatcgtttaaccctgctgttgcgcggggtagattctcgttgtttgccagcatgcggtacagtcttgcagtactataataatctgcggaagggataaactgaccgttctgacctgttctcagtgttaccggaaccaggccggtttcattgcccagagaaaaagcggaaagtaccagcgagcggcccagcgccgcccagtcttcctgatcgtagtgtgttccccattcattaaggattatgcccagccgtacattaaattccgt

SEQ ID NO: 779 - DNA, 15840 bp, synthetic construct
  misc_feature 1..15840: note = Synthetic
  source 1..15840: mol_type = other DNA
agttcttgccgccagggcccgcatcgccgcccgtcaagcaagggacgccacacgccgtaaaaacgccatggactccgccggccttccgggcaaactttcggactgctcggaaaaagacccggccctctgcgagttgtttattgtggaaggcgactcagccggcggttcggcgaggatgggccggaacagacacttccaggctatcctttcgctctggggaaaaatgctcaacgtagaaaagacccgcatcgaaaaggtagtcaccaacgaaaaactccagcctattatcgcaagcataggcgcaggctgcggcaacgaattcgacgttttaaagatacgctaccacaaagtcataataatggccgatgccgacgtagatggctcccatattcgtaccctgcttctcacatttttttaccgttacatgacaaagctaatcgaaaaaggccatgtgtacattgccatgccgcccctttacaagatcagccacaaccgcaaggattattacgcttacgacgactcagaaaaagaaaaggttcttgcccagttaggcgacataaaaaaagacggcatccagcgttacaagggcttatgcgaaatgaaccccgaccagctttgggaaaccaccatggaccccgcccgccgcaacatcatccgcatccacatggacgacgccgtggaagccgagcgcattttcaccacgctcatgggcgaggtagtagcgccccgccgggcattcatcgaggagaatgccttgctggtgtcaaacctggacatttgagaaaaagactcacgcaaagacgcaaagggggggattgtgaaaaatattgggaaaattgtatttatcttagtatttgttttgttttctattggatgtgctacaaaggatactgttagagagcaaccggcagaaagagttgtttattttgcctttgactttgatacaaatcaatcggttaccccatttccggattacggagcggcttatattattaatatttccaacgagacaatatcaattcccatttctacctatatcgacactacaatgtttagatttttctattatgatgagtcgggtgttcgcccggttttcactgaaatgatgctgccacgagtcaacaggaataattttatagtcttagagccgggagcaagggttttagcctattccgttgccttttggcatgccaatctggatcgataccccgatgcagcgtatgacgcaacgattgttgtaaatgacaggattgttcataccagcgggcatgtcaggcggtagttgggggtttgggggatttctaaaaggaaaaaaatttagttgatactagttttttttcattaattccagaattaatgccgttaatttttcaacatcgccttctattgttccggacatgtaatgttcgaatatattttggttatcaggagggttcatgtttaaggtatagcctttttcaagggcaagtgtgcggatgaattcccgttgagtccgtccattgccctctctaaaagggtggagataattaatattgtcaagcagaattgctaaatgtccagacaattgagatttatctaaaggatctgtttttcggtaattcacgatcagggtatcaatataggcaaaaccattgtcaaaataatctgtcagaaaaaacggctttccctgtttgcttatttctactgttcgtttctgccctgcccaggaatatacatcctgaaacaaatagtagtggatatccaaaagtgaagcggaattttgtatggagataggttttgattcaagttcttttgctcttttgataacggctgcactttcaaaaaacaacaaatcttttggatcggtaataccagccagattccgcaatactcctgtcttagggtcggtataggtatagtctggatcaatatattcgtacttatcacgcataggctttttctttagttaatttttccaactgctctatagttattttatctgaaaggtagtcacgaataatttcaatgctcctgggtgttgggtcaaatccttcaaacattacagttcccagagcatttgcagttgcttcaaagttgctgacagaactaaaatttactcccattatggtgaggttttttcgatcaatttctattggggtatatggcatagaaaacctccttatgcgtagaccgaatactagggcaataaaaaaaggagggcgtaccctcctttctccacgcctgcggcgtcattttgtggcacaacccttgcgggaggccttgttaacatatcgaccaattttccgaataaactgtagataaatggtacactatagtataagatttgtcaagtaataatgggtctatcaaacgttttttgagaacgaaccggtattcccatgttgcagattggccattttccgaaaaactgtatttttagaagtattcccatagattactcttgacaatgtcgatttaaggagttatgttcttctaggcgcctcaaaatacttttgatctgtgtgtcatcctttagcctgggtttgaggcgcttgcaatttaaaatttgcgttaaggaggcccatatgtaccgcttggctctggatctaggcactaattcgatcgggtggaccgcgttagaacttaaaacagatagcaaggcaaaatccccagccttgacagggaaaattctcgacattggagtgaggatatacaccgatgggcgggaagcacagaaaggaacgcccttaaacgaagcccgtcgaaatgcccgccaaatgcggcggcagcgggacagaaaaatccgccgcaaaaaggccatgctaaaatttcttgtcaacaataaactgatgcctttcgaccgcgaggaacagcaagtcatcgcccggcttgatccctatgcactccgcgctgcagctctggaacgtaagctaaagccctttgagcttggccggatcttgatgcagttttccatacgtcgggggtttaaatcaggaaggaagggtcaacaatcagaaaacacttcagaacgtgaaggaatgttgggtggcatccaatacctggaatcagagctgcagggtcttactctcggccaatggcttttggagcaacgggtggcaggtaaacctgttcgttttaaagccaggcttgagaagtcaaaagctacctatcctttctttccctcacgcgaaatgtatgaacatgaatttgcaggaattaggaataaacaggaaaaatatttcaaagagattaactgggacagattacattggcttattttctttcagcggccccttaagcgaccagagcggggtagatgtcagttttacactgaagaagatcggggatacagagcttttgtttcagcccatcgtttcagaattctacaagagatcaataacctcagatattacaatgaaaaaaacattgaagaaaaaattcctgtcgaattaaaattgaagttgtttgaagctcttaattcccaaaaatctcttacttttaacaagataaggaagctgttgggtaaaaactatacaggttcatttaaccttgaagacagcaagcgtagtgaacttaaagggaatgaaacatctgttgattttcgtaaacctgaattctttggacagctttgggatgagctggagatccgaaaacaggatgagatcatcgaagaattaatgatagaagatgatgaaaaagtaatcagtgatatgctgaaaatattaggtttaagtaatgagcagataaagaaaatatctggtcatcactttcctgttgggacaaccatgctctcgtcgcgatttatgatagaatgttcagacataatgctaaaagaatggctttctccttacaaagcaattgagaagatgggcttgcatcattccaaaggagaaaaacgagaaataggccgttcccttccttactacgggaaaatacttgttggacaggtcagtggtgccaaaggagaaaattatgaagggaaaaaaggcgaacatttttatagcatagaagaaaaacgttatggccgaatagccaatccaactgtgcatattgccatgaaccaattacgtaaattggtaaatgccctgattcggcgatatggcaatcctgaccaaattgttattgaagtaaaccgggaactaaaacaaagcaaagcccggaaggatgaaattttacgggaacaggcaaaaaaccaaaaggccaatgaacgaataagaaatgaattaactgagcttggcttattgaaaataagcagtgaggatattaagaaatacaagctttgggaagagcttgcatcggagggtattgccaggcgctgcccttattgcggaaaaacaatttctgccaagcaattaatcactggcactgtggaaatcgatcatatacttccctattccagaacactgcttaattcccgtgataaccttactgtggcccatcgggaatgcaatcagaagaaaaaagactatagtccctttgaagcttttggaaacaaccccaaaggattcgactgggacaaaatcatcgaactcactgcaaagttgccttttaataaaagacgaaagttctatcctgatgcaatgaaacactttcgtgatgaagaaggaggttttattgacaggcaaataaccgacacagcttacctttcaaaagcaggtaaagattatctttctgcgatttgtgatagtaaagcaatctgggtaagtaccggtagacttactgccatgcttaggggattttggggctttaatactctgctcaataggggacatgatacatggtttaaaaatagaagtgatcatcgtcaccacgccctggacgcattggtcattggtctttgcgaccgccgcatcatagctgaagctgcccgaattaacagtggcaggctctatggcgaaattaatgctccgccatgtcctataaagagacaggacattgaggaacgacttaagtccataatcgtctcctataaagtggatcgcggaaaagaggggaaactctacgccgaaactgcgctggccaagcattcctatctagaacagattggcccagcagatctggaggagaaggaaatcaatcgtattgttccaaaaacaatacaagaggatatcacccttttggttaaaaaagaaagttttagaaaggcaaaagttttgattaagagtaagtataaatacctgcgggtctttcgggacaaatgggtaactcgtgctcctttaacttccctttcagagcgggatcttaccaatattagtgatccggtaataaggacagagatactggaatttgttgaatctcatccacctaaatcaggacagaaattgcaggatgtattagcccagtttagtgaggaaaaaaagatttactcaatccgttttttccacaaggatcaggttcctgttcatattgaagataattttaataaagcctatatgcccagtgattattacaaggtagatatctggcggattcctcagcaaaatggaaaatacaaatacgagggagtgtttatttcacgtcctgaagcaatgcggcagctatcgcgaagacatgagcatcctgcagcaaagctaattgtaagtctttgtaagaatgatattatacatttatccaaaaaaactgaccaggagttttgcagaattgctggtttttcaactactcagaataagatagatattcgcccattgtacgccagtgatactatagctgcctggaaaaaggatacccatatcaatctttgttcatctttttggccttctgaaatagaggggcagtattttaagtcaattaatgctttattcaatgaattcgagataaaattggtaaaaattactgtggatgggagacttatttaccgataatgataatccgatgatacccagaattgtagatgttagtgaaaatggccgtttcattgccaagcatcgagggttcatcacaataaagcagggtaatgaattttacggcgaagtaccccttgatgatataggggttctcatgatttcagcgtttggtgcaacctgtaccaaagaggctcttgtcagccttgctgaccgtggggcagtgacgatcctttgcggctccaagggattgccgtctgccctggtgttgccggtaaatgcaaattatgaatctgctttacgggtacgcttgcaaagccaggcaagccaaccattaaaaaagcggctttggcaggcaattgtaacagcaaaacttaaacaccagagtgaagttctcaggttttttggaaagcaggtaaaagccgatcaaattgagatatactcaaggcaagttcaatccggagattcaaagaatagagaagctagtggagcaaggctttattggaaagccttatttggcgatattttttctagaagtcccgttggtgattggcctaatgctcttcttaattatggctatactttgcttcgtgcatgtgctgcccgggctatatgcgcaacaggattgaatcccatttttggaattcatcatcaaaatgacacaaatccctttccattggcggatgatataatggaaccttaccggcccctggttgattattttgctaaacaagttcttgcaactggtattaccgaaatgaattccaccgctaaacaaatgatcggcgcctttttgtgggcggatctttattctattgtagggaccacgcctctttatacggcaatggaacgcttagcattttccctggttagttctttcaaaacaaagaaaccacaaattgaaattgccgaaatacggttgtcaaaaaatgacacatctcagctcatataagcttatgtggatgatcgtactctttgatttacctgtcgttactcccgaggaacgaaaaactgcatcccagtttagaaaaaatttattggatcagggctttcacatgagtcaatattcggtgtactataggttgcttccaggcaaagaggccttggatggctatatcagaggcatccaggcgcagcttccacctaaaggcaaagtagatattattacaattacggataagcagtatgaaggtattatttcattttcaggcaaaaccaaagagaaaaataagcaaacccctacacagcttttactgttttgacctgctttttttaccgaccttaccggctaattccttacaaaataaggaattagccggtatctaattcagtttactcggaaaacaggtcgatctgcaacctggcggggatctggtagtccagctcgttgaattcagtttactcggaaaacaggtcgatctgcaactggttttaacaagagaagcagtggcggcgcaattcagtttactcggaaaacaggtcgatctgcaactaagtaacccaaggaccgcaattgccaaataattcagtttactcggaaaacaggtcgatctgcaaccagaggaacaggcaagagcttctgaaaattaattcagtttactcggaaaacaggtcgatctgcaaccagccgtcggcgaactaaaaggacctaaaaaattcagtttactcggaaaacaggtcgatctgcaacgattgggtttcgttagtaatagctcgagttaattcagtttactcggaaaacaggtcgatctgcaacttctccggtgtgaaagcgcgatagaagcacaattcagtttactcggaaaacaggtcgatctgcaactactgaggccttggtgattgcagaggatagaattcagtttactcggaaaacaggtcgatctgcaacccgctgtgtctaccgtgataaacgaaatccaattcagtttactcggaaaacaggtcgatctgcaacatgcgcaagcaaaaccctacatgggtacataattcagtttactcggaaaacaggtcgatctgcaacttatccccgtctttccttattttcacacccaattcagtttactcggaaaacaggtcgatctgcaacgaagcattaccgtacccaccttcaccgttgaattcagtttactcggaaaacaggtcgatctgcaactcctggaggcggatcatcctgtccctagtgaattcagtttactcggaaaacaggtcgatctgcaacctactgtccgatgcactacagacacatactaattcagtttactcggaaaacaggtcgatctgcaacgagcgcggtacgaggattgtgcaacatatcaattcagtttactcggaaaacaggtcgatctgcaaccagcataccggaactttgtaaaagtattttaattcagtttactcggaaaacaggtcgatctgcaacctatatccatagggagaaaaggccatgccggaattcagtttactcggaaaacaggtcgatctgcaacaggggaatggacacaaggaggactgtgctgaattcagtttactcggaaaacaggtcgatctgcaaccaagggcagtgaaacaaaccacgatgacttaattcagtttactcggaaaacaggtcgatctgcaacgtgtagtaatctccggtagaaggcaaagccaattcagtttactcggaaaacaggtcgatctgcaactcttcggaatctttctcgataagaattttcaattcagtttactcggaaaacaggtcgatctgcaacggcagccaagagatggttattgtcatttccaattcagtttactcggaaaacaggtcgatctgcaactcaaaaaccgcttagaccatttcttacatgaattcagtttactcggaaaacaggtcgatctgcaacacgagggagcatacacgaaatcattttttaaattcagtttactcggaaaacaggtcgatctgcaacacgcctcgctaattccagccgggacttcccaattcagtttactcggaaaacaggtcgatctgcaacccatcagaacatatccctccatactccattaattcagtttgctcggaaaacaggtcgatctgcaactttaaacattgacgagcttgaaataataccaattcagtttactcggaaaacaggtcgatctgcaacaccttactaccgcacaaacaacaaataaagaattcagtttactcggaaaacaggtcgatctgcaactgtatgaccagtttatacacatcaataatgaattcagtttactcggaaaacaggtcgatctgcaacagtcagacttgatgctgataatgggactttaattcagtttactcggaaaacaggtcgatctgcaacactggacgggctagcttatggcccaagaataattcagtttactcggaaaacaggtcgatctgcaccgtcagtgttacctgtcgaacagagcaacaaaatttctatcagtctgatttacggaactctatacaaatataaattattattttatacttataaagtcgaagaaagtatgtaagctaaaaatcttacaatgaatattttttactttgtgaaaggaggctatatgtcctatacagaagaaatttccattaattatgattcatttccaatatatagatttgttttacatttatacagacaaaaaaatctacaatatataataaaattaaaggcatattcttataaaaattttaaacagcctatttataataaaaaaaggaaaatcgacgatagtgtttttgaaaaaacatttttagaattattgaatataaatctttgtgaattgaatcaaaatattgaaaaaaatatctttgttgatagacctacaatagaattgaaattaaagaaaccttttttaaatattcacataaaatgtattcctcgggaaaatattatctgggaaatattccttaatttttataaaacttttgatattgaaatagaatatatataaaatagtcaaaacccaaaaacaacgccattccgaaattcccttcggctgatctgcgaaaaatctgcaaaggattttcaggcgtggaagaagccaaaggcagaaacaaacagatatatccttttttgaagcattgtaatagacaataatatataatataatgctttggaggtatatatgaaactagccgttattggaagcagaagtatagaaaaattggatttagataaatatataaaagaaaaaccagatatggttattagtggaggagcaaaaggaatcgatacaattgcatgggaatgggcgctaaagaacaatattgagatagttgttcaccggcctaattacaatttgcatagaaaaaaagcagcattaagaaggaatgatatcattatagacgaagcagacaaaataatggctttttggaacggagaaagcacaggaacaaaatacgttattgatagagcaataaaaataaaaaagaacatagaaataattttcattgaaaacaatgaagctcagccccacatggcccaatagacgcccccagccctcaaatcaccactctccccctccgcgccctggcgtgaaaaatttgcgacatatgccttccgcatcttgccgcccccaaccaattgacaaaacaaccccaataagataacatcattcatgtggtttttgtggttctggctggtttttattttcagtgatatctttcgtacaattgtttttattggcctccccatattcataatagcaataatatacatagtgatatctagcagaaaaaaatcgcaaaaaagaaaagtcgcaatgcaaaatgaactgttaaaagatgagcgtttttcaaatacagacacaaaaacattcgattctgagcttgctgcttcaataatgatttcagaaagtggatatatagctattctagatcattctttaaacaccacaagaatcataaacattaaggatctaaatggcattgagctgcaaataaataataatgaagataaaaccgactctataaaactattgctcaaaataaatgattttgccaatcccattttagaagtcccttttttgtcctatgaaattgatattgattcaagtatattcgatagcataaaaggagaggtaaatgaattaatgggaacattagagtatttaaaaaacaaatacattgaaaacaacgaaacgcagcattgtggctaaaaatgaacaaaaaaacctatgaattcgaggcagaaataaaaaaagtccctggcatcgatggagcatacatagaattcccttatgatataaaaaaagaatttggcaagggcagggtaaaagttcatgcgaaatttgatgatgagccatacgatggcagtattgttaatatgggggtaaaaaacaataacggaacaatttgttatataattggaataagaaaagatatacggcaaaaaataaacaagcagcctggggataatatcagtgtaaaaataaaagaaagagaataaggtggatgtccagccacccttcacatttcccgcctcccagtatacacttaatccatgaaccacaaatacatcgcctactgcggcctttactgtgaaaactgtgccgtaaaggtaaaagtaatgcccgcagcaaaaaccttgcaggaagaaatgcaaaaagccggctttcaagaagccgtgcaaatgattccagaaggcgataaattctggtcttttttgaaaagcatggttgatcccggcacatgcagctcgtgcagggaaggaggcggaaatcccggctgtgccgtaaggatttgcgcaaaggaaaagggcgtagaaatctgcgccttatgcgaactttacccctgcgacaaatttccggcctttttcgaaggctaccatgtactaaaaaatgataacctattactgaaagaaaaaggcatagaagcttggttagcgctccaagacgagcgccgaaaaaaaggctttacttatactgacgaaaaatatacaaattaaatccgcctctccccccttgcctaatcatgccgcttataatataataagctagccataaaaaactgggggattatcatggaaaaagtaaaacaattcttctttacaaggaacctcaatgaagttcctgggaaagtaacggcacatttcaagaaaagcagcggcagggatattgatggctttgtatcggccgtgtggatcgataaaaaagaaatatcatttttaattgtaacaaaccaggcagtatttgacaattctgcaggtaaattcgacgaaattttaacaagctcaattaacgacatccgaaacgtattgaccttggaaataataaacagttcaggcgcaaaattcctccccttttccgcctccccgctccctgaacaattgcgaaataacctacagagcgatatcaaaagcgtggttcccaaacagtcaaaattacttgggtaaaagacggtactacaccacataaggagacaagaaatggttaatttcgattatcaaagtccaagcagggttgttttcggcaaaggaacagtttccaaagccggttccattattaaagaatatggcggttcaaaagtgctgcttcattatggcggcggcagcatcaaaaaaaacggtgtttatgatacggttaaaaaatccctggaacaggccggacttgaaatttttgaattgggaggcgttcagcctaatccccggcttgcccttgtaaaagaaggaattaaactctgccgggaaaaaaacgttgactatattcttgccgttggcggcggcagcgcaatagattctgcgaaagctataagcgtgggaataccttacgatggagatgtttgggatttttataccggaaaagaggttccgcaaaaagccgtgccggttgccacagtccttacaattgcggctgctggcagtgaaaccagctggtcaagtgtaattaccaacgacgaaggtgctctaaaacggtttttggatcacccgctgatttatccggtcttttctattcttgatccagaaacaacctatactctgcctaagtatcagttaggctgcggcatagttgatatgtttgtacacgtaacagaaaggtactttactaccgtaaaaaatgtcgagttaacagaccgtatttgcgaagcgattatgaaaacagtaatcaataatgccaagctgttaatggaaaacccaaaggattacgatgcccttgccgaaattatgtggagcggctctgttgcgcataataatctcgccggcactggccgtattggggattttgccagccacatgatcgaacatgagctgtccggttttaacgacgtagcccatggtgcaggacttgcagttgttactcccaactggatgaggtatgtatacaagcacgatattccccgttttgtgcagtttgccgtacgcgttttcgatatcaaggaaaatctctccaatcccgaagaaaccgctttgcgcggtatcgaggcattaagtgatttttttgcctctgtaggcatgcctcttaccttaaaagaaatcggcatagaagagaaggatttttccgccattgccggaaaaattaagaaatttgatgttgccaaaggtacaacaggaaatttcttgccgctaaaggaagcggatgttttggaaattttaaagctggctaaataggaggatttatatgagcgatcaggaaaccaggcaaaaaggaccagatgaggtattttgttcttcatgtggagcaattatcttaaaagcggctgaaatatgccccaaatgtggtgttagacaacatcctgttccatcacaaatgtatttgggtcctaccggtaatgccagttatccgcctggctatgttccaaaaagctgggtaataactcttgttcttttaatattttttggatgctttggtgttcatcgtttctatgtgggaaaaattgggactggaatattaatgctgctgacattgggcggctttggcatttggtggcttattgatctgataatgatctgtgtaagtaaatttacagacaaacagggatatgttctaaagcattaaaaagccagccagcttacctgccaaacagaatgtccgcggcattcctcccggcctggtctgcaaaggcccttgcaaaggtttcacagccgggaagggtaatcacggacaggaccaggcaggcaatgactatgccggcaaagagtttcttcataaaaacctccctaactaagctcccctaaccggcccgcttacttcctggaaatggcctgggcagccccgcccagtctggcgttgatgtccgaaagcaggggccggatagtctgccccctggcaatggcatcccggaacctgttctcacggagatcctcgcgggcatcgtcgtaggtgcggcgggccagatccatgtccctgttcagggagtcaaagtcgagctgcaagcgcagttgctcggccgcactgatggccgccgcagtctcattaatggggccggcaaggctgtcgattaggctcgtcgcctcgtcccttcccctgcccgaggcaattctcccctcggaaatggccctttcggcgttaaaaatggcctctgcggcaaagtccctggcggcatcgtagcgcttggcgtcggcctcggcctgcatctggttcagggcggtcctggcgcggatcaggagctcgggggcaaaggcgaccgcgtcagggtcgttttcggcgcgggtaacggcatccagggcctggttcatctcctccaaagggggcgtaacacaggcagccagaaaggccaatcccacggttaaaaccagggcaaaacccagggtattgatggcaatgtgctttttcattctttcacctcgcaaactgtaaacttaatacaattatataacaaaaacgccgaaaaataaagaacaggggaaatatgactgcgtataccgcaaaaagaacttcatggctccgtttattgacatcatttttacccgccgcagctatagccgccctcctctgccttatcctggaagggcccaggctggggccccattatgaccttcttcttggctggcgctcttcccctcccctttccagagagcttcttatcataaacagctcagtctcggggcagagccttggggatgagatccttgagccagaggcggcaagttccatgctttacaccctgaccgaactgggcgccaatacccttattatccaggtgccaattttggggctttccacgggcggaaccgtaagcgaggcggagataatccatcgttttgatgaagaattcacgattttaagcagaaatatccggaatctttttgagggcatcagaaccggttcggtggccccctgggactcggtcaggtacgttggggaactggttgagctttccgagcggggcatggaacggctggttgccgccctggtacgccgggacgaggaaggcgtattcagcatggaaagggcggcggccttttttggccatgtccggcggcccggagaccttttggtgcagcttatcagggcaggcgagagtggccgctccggggtgctggcggagcaaaacgagtattcgcgggcccggcccgacagggacggggttttaaggcggattgccccggttataacggttcctgagcttacaaatgggacggccacggaaagaacccttgagcatattgtctacggggcccttaaacccaggtttagaactgcggcaatagattatgtagatccctatgagttaaccaacgcccgcctgcaggccctgggaatgcttccgctgcccgtgcccacgaaaccccggcaggtcctctttgccctgggcggacccggcgacagggtcatccccctggaccgcagcggcgctgtcctttttgagctgcccccaaggggggacgatttccggcgaataaacatagcggattttctggcctatgacgaggctgaccggaactacaggcgccttttggccgagggggaagccctgggcattttccggaacattgacggagagaaccgcccgggattcctgtacgactatgcccttgtccttcgtaacgaaaacgaagaatacagacaggcctgggtt

SEQ ID NO: 780 - DNA, 23501 bp, synthetic construct
  misc_feature 1..23501: note = Synthetic
  source 1..23501: mol_type = other DNA
cgtcgttcgcctctctgcaccaattcccggtcgacacgctcaagatcgaccagtcgctgatcggggagatctcccgctccgaggacgccgtggcgatgatccaggggctgacgacgattgcccggagcatggagatcaaggtggtggcggaaggggtcgagacggccgagcaggcggccaagctgcttgagctggggtgcgattatgcccagggcttttattttgcccggccgctgacgaatgagaatctgattgcgctgcgactcaaagaggtcccggtggatgcggcactccccgaggcgggagtctcgtcatccgtgccgtcataactgcagcctcaaccgggtccaggggcaccctggtgggggatgcaagggggtcacacccccttgcccgccggaggcttgtctcgtcggagaccgtcggaaggaacacgtgtccaagcgcgaacaacgtgccggatgccctctcaccaacccgcggtgagcgcaaaaagagcggcgcagggtgagggagtccacgccgcgggaagtcccgccggggacgaaagaactctccttccacggaacgccatcttagcgggcaaacgactcaacgccggttgcacaaaacagacatccgttgtgtcccacggttcctcatggaagcgcctccggcggcaagggggcgaggcccccttgaccccagcggccgtcgaacattgggtttgagcaatgggagccgtgccggcaagggcgcggtccgagcgttcggatcgactgcgcgccacgatcacggttcagcgggagccgatcttccacaggtgcccgtcactccgcacataaatcgcaccatcgctgatcgccggcgtgcaaagaatgatctcgccaaaaccgtgggtgtgagccacatcccccttgtcgccggagagattgaccacctggccaagcccctcctcattgaacacaaacaggtgccccgccgccgccaccgggctgccgctgaagggccccttgagacgagtctgccacttcttctcgccggtcttcggatcgagactcgtcaacaccccgctgccagccacaaagtaaagcgatccctgatacaggatcggactccccgtccccggcgaggccccttccgcccgccacaacatctccggcacatcgctccccgacggcgtcgaccgcagcgccgtgatcccgtgcgaagggacataagccacctgaccatcaaccaccagagacgggatcgacgacgccccttcgctgtaggtccactccggcttcccggtcagcggatcgagcgccaccacgccggcggtcgactgaaccaggacccggtcgccacccgtttccttgccccggagaatccccggcgaagtccagttggcccgccgcggccgatcaatcttccacctcgctttgcccgtcgcgacatccaggccggtggtgaacgactccgcgtcgcactcgaccatgcagaccagcgtctccccgaccacgatcggcgacgacgacatccccaaactgttgctggcattcggaaaatcgctcgtcagcccccgataccactcgagctgcccgtccaggtcgaggcagaccacgtcgttactcgagaacgacgcaaagatccgccggccgtcgctgcaaggggtcggagccgcattacaggtcttgggatgggacgaggtccggccggtcgcccagaactgccgctcccagagccgcgacccggtcgcggcatcaaagcacagaacatgcagccgttcctgccgcacgcccgatgacgccgacacatagacccggttcccgacaacaatcgggctcgacagtccccgccccggaagatcgaccttccaggccaggttctcggtatcactccacttcagcggaaccgcctcgtcaaccgccacgccggtggcatccgtcccgcgaaactgccgccagtctccggcagccgccacggccgcgagccccaacagccaaaccccgacagccgcaacggatttcctcatcgacaaccctctcccgcaaggaacggtcgcggcaagtataagcgggaagcgatccctgggcgacgcccccgccgcctcctcttggcaacctgccccaccggaccacaaccggccgagatctcgcccaaaaaatcagtgaacctgcgagagcgaggatgcgtccttccggacgtgggagaacgcacgttcgcaacatgtgacgacggatcgtaagtccgaacgaccgaccccaacacggcaacagccagccggtcctcatcgccaagcgtcgcgtcaacgcatcgaagagcgtccataccaccgccgtaaggtgagggaatctgccggaggctgcgggaggaagttgcaggagatcaatagacaaacagcgtaggttgacccgatttgggacatcacctacgctccccccactcacctcggggtgtggctcagcttggctagagcgcctggttcgggaccaggaggtcgcaggttcaaatcctgtcaccccgacttacatttcgtaacgactcttcctcatcgacagagggaacagcctcggagaccatctccgaggctttttcaatggatccgcgggttgtcggaccactgtacggttggatcggtgccggtgcggatccgatcgtgatgatcccgcctgccagctgattgagagtccgcttcgtctttttgacctgttcgaacgacaggtacatccgaagatcaaccagatcgaacagccgcttgacggccccctggttctcggcctgctcaatcaaatccggaaggttgttcaggagatccattgcgcgttgcacggcgagttcgtgatcgcgcggcgccactgacatcgccgacagagcatccttcttctctctgagacgctcaagctcggcactgcgctcgtcgaacacccgctgcattgccgcaagctgcttggcgttggtcgcctctgccatgttgcgttcgatgaccgcgagtttctcctcggcggacgccaggtccgacgtcaccttccgcaattcgaggacatgcgaaggctcgacagcagccagcgaagcgagtttggcttccagttttgccttgagcgcgcttctcgcctccggatccagaaactgctgccggattgctgcgagcccgacctgggcggcctgggcccccggaatccgattgtggcgacattcagctccgtcagactgctgatacagaccacaccggtagaagtaccggtcgccatcagccgcccggtacatcggccagcggcatgccatatcgaagatccgggccccgagcggattcttctccggatcgcgcgagcgcggcttgccgcgctggcttccggcccgcttatccagaatcgcgtccaagcgatctgcctgctccttcggaaacaacggttcaaaggcggccggagcgctgatccgctcctccacgggaacctggcagactttgggctggccgtccgcgcgccggtcttcctcttcaaccggccgcggtccgctcggcgtcatccgccgacggtcgcccatggcccggcgaccaaatatcacaatcgctcgggagagcggattcctggcgatgttggtaatcgttgtctggtgccaaacgcctctgacttggtgcgggattccgttgtcatgccgcgtccgccccgcatccggcgctggaatcccctccgcggtcagaacctttgcgacccgcagcgccggcatcgtctccaacatgctggcgatgcgaagaatcaggccgatctcctccggggggcctggccgccattccacatggtgtcctgcctgtcgcaccttctcgccgtctacaagctgccgtacctcgttgcccgcttcgtcaaccaagaagcggcggtagccgaacggggggcggccgccggtcgaatgccccttctgggccagggcaagcttggcccagatcatccgttccgagtgatcgtctcgaaacttcccgctcgcgtcgtactcgaccagggccgtgatctgatcgccgatattctcgcggactccccgcttgagcggaggcagactacgctcttggaagaccaacgtgattccagccgtccgcagtcgatgttcgagttcgactccttcggctggacgatccggtcgggccaagcgatcgcggcggggaatgaagacatgagagatccccgcgtcacgctcaatctccgcgaacagggaatcaaggccatcgcgcttgaggacgtttcccgagacacagttgtcaaagaaaacgtcgccccggcggcactgccctcgctcgatgagggatcggatcacttcgggggttccgttgaacttcaaacccaaggcgcgcgccttggccgcagcccactcgacatacttgccgggggtcatctcatgctggccgccgctgtcccgtgagtagaacagcgctcggccagcagctggtctgctgagctttttcgacaatgttcagatctcccgggtctgttgaagcaagaagcctgcgatggcatcgatcaagtcgtcggtgaggtcgacgttgatcgccgtcttgaaacgaagcgagtcgtcctccgtgttccaaaggatgtcgtttctcagaacacacaacatgtgtgctcccagctcgtaagcggtgttcttcagttcgaacgtcttcaattcgcgcgccagttcgtgcattacctccgatgaggacggaagcccagcgtcaatgtggcatgggattccacgctcttcccagagccgaaaacgaagcatcacagccagccggagatagatctccgcgggaatggagaaggtcttggtgaccgtcccagggggcaggacccggtggaggtaagtcaccatggcgtcgacgtcctgccgtgccagagcttcgacggccttttcaaagccatctgacgccggggttgcaggaatcgtggaagggctcacgtggccgctccgttgaatgaagtgtgatccctctttttgccctcgccagcggaagtcgagaaccccaagtcgaccaattttgacggatctcacgaaacttgatcggcccccctttggtccccgctctccacgcccgttcgggtggcccgtgatggaagggccggagacttggtccccgaagggatgaactgcatggcgatcaggcggcccacctgtctagcgaattctgcagcctcggggctcagctggccctcgtcagatttcgagcggttctctcgttcagacacattctactccttgtgtgtaggaggggccgtcgaagataacggtttcccctccaaggagttatgacgcgattacgcccgaagtttaggcaccgccggcagtgtcgctgaggagggactgcatcgagtggacggtgaggcagaagtgtcgattccgcggaggcgtctggaaccggttgcttctcggtcacaacgttgggcagcacttggccactgatccgactgggcgactgccatgtgtctgcgccttctcgagcgggtgagtttgggagactgccccccagggggcgcgagcagatttcatacagcagcgacgttacggatcagcaagacgctttgggccggcacgggacttcggagggccccctgccttcatcacaactgaggagctacgccgtgatcaccaatcgccttcccctttcttctgagcctgtgtcccctattccagtactcatgttgcatcggttgagcacggtaattcactccggctcggaagtgctggatggctttgcagaactcgaggaattgacgcgccgttacgaaagcggccgtttggcattccaccgccggcttcaccggggtacgtcgttcggccccgaatacctcccttgggagcagagacttcccgaactcaacgatgtcgagatcgtgtccattgaggggccgtcccgcgttacgcgttcggtggtggactttcagtcgttcgtggaatgcctggaacggctggacttcggcttctctctatgtcgcctgtgcctcgctccatcgacgacaatgacgattctccgtcgtggtaaaacagcagagcatccacatgggccggccccttgcttcccacatcgaattcgcatcggggctatcgggctggaactcttcaccattccactccggcccatcgcatcgcctcttgctgacaagcgcgagagttcgaacctcgaactaaattcgagagaacaatgaggttgattgggcgcagaacgacttgtcccatcggagtgtctcgcaccggatcacgaatcgcgatcgcagcatcacgcgcttgcggatctgtcgtggggtaaaggattgctgctgtcccgtctgctccacccccaatcgcgtagaccgcaagctggtagagcatgtgggtcggaaggggactgttccagaggtctcgatacttggcatccagcaaacggactacacgccctcggcgtaggatggcgagatcgggacgaggcgttgggctttgtcggttgcggggattcttctcccggacataggacatcatccccttcagccggtgttcgaactcgacctcgtacccggccaagtgctcctgcagaaatctcgacagaatggtctgaaagaaccgattcatgtcaaagaggaagccgttgatccgaatggtttcgttctcttccgagagggagagtcctgctccatgggccaacaatcggatcagttcgacggccgtctcgtatgcgcgtgtttgacggcttcgaccccgttcccattcctccatgaggggccgattcaggggaacgagcgtcacggcatcgcccatcatgctcatgagacgccgcatcttgctccgcagttccacgcttgtcgcaagcgatgctgccagtttcagtcccgcccgcagcagttgattcggagcccagtccgccaagcgtgggaagtgcgtgcaatgtagctttgcagatgtctgcgcggcccgagcatacgtcgccagatcaatccggccgcggggactcgacagccattcggtctgtcgagagtaacagcgaatgaggccgctcttgagcaagttctctgcttcgcgagcaagttgctccacgagaaggtcctgaaacgaatcgtcctcggtggagaagggcgtcgacatgagtcgggccatccgcgtcccgccgcaggcatatcgcaacagggccatcagtggcgtccgggggatcttcgggtcgatggtcacttcgacgcttccgaacgacacccggccgacgaatgcgaacgatcgaattcgggtcccctcccgaagctcgtcgacttcaagcatcgggccgacatgcagggcggcaatagagcgggctgccaacggcgtatcagagacaaagactccctcgagcctcgatccacgaataggccgggcctcatcccactcggtcaggcgaaggcgaattggggagctcactgcggctctccgtcgttgtcgtcgacttccgacgattcggtctcgtcggcttcgagtgcctccttcgacgccacaacgtccgggcagaacgccagaagggcgtggatcagatcggccttccgctcagcgtcaaacacttcgtgccgaacctgctgcttctctacatcgaccaaacctgcctgcaggatgttctggagcacttcaaaatcctcgtaacagtactcctcaagcagagggatgatgtcgtcttgaacgatccgagagagcctggtgaatgtgttaatgggcttcccgccttcgaggaggtaggaatggccgatctgaagattgcgggcgtcgcggccgatgtgcctgcagatgcgcgcgttcaattcttgcaaccaaggcgcgagcgggatcccctcaatgacagtgtcgcgcagtgtgtcataggccggcatcaattccacgaatccgaaccgccgccgcagggcagtgtccagcaacgcgatcgagcggtcggccgtgttcatcgttccaatcaatcggacattcggaggaaccgagaaggccgaacgtgacattggcagcaagacctgcaaccccctccggctcttctctaagagcagcagtaactctccgaatatcctcggaatgtctccgcggttaatctcgtcgacgatgagataaaacatccgcttgggagcctgcgccgcctcttcgcacagccgacgaaagatacccggcttcaccacaaacccgagcggtccatccgagccgcggggctgcaacccctcgatgaagtcttcatagccgtatgcagggtggaaacaacagaagcggacgagtccggactgctccccctctccatcgacctcgcgccgctgttccggagtcaggtcctcgtacgtcattccaaacgcgtcgcgggccgctagctctcgcgcagttgactccgcccaatgcgtctttccggtccccggaggcccgtacagaatgacttgccctttgcgctcgagagtcgactgaatccgcgcccgagtcccagtcaactcgggaagcggcggcgggatgggggcaactgttccacctccagcgaggagctttcgctccaattcgacgatcgtcttcgaatatttgtccagtgaagttacggaacggcgcagacccgccggatccgtcatcttccactcgtcgagactctgccaggttgccttacggcggttggggaatggttgcccttcagcatgaaagtagtctccctcaacgcgggcgattcccagcacagtcgcaccatccattaccgcaacaatgtcccggggggccattttgctgatgaacatccacagctgcccggcttcgttgccgatctgaggggcccccttctcatacgcggctgcaaggaggggtttcagctgctcgcctccgccggatccgctgcggaatccggagagatccccaagcttgccccagcccaccgcgacaacattctcgtcacgcatcatctcccagcggctgcgtggctcgctgccctcgcttgatccaatccgccaatatcggaagggagagccgttccggcgatatagggcggccgtcgtctgaaacatcgaagtctggagctcccgcatcaattgcacaaagtgccaggtgcagacgtatcggcctttctcctccgggggcgtcatcagcagtcggtgcaagtgaaattgctggtgttcgacgctgtggatatcgtcgatctttgttgtaaataggagactcaagtatttgtgcgtccaccccaactgagcgacgtctggagccgcctcgttgattgatcgctgcaactcgagatacgaggagagcggggagtcgacaggaagcgagtccatcagctgcacgcacgccagcaactggtcgcgctgccgacggacataggcaattgcgtcagctcgtgaaagcacagtctgcttctgtgccgatcctgtgacccactcgccgttctccttgcgctggaagatgccgaacttgagagcgcttccgcccccgatccctccgaagataccgggaaactcggcgtcgtccttgaactccagccagtacatcagggagccatgcgcatcggatcgcccgtgcatccgctccagaagcgcatcgccatcgagcgagcccagttgctgcgggccgaagcgatcccgaaaggtggcgaagtacgcgtccagttgctccgccgaaggaatctcgcgggagtcggctacctcgccgaggcatgtacggacctgctccaagacccgttgatcaaacatttccttagaagctcctgctcccaaacccagatcgcgcgacccgctcgacacgaaatcggcctcagtccgcgttcatacttgcctcgaccgaacgcatccacactctagccaatcgtcacctcggctgcattcactcattgacgcatgggccgtcagtagcgagatgcaatgtgcggcaaggccgaagcgacgctcgcacgtttcgcttcaattccgagatcgttgcgcgaatccctctcgccgagtaaatttcacgcttcacttgtcgggctgcggcgaccaagctgcatcgtgacgcagtcgcggaaatgggcgcgcggtgcgcaagaaaaagggactggtccaagaccagtcccacggattgaaccgtacgcgccataagccttactgtgacagggaggcaaacgtcgctcggatacactgccgatattcttccgtcgcttgccaccaaaggcaacggtggtagtctgaaaatgtggccgggcaattcgccgtttcgcctttgcgagtcaatctcgctctccggctgcactttgaaaccaggacatttcgtcatgcgctaccgactcggactcgacctcggtgtgagctcgctcggttgggcggtcatccagctctcgaaggggaacaccccaaagccggtcaagctggtcgcaacgggcgttcggatcttcgaagccggagttgagggggacgtcgaacaaggcaaagacagctcgcgaggagcagaacgccgtaacgcgcgccagcccaggcgtcagcactggcggaagcagcatcgcaagcgaaaccttttcgtctggcttcagcagatcgggctgctgcccaagaccgtcccctaccctccggagtcgatggatggcaaacggggcgcgctgtcggacgtccgcgaccaggagatcaaggccctcgatgcgcagctcggaaagaagcatctcccacaagagttcgaacatggcgaccgggacgccctgatcgcctatcagaagctcccgtacattctgcgagcgaagggggccgacggagagacgctcgatccgttcgagctcggtcgggcgctctatcatctggttcagcgtcgaggttttgccagcaaccgtaaaggaaaacgagacgcggacgaagagggcaaggttgccggcgggatcaaggcgaccaacgaggcccgcggtgaccggactctagcccagtacgttcgcgactcgttcacgctccgccagggccggttcggattcgagaacgatgccggtcacttcggagtcgagaacgaacaggacaaaagcggtcaggtcgtcaaacggtacaccgctcgcgaaatgtaccgggacgagttcagggccattcgcgcggcccaagcccctctccatccgcggatcccggaatccgactgggaccgcattcaacggatcctcttcttccagcgtccgctcaaatcacacagccggctcatcggccgctgctcgctcgaaccggatcgtcgccgctgcacgatcgccatcccgctgttccaggagttccgcgttcttcaggcggtcaaccatttgcaagcggtcattccgggccaggggaaacgctgcctggccgacgaggagcgccagatcgtcctcggtgctctgcagaaccaaggcgagatggccctgtcgaaagtccgcacgctcttgaagctgcccaaagggacgacgttcacgcagcagggcttcggtgaggaagaggaccagaagctcattggccaccgcaccaacgccaagctcgctccgatcttcggcggggagcaatgggaagggctttcggatgacgaacgggagcgagttgccctcgaagtcctgcactatcgcaagccccaggcgctccagcggcgagcgaaagccaagtggaatctctccgacgagcaagcgaagaggctggccgacgcgtcgctggaggagggctacggcagcctatcgcggcaggccctcgaaaaacttctgccgctgatgcgaaatggcgcgccctatgccaccgcccgtctggcggcctatcccgcctcgctccaagcgggcacggctcatgacaagctcccgccggtccatcactggaaccgggacatccgcaatccggccgtcattcgcgccctgaccgagctgcgaaaagtcgtcaacgctctgatcgacaactacggcaagcccgagcaggtgttcatcgagctcgcccgcgagctcaagaactcgcgcgatcgccgcaagcagctctggaaggacaacgaagacaaccgcaagcgccgcgagcgggccgccgacgagatcgtcgctcagctcaagaacatcccccgcccctcccgcgccgatatcgagaaatggatgctcgccgtcgagtgcgactggacctgcccctacactggccagcggattgacgcccagtcgctcctggggccgcatcccaagttcgacgtcgagcacatcttcccccgccggtatctcgacgattccttcggcaacaagacgctgtgctttgtcgacttcaaccgccatcagaagaaggaccgtctcccgatcgactgtctgagcccggacgagtacgagaagacgctccagcgcgttcgggcgttcaaaggcccgcacgccgaacggaagctcgagcgcttcgagatgcccgccgtccccgaagggttcgtgacgcggcatctcaacgacacgcggtacaactcgcgtctggcggcgcagtatctcggcacgctctttggcggccgaaacgaccaggagcagacgcagcggatcgtcacgccgaccggtggcctgacctggatgctccgccgcggctggcatctcgaccgggtgctcagcgaaaacgacgagaagaaccgtgaggaccaccgtcaccacgccatcgacgccctgatcgtcgccctctcatcgcaggaccgcatccagaagctcgcaagtctggcggaagaaggggcccgtcccggcggacgcttcaacgccttcctcgatggcctcgagcagccgtgggactcgttcctcgacgaagcccgtcagtgcatcggcagcctgtacgtctcgcaccgtccgacccgcaccctcgccggtccgctccacgcggagacaaactattcgaagccattccaggtcggggatggcaagaaggcgaagccggagttccgcatccgcaagtcgctcgaccggctgaccgaaaaggagatcgttggcgaacagatcgtcgacgcccgcgtccgcctcgcggtccagcagaagtaccaggagctctgtgccgccgccgtcaacaagagcgacaaagtgccggccaagttctgggccgacaagaacggcaagcccgagaatttcccgatgctgaggaaggagaacggcagcggccccggcagcccgatcttcaaggtccgcctccgcaccgacagcaagccccgaacggttggccagggggccacccagcgtcagatcgccagcgggaaggactcgaactacgcctcaatggtctacacagttcttaatgaggagggccaggagctctactgggcccacgaagtcatcacgcggctcgacgcgcacctgacgctcaatgcgaaccggaagactccgggggagaaggtcctgatccccaagacgaccgagcagcttcagttcgcctggaaactgaagcccggccagacagtgaagttcctgttctccctgacgaagaacgacagcctgttgctgaccggtcctgacggcaaggatgccctctacagggttcagaaactttccgataacgaacttcagctgtgcgaacacacgcagctcaccattgccaatcccgatcgcaccacatggaaccgactgcagagcatcgactctctcagaaaacgcagcaccagaaaagtgcgagtctccccagttggggagataacttctcactgacccgctgagttcatcctcgtttgttcttgcattgagtcacccagcaaactcagacttgaaggtattgcggagccatagccgacatcggaggtccacatcgccatccccgggccgggccgatgcggaaccgtattctcgaaattgccgaatctcccgcgcgcctccgcgtcgaacggcaacagctcgtcgttcagcttcaggaagggaagctcacagcatcccgctcgacgacctcgccgttgtcatcgtcgctcatccgcaggtcagctacacccaagcggtcctcaccgagctcgttgctcacggcggaaccctcgtgacctgcgaccgcgcccgcatgccggtgggactgctccttccgctcgacgcccactccactcaaacggaacggttccgcgaacagttttcgctgccgctccctcgcgccaagcgactctggcagcagatcgtccgcggcaagatcgcaatgcaggcgggcctcctgacggagacccatgagaccgatgccgggctcgccgccctgcttccgctcgtccgctccggcgacccgaccaacgtcgaaggccgggcggcaagacgctactggactgccctgttcggcagcgacttccgccgtgaccgcgacgccgccgaccacaaccgccttttgaactacgggtacgccgtccttcgcgccgccacagcccgcgcgatctgcgccgccggcctgcatccatcggtcggactgcatcaccacaataagtacaacagctggtgtctggcggacgacgtcatggagccgtatcgcccgttcgtcgaccgggccgtcgttcaggtcgcatcgggacgagagtcgctggcggagttggaccgcgacatccgccagcaactcctcggtagcctgacccgccacgtccgcatccaccagcagatccgcacacttttcgacgcgctcactctcacggcccagtcgctcgcccaggcgatccaggaggccggtgcccaactcaagcttccggagggtttcgcggatgccccggagtgaacacgcgttttcgggatataaggtcgtgtggctgttcgcgatgttcgaccttcctgtggatgaccgggcggcgaagcgaaactacgttcgcttccgcaacctgctcctcgacaatggattctcgcagatgcagtactcggtctatgcccgttgctgcgacagtgagcagacagctgatgcccaccgcgataaaattgtccgcaagctcccccgcgacggccatgtccgtcttcttatggtgacagaccggcagtttggcaaaatggaggtctaccatggaaaaacgcgcgctgcccccgagccgcagcctcaacaattgcagcttttctgattggcggctgcggtcatctcgctgcagccgagaggattacgtcaaaggtagtgtatccgagcgacgcttccctccgagccacagcgacggacgtgattctgcgcagcgatcttttagtgtatccgagcgacgcttccctccgagccacagcatccgcagtgtccaccgggccggcaggtgcagtgtatccgagcgacgcttccctccgagccacagctatgtcggtgacgggcattcggagtatgtcagtgtatccgagcgacgcttccctccgagccacagcaactgaatcgcatcggaccgaactggaagaagtgtatccgagcgacgcttccctccgagccacagcttctccccgggcatagtcacaagacgaaatagtgtatccgagcgacgcttccctccgagccacagccatcgtagaactggaagtgcgttcgttcctagtgtatccgagcgacgcttccctccgagccacagcgacatcaggtggagggagttcttgtgcatcagtgtatccgagcgacgcttccctccgagccacagcgccacccacggcccaggagtcgccttcttcagtgtatccgagcgacgcttccctccgagccacagcacttcgaagatgttgcccccctccgcatccagtgtatccgagcgacgcttccctccgagccacagcacttcgggatcacggttgagaagcagtgggagtgtatccgagcgacgcttccctccgagccacagcgcggcgtagaggttcccgccgtggtcttggagtgtatccgagcgacgcttccctccgagccacagcgcaatgccccgcctctgccaaaccattgacagtgtatccgagcgacgcttccctccgagccacagcaagtagggcggtgatgtcacgacgcactgcagtgtatccgagcgacgcttccctccgagccacagcagttcgagtcggtcgtaccgttcctcggccagtgtatccgagcgacgcttccctccgagccacagctgcagaggcggcggcgcttcacccggtcgtagtgtatccgagcgacgcttccctccgagccacagcttcggagaacgctgggcaggactggttccgagtgtatccgagcgacgcttccctccgagccacagccctccgcgttcccacactcgcagaagccaaggagcctccgagccacgcttccctccgagcagcaaagagaggataacgctcccgtgcgaactgagaagtgtatccaagccacttcgctccggggagctgcgggatgaggtcaaggctcaggggatccgagcgtcccttagaaccagggcacagcggcgggtgtattgagaaatcgcaacctcccagcggtgcacgctccgggattgtggtcgcgttctcggccccgtgttgcgggctgacggccgaactccgtggtataaatcaggagcgtgctgtcgagcagtccgcgggacttgagatcggtgagctaggaccaaggttcatagtccgctcaaagatggtgtcccctcgcgtctcgcatgaccagcctatcgtgtaattgcgatgtcggcctggccaggaagatcttgacaggcttcgtctcatcgaggaattgtcgtcacctcggccatgcgtttcagtgccgagcggaggcctgccgcggttccttcaagatccggctcgttctgtccgtgaatcttacgagctatcaagtgaacgatcctcggatgcaagtctcggaccgctaacaatcgcgtcgtcagctcctcggggcgagttccatcgagccagtcgatcgcactttgcgaggccaaggcgacgcctagtccggccgaggcaaagtccaggattgtctgccagccgccggtttcaatcaccacatccaccggttgtccggtgctccggtagatccactggtcgaactgctgccgccgggtcgcgtcgggctcgggaagaatgaacgggaggccgacgagatcccgggccgccgccgggcgatcggtcgggagctcgccccattgccgggcccatgtcgccttcggccgaggattggcggccaagaccaggcgatcttcaaaaagcgtctcgacgaagagctcggtccgcgctgtccggcgaatgatcgcgggggcctcggcgaccaccgccagatcgaatcgccccgccgccaccccctcgatccgcgctttcgcccgcgccgtcgacaggcgaatccgcgactccggctgctcctggagaaatcgttctacagcacctttcacaaaaccggccgccgcctgctggccgcacgcgagggagacttccggccgtgaggggaggctcccaccggcggcaaaagcctccacacgccggtactggcggattaggtccgccgccactcctcgcattctttccccttcggacgtcagcagccagcgtttccccttcagcagcaaccaggggggccgcgagccatccgcggtcagccgacgcagagccgccagccgcttcgagaccgtcggctgggagatctccagctggcgtcccgcggcagcggcgtccccgtcgtggtcggcgatcgccacgaacgtttcgagcagttcgagcggaagatgattcgggttcgacatccaatttgaccagtctcgcgattctttcagcttccaccttgctcgtccgatgggcggctcgtagtgtattccacaagtgaatcgaacggcaagaaatcaccaaaagagaattgttcttttccccaaggaatgactcccatgtccgagtaccccgttgtgtcgattggcgtggcgttgatgaagttcgatggtcggctggctctggcctggaacgagcgttggggggccttcgtgttgcccatgtcgaagctggacgccggccctccggcggagacgccggaagcggcggcggttcgcgcggcggccgaggtgttccggcttccggtgtgggtcgcgactggccagacggggcaggcggtccgccacacgtggcgtggcggggcggacgggcagctgaaggactatcagttcaccgtcgtgccggtggaggtccatcctgacttcgcggcggccgcggccgggagcgatcgcgtcgtgctggcggatgtcgacacgttgctgagagggaactaccacccgctctctccctcggtgaagccaatcctcaccgcctgtgtggagtggggctggctgccataggggatgtcgatccgttcgacagggggactgcggacaacgaggtgtggacatgcgtgtttctgagtcggccttggcgttgtttacccgttccacgcccgatgggacaacggcgtacctgacgcaatggaatgaacggtggcgggcgtattccttgatcggcggccaccggcggaagggagagacgttccgtgactgttgcgtgcgggaggtgacggaggagttgcggctgatgccggagattgacttccagatctccgaccggcccgtgacgacccggctcgaatacaaggcgttctcgaagtcggccggcgcggagacgcgatatgccttcgagctgttcagtggctggcttcgcgacgacgcggtggcgacaagagtcttggaggcgccggagaactgctgggtgagcgaggcggaggtccgcgccggacggacattgtccgggaaggcgatcgatgcgcaggtggctcgctccttggactggattgccggccgtgagtccgcggagtgacggtccgcactcgctcaaccccattgacgcccggctgccgtccgatgaggaacagttgtaagcaacggatgtccgctttgtggtacccgcgttgaggactcccccacaccacaccgccggctttgcaatcgccgcgggttggtgagggggcatcccgcacgttgtccgcgattggacaccaactccttccgatagttctcgacaggccaagcctccggaggccaagggggattcgctcccctgcacccgctgaccagagtgcccctggacccggttcgggcggcgatgaacgcttaacatgacgttcgagagctaacatgatcgtgatcagtgaatcgaacgaccgagggcgcaacatggctgtgcgagtgatcttctcgctcttggcgcaaaacaagctagagcgccgcgcagcacctctgttagcggaatgtcgcaatgcactggagccgttcctgagggacctgcgacagagaatcgagcttgtgtttccggacgcgagccatgtcgttgtccagcaggtctataagggattccggcagcagcaggacgatgaatgcatcttgggcgtcgaagtgacacagggagatcagaccaggccgatggtcgtcaagctgggaaagcgagcccatacgccgggaacaaggaaccccctcgcggaggagttcgaaaactggaacgtttgccggccggacggtgtccaccacgacttggtcctcatgggactcaaagccgcttaccacggtagcgacctgatcgccctgatctacgaagacgcgcagcagatgatcggcgtcgagcagacagtcccgctcgaagaagccctcctggcgtgcgttcgcgtgggcgaaccgactgctcagtccttggccagcctgctgttcgagttatacgaacggctgggccgcctcctgtactcccactcctttgacgacgatcccaagacatggcgcgacgaagttcgagagccccggatcgatcgccatctggtccgcaatctgtcggactgggaggcgccggaagcgctccagctccgctgcgaagtgacgaccgagctggagcaccctcgctggaaggaccagttccacgatccggtctaccagctccgttacctgatggaccactggggggagcggccgtttccgcggctgctgcgcgggcgggggcatggcgatctgcacggccgcaacattctggtcggccgtgtcgaagacctggtcctgtggcccgccgtcttcgactacggaaacttgggggcgaacaacctcatcgcctgggacttcgtgaaactggaaacagagttcaagatccgcgcctatccgcggctgttcgtccatgaccggtcgttctcccgggacgtcgtcgagtttgagacggctctgggagaaacgagccgcgcggcccacggccacttcgactggccccctcgggcggacctgccgacgcccgcggaccggctcaagtggcttctgctcaggatccggaacctcgccgcgcggcatctgagccagtcgaaccgaagccagttgtggcgggcggaatacgacttcgtcctctcggtctacggactcaacgcggtccgcttctccaacctgaaaccggtcgagcggaaaggggcatacctctcggccggatgcgccgccgcacgctatgtcctgccgccgaggagtggaacggcatgaagatcccaacctatcgagacgtcatcgcggaagcccgcctctaccggcaggactccgttcccgagcagctgctgcgggccgaggagatcctcctccgagggttggcggaccatccttacgcactgccgatcgccgacgaactggcgcatgtcctcgagctgcaggggcgcgacgatgaggccatgcggctactgacggaccagaaacgccgcttcggcggaagcgaggagacgttgtgccgcttcggcaagctctacaagaaacgcgccgcccgcctccgcgtcaccagcccccctcgggcgctggcgagcctgcaggaggctgaggaagcctaccggcacgcctacgagctctcgcactccttctatccgcgaatcaatcagcttacgatgcggttccttcgcgcgtcgttgcgggtcacgctcgccccgctctccgagagccaaccgcttctgcgtgaggtccgggaggacgccgtcctcctgttgcaagagccagccatctggcggcctcgtctcgacgacgacaacgtctggatccccgccatggaaggggagacgcatctcctggtggggaactggccgaacgctcgatccgcctatgaggaggcgctccgcgcagcagacggacgcgaatactacctttcccggatgtgcgcgcaggtggaacttctgcgggacggctatcgagatctggcgatcaacgtggggagtccctttgacgatccgagactatttttcggccttccccccgaaggaggagtgagtcagcccctccgcctcaaggcgccgctcgtcgtcgagacgggcctcgccgccaagctacagcccaactcgtctgtcctccccggtgtggagtcgtccgagatccacgtctccactgggctccaggcggcggcaacccggctcgtcgcacatcaattgtggccgtacgctccgcgccgcgagtcggaagtggcccattatgttcttgtcggctttggagcgacggggcaggccctggcagtcgagctcggccggctcggccattttccgaaccgccgccgcagccgactcacaattgcggacgtcgatatcgaatcctcggcgagagcgtttctggcccggttctgccgtttcacctcctgggacggggcgacgatcggtgtttcggccttcctcccggaagcggacgactggagctggaaccgtcatccgcttccggacggaatccgcatcgccggaggcgaagcggtccagtatgtcacgaactcccgcttcgtccaactcgcctccgcacgcctggatgaacggttcgcccgccagcttgtcgatgagtttgcggaggaggcggtccggcctgttgtgatcgtttgcggtcaggaggaccgcgcgaacttcgagacggcgatccagctccgcgaactgctgacgaacctgggatgccggaagccggtccccctctttgtctggttgccgcggcagccggagttggcggccacgctcgaccgggacaagaacctgtttcccttcggggcgatccaggaagtccccagcgacggcgatgccatcgcgttctcccgggaagcgatcgggaagcacacgcacgaagaatacgtgcgccagaaccccaggctctccgacgtggcccccgtaccctggcagcgattgtcggagaagaccaaagagtccaatcgctccgccgccgaccacctcgcgatcaagctcgccgcggtggccgactttaagagccacgagggggtttcggccgggacggaagcaccaggcgttggcgaagggactcgggaggaactggtcctggcagagatggagcacaaccgatggatggcggaacggctgctggccggctggaggtacggtccgtcgggagtcgacgaccaggaacgggccaaccagaaggcgcgcggcttgagtccggtgatcgtcccctggcacatcctaccgcgggatgagaagctcaaggacatccaacaggttcgtgccgcgctcaagaccgcggccggggcgattccgcttcgtgccgcgtcccctcaccgttgaacggagcgtttttcaagctggggagagtggctgtggtgtcccgcggtccagaggaaggagctctccgggagccacgggacgcctgggatcccggcggccatcgcacacgagaattcagcgattgccaccgtgccggcgagtgcgtcggccgagtcgtggagaggactcgaacaccgtactccgctgtattcgtccctccgaccacgaatcgtcgagcggccccccgcaggagtgacgacagagtctgccagtcgtaagatggctcacgcggagaaggggcctcgcgtggcgggtgagaatcaacggcgccagccggacgcgatacggggtactggccagcctacaatacgtttcacgttggcgtacgggccgaaagaatcttgcggggcacatgtgagcggattgttctcactcgaattgttgacgagcagaggacctctgcaattgacacggaatgctgctcgctacttttctgcgcagtgcgggggcctgcaggacgagaacggacaggtgagggccagactcgaatacgccaagccggaataacgaaccacgacaatccatctctccgcgggggactgaccgcggtgcttgggggaaacctggacacatgcagccgccaaagacgctgaagtactttgccttcatcagctacagccacagggatgcagcgaccgcagcgtggctgcaccgctctctggagacgtaccgcgttccccggaacttcgtcggggcgaccggtcgcggcggccccattccggcccggttgtttcccatcttccgggacaccgaggagatccccactagctccgatctggaccaggtcatccgacacgctctgcgggagtcggcggccctgatcgtgatctgctcgcccgcggcggccgcctcgcggtgggtcaatgaagaggtgcggctcttcaagcagctgtatcccgagcgcccggtcctccccctgatcgcggcgggcgagcccaatgtctcggacaagaaccgcgcctcgttgaaggagtgctttcccccggcactacggcatccggtcagcccagcgggtaagctcatcgagacgcggcgggtcgagccgatcggggccgatatccgctcccacgcggataccaaagccacggcgctgatgcggctcgtcgcggggctgaccggcttggccttcgacagcctccgccagcgggatcgtcaacggaggcggaaacagcaatggaccgtcgggatcagcag

SEQ ID NO: 781 - DNA, 23219 bp, synthetic construct
  misc_feature 1..23219: note = Synthetic
  source 1..23219: mol_type = other DNA
tgatcggtggccagcggctggtcacgctgggcaatgccgacaacgtcgacacggtcgtgtgcctggacacggcgacgggagagcggatctgggatcacgcctatgccagcccgaccgacgcaaacgaattcgaaggcggtccgaccagcacgcccacgatcgaaggcgaccgagtctggacgctgtcccggcaaggggacctgttttgttttgacttggccggcggcgcggtgcagtggtcgatcaacgtggccgacgcggccgatgtgcggatcccgacctggggcttcgccggctcgcccctggtggtcgaagacgcgttgatcctgaacgtgggcgacgccggggtggccgtggacaaggccaccggggccgtgctctggtccagcgacgacaaggacgccggttacgcgacgccggtgcctcggacgacggcctcgggcaccgaagtggtcatcggatcgggccgctccttcgtcggcgtcgacgcggccaccggccggattcgctggcgacagcgttggctgacgaccttcggttgcaacgccgccgacccgatcctcgacggctcgcgcgtcctgctcagttcggcttacaaccgcggcgccgccctgctggacgtcgccggcgagcaagccgatacgctgtggaaacacaaagattttcagacgcagctcggcggcggcgttaaattgggccagtatgtttacgggatccacggcgacctggctcgtggcggccagctgcgctgtatccggtacgacgacggaacggtgcagtggagcgatgaccgggtcgagtacggcgcgctatcggccaccgaggaccacctgttggtgctcagccaggacggccagctgttggtgatcgaggccgcgcccgaggcctgccgggtcaaacaccacagccgcgtcctccgcggcaagtgctggactgccccggtgctctccggcggccagctgtactgccgcagcgccgacggccaactggtctgcctcgaggcgaattaatctgaattctcaattctcaattctcaattctcaaatctcaaatctcaaatctccattcaaagatctccgatgactctaccgagacgaacattcttgcaagcggctgcggcgaccggcgtgatgctgcaagcggctccggcggtgcgggctcagaacaaaggcaagacctaccgtacggcgttgatcggttcgggctggtggggcatgaacatcctgcgcgaagccttggccggcggcaacatcaaggtggtcgcgctgtgcgacgtcgatcgggacaagctggagattgctgccgaggaggtgtcggacctgacgggcgacacgccggccaccttcaccgacttccgcgaactgctcgatgagcgagagattgatatcgcgatcgtcgcgacccccgatcactggcacgcgctcaatacgatcgcggccatcgaagccggggcgcacgtgttcgtcgagaagccgaccggccatacgatcctggagagccgcgcgatgatcgaagcggcccgcgccaaccagcgcgtcgtccaggtcggactgcatcgtcggatgggaccgcactacgtgtcgggcatggagtttctgcggagcggccaagtgggtgacatcggcatggtgcggatgtttgtccacagccgcggcggtgccgagctgcccacgcgcaacagcgcccctcccgaacaactcgactgggacatgtactgcggtccggcaccgctgcggccgttctgccgcaagatccatcccggcgggtttcgccacttcctggatttcgccaacggcaccctgggcgactggggcgtgcactggctggaccagctgctgtggtggaccgacgagaagtacccgcgggagatctattcgaccggcggacgccccgtcaaaggcccgcccgtgctgaccgacaaagaacagaccaccgacgcgccggacagccagatcgcgacctaccagttcgaatccttcacggccacttgggaacaccgccagttcggcggcaccggcccggagaaaacgtccgtgggttgctacttctacggcaccggcggcatctttcacatgggctggcgagatggctggacgttctatccggcggacagcaaaaagccgatcgtccaccaggacgcccagcacaaacagcccgacggacacagcatcgacctgctgtgggccgatttcctgcaagccatcgaaagcggcaggcggcccacctgcgacgtccaggtcggacacgacgcgacgacgatgagcctgttgggcatgctgtcgctgaaactgggccgcagcgtccgctgggacggcgagcaggaacgcatcctcaatgaccctcaagccaacgcgctgctcaaacgcacctaccgcggcgactggcagtacccaagcgtgtgatcgcccagtggcataggcttccagcctgtgatcgcccagtggcataggcttccagcctgtgatcgcccagtggcataggcttccagcctgtgatcgcccagtggcataggcttccagcctgtgtttttcttcacaggctagaagcctatgccacgcatcgtagctcggctgtcccagctgagacgagtgagagcagggccccgaaaagtcatgcgacgttcacaggctggaagcctatgccacatgccgtcgctcagaaggcgacgtcgggcggcgtcacgccaccgccaccgggcggatcataatcgaagccgtcatcgaagccgtcatcgggcggattcatcggcggcaggatgatcgcgggcaactccggcaggaaagggctggtcacgcccggcggcacgacgccgccgtcgtcatcgcccagggctgcgagaccagccgccaatccggccacgcccaacaaaccgccaccgcccaaaccgccacctccgccgcctccgccgccaaatccgccgccgccgaatccacctccgccgaacccgccaccgccaaacggaccgccgccgaagggcgtaccggccgcaaaaccaccgtccccgccaccgagaaacggcgagtaagcctccagcagggttcgccgcagggtgtccaacatggccggcggaatcagcgggacgaacaggatgtcgctgaccccgtcggccgcgacttcgccgtcacgaaacgcaacggtccggatcgtcggtgcggctttggtcgccgccacgttgggttcgggcaacgggccgtcgccgctcggcacaacctcaaacgcaaacgcggcgtaacccagcgggccagcggccaccacgccgtacacgcccggccgaatgccggtcacttcgaagaagccttcgggcgtggtcggtgtgctctgaatgtattcgcccgcccggtacaccgtcacgttggtgccgctgtaatccaaaggcaaatccggatccaccatcgtgaacaccttgccgggcacccggccatcggcctgcatccgcacgcggtagtacagcgtgggcacggagttgtatcgcaggaacccggcgtactgctcgctgctgaacgatttggtcggtgcggcctggggcgtgtagcccgcggtgttcttcagcacctccgaggcgccgatccgcatgaccggcaagcgaaagggattcgccgcggcgacgagcggttcgtcggccggttcggcctgagcatccgcaccgtcctcggcggactcgccagcggccggggcacggccgagcggccgagcgtacacggccacggtggcgtgttggtcgggtccggtcacgacaatccccagcggtccctcgtcgacgttctcgaacgccacattgccctgggcgtcactgggcggctgctggcgagcgccgctgggcgtgatcagcgtcaccaacgaatcctcgagcccctgctgggcgtcctcgagcccgaaatcctgcagcttcagccgcagccgcgactgctccagttccacgaaaaaatcatccggcacctctttccgctcgccctgcaaaaatcccgccgggcgggtcgtcgcttgcggcggttcggcgcgtcccgtaccggcggttatggtcagcagtgcggcgaaagcaaacagcgggctcgccagcaacgggccggcgagcggtcggctcatcgttcgtcgatacttcatcggtgttggccttatcaggaagaggtcccggactgtggacgcgtcgacgtggcggggattcaaaatcccaaaagcgtccactccagcccccccagcataactgctagcaaacccgaaacaaagctacacagcgcaggaaaaataggcaaaacccgcaagctcgcccctcgctactcaaacgcacaggcgtcgtcggtcaggacgctggcctcgacgctcatcagcaacgcggcattgggcggatgccccacggttttgcaggctttcagatcgccttcggttccggcgaggaattgaaacgcggcctcgcgattgtcgctgactcgcagtccctcggcggtcagcgaggccgggcgagtggcctcgtctgaacggtcgacgaggactccgatatcgtgcccggcgatctcccctccgctccacaacgcttggccatcgatcaggtgcaagccgatcttcgaattgttctcgatggtccagcggtcggctcgcacgacgctccgagcgcccgaacagacgacgcctccggcgccgttatcggccacgcgtccggcttcgacctgcagcacggtatcgtccagccgcaaaccggtctcgcgagctcgttcgatgcggcagcggaccaaacgcagctggctttgggatttggtgtacacgcccatgtagcgcatcgaatcgatcaagcatccctcgaggctgacctgggcgtcctgcatggccagccccaccaggcaggaacgaaactggcaatcggtcgcttcgaggatgccttggcgcgtcaccgacaaacagggtcctgagccgtcttcggcgcggacgtcgcgaagcgtgacgcggccgccttgcgcttcgacgctgaccttacagcgcgacagcgttcctccgtcgacttcgatccaccccgcctcggccgctttgatgccggcttgtccgcagccctcccagcgacattcgcggatccgggtcggcgcgtctccggtgcgttcgcagtacacgccgtactggttattgcccagcaagcgactgttgcgaatcgtgccgccgcagccgatcagttcgatcgcggctccgtcggtgcaatcgcgaaacgtgctgtcgacgatctccaccgagcggctttgcacgcaggagacggccgaatcggccagggcggtcaactcgcaatcggtcaccgtcaaacggctatcgcgtcgcgccttgacgcagcagaacgtggcggcggtcaggcggcagtgggccagatcgaccgcgccgtcgcggatgtcgatcgtgttgaattcgtgctgacccgccacgccctgcccgtggaacgtcacgttctgaccgtccagctgcccgccatcgatcgtcgcgcacggtccggcccggctttcgatcacgacctgagctcggtcgtcgccgtcgccgcgcagccggaccgctttggtgatccgcaggctctcggaatagaacccgggagcgatcgtgatctgcccgccgctttccacccgcgaaagcgccgcggcgatcgtggcgaacacgccgggccgctgcggcgagacggcggccgggttgacgcgcaagtccgcccaatcgaccggctcgaccaacggcccgctcggcggcaccggccccggcgcaagcggaaccgagtccggggcaagcacgtctggatccggcgacagcgtggcggggtccggcgcaagcgtgactgcatccggcgcaagcgtggctgggtccggcggcagtggaagtggatcggcgggccgcggatttggactcgccggcggcggagcaggggagcccggcggcttgatacgcgagtcgtcgccccgttcggcttcaccgggcgccaaggcggctcgatcgcgttggccgaagcgcggagccaacgagaacgctccggcggccagcagaaccagcagcgaaccggagaaccaccacgtggctcgccgccggcgagccgcagcaaacggccgctcgaccgccgccggcggctgggcaagcgttgctggagacggcgtggctgcgggagacggcgcggcgggcccatcgccgggggcgaccggcggagccgccgatccggcgacgggcaaccgggggttctcggcggcgggtcccgcggcggtggcggagtcggcgcggccggtcgccagccgatcggccgccggtggcaacgttccgctggccagcgtctgcagggctcgggccgtaccggcgcggccggccgccagctgttcgagcacgacgtcgaggtggttggccagttcatcggccgaggcgtaccgctcgcggacctctttggcacagcagcgggagaagaccgcgtccagctcgggcggcacgtggctgcggcgttgggacagcggtttgggatcgcgctggcagatctcgcgcgtcaagcgttcgacgttcttggcggtaaacggcggacggccggcgatcaattcatacagcagcacgccggcggcccagatatcggtgcgtccgtccagccaatcggtatcgccgcgcacctgttcgggcgacatgtacagcggcgtcccggcgatctctccggcgcggccctcctgttcgtcttcgccgagagcgagtccgaagtcggcgatccagggccggccctgggggtccaacagaatgttttcgggcttcaggtcgcgatggatcatgccgtggcgatgggcgatcgacagcgcccgcgcgaccgcccggacgacgaggatagcggtctctagatccaggcccccgacgcgttcgagcaggttacgcagattgggtccatcgataaacttttgcaccacatagggcgacccgttatcggtcacatcgacgtggtacaccggcaccagcccgactccctcgatcatcgcggcccggcgagcttcatcgatgtactgttgccgcgagacgggcgaatccagcagcggcaccttgatggcgacctttcgctgcagccgcgagtcataggcctggtacaccacgccgaacgcgccccggcccagttcggaatcgatgcgaaacgcgcccagatactcgggcatcgcggccggctgcgttccggccgcactcccaccgacgctgtagtcatcgctgcgagccccctgcgtatcggcctcggaggtctcgtgcagatacgtcgcctgcagcgagtcctcggcttgctcacgtttttccgcttcggtttccaagcggcgagcggccgcgagcaggcgttggtgagcgatcgagcgatggatggcggggacagagtcgaggaaggcgtccaccgccggcgtctcgccggcccgccaagcgatctcaaagcgtttgacgacgcgttcgatcagcagcgcatcggcgaggatcgtaccttgaggtttcggttccatgaccgcccacgcctgggttcgagagggcaccggaagcagaagccttcattctaaccaccccaaagccaaccagtaacagtaacccaggcatccaaccagtaaaaccagtggcataggcttccagcctgtgaaaccagtggcataggcttccagcctgtgaaaccagcagcccaagcaaccagccagtaaaaccagcagcccaggcttccagcctgtgaaccagcagcccaagcaaccagccagtaaaaccagtggcataggcttccagcctgtgaaaccagtggcataggcttccagcctgtgaaaccagcagcccaggcaaccagccagtgaagacacccccgcacagcggcacatcaccaaaaaccgaacccgcggcgtcaccggcgccccggcccgtcgacgtattcgagaacgcattgctaatgcgagccgtttgggcgaacgctccggtttttgcggtgatgaaaccgaggctagcgtctaaacggctcaatcaatcgacagggccggtgaaccgccgggattgagctccatcttttcctcccctctcccccgcagcctggcgagctccagcgagtcaggctgcgggggagaggggtcagccagcgcacgaacaacaccaaacaccggagccaagccggactgaccaagccacaaaacacagaacccacaaaaagcggctctactcaaccgcccgcagcaaccccaagccgtagtggctggcgtaaccgagcgagatgggaacgcgatgtacaacttcggcaaatcgaatggtcaccccaaaggaccgctcgaacggcggctgcggcttggacgtttgccgtcgcaacacgaatcccttcatgcgccgctgcaccatttcctcggaagtccagaacccgatctccgtcggctccggcagaccgcgttcaaccaattcttcacggatctggttctctgcagtatgggacagcgccgtatagcaaatcatcacagaccggcgtattcggcagcggactttgcgaactgttaggtgaatcagtaagcgtatttctgagctgtgtattcgacagcggacgctgctaaccagtttcgccaattcgtctgctgtttctggatccatctgggtttatcgtgggtagagatcgagtccaccgcagcaggtgtagatcgctgtcttgaagttctccacgttccgatacccaccgacgcgacgcttgatcgacatgatcttgctgttcattccttcggcgaccgcgttggtgatcccgtgcgtgcagtagctgacaacattgggcagtcgctcccggatggtccgggcaacttgcttcatcggagtcaacttggtgtgaatgacccgcttgtaccagtccttgaagtaggcggtagctgagacagcgtcctcgtggtgccaaaggtctcgaagcttctctttgtaagcccacgccttacccgtcttgggctcctgagaatagatcgcttcaagccgctcttgctacgcgtccgtcagattctcctggccacttagccaaaactatcaagagcgagcaagccgattatcgccgtcagctataagtttgcggtgttcgcgacgccgaaccttgtcgaccgcctcactggctagcttcatcacgtggaagcgatcgtgaacaatcttctcgtcggcaaacgctgtattcgtttttgcggatctgacgtacgccgcactcatgtccatcgcgatcgcttcgacgccatcacgctgttcctgcgaaagctgcgaaaaacaatggcctgcgtttttggtgtcgtttccatcggagatcgcttcgagagggctgttgtccaagtcataaagcaaggtgacgtaagcctgtcccttacgaaaagccttttcatcgatcccgattcgaggcatcatctcgttgacctttcgggccttgccgcgagcgaccgcttcttgaaggatatgcaggtctcatcccagctagtcctcagcaccttctgggcgtctttaatcgcctgagccgcatcgaggacgtcgatagcgaagcgttcaaagagcatcgtgaatcggctccctttttcggcccatggcaagagagcgttcttgacgccgtgggcggggcacttcacacgagggggcgctgcgatcagcacggtcttgaattgacaggagtccgggtgcctccagcgacgctcatcggcgtggtcatgcaggggacactcgtcgccacattcagggcagcaaaacttcgtgccacgagggtgttcaacgcgcacccggacttcttcggcttcgtgattgagttgcacttcagtgacggtccagggcaacgcaattcccaggatctgctgatacagttctttgtcttgcaaggtggttctccttgggggagaatcctaccaaatccacgaagtttgcggatggaccaaaaaaaagccgtcccaaggacggccagacggattaaaccgttcgtgtatgaaaccttactgtaacaggaaggaatcgtcactcagatacactaccgctagtataacgagtatactggtcccgtcaacagcatttcatttcgacaaaaggggtagtcgtgggatcgtcgtttcgctacgtgcttggacttgatctcggagtttcgtcggccggctgggccattctcgaattggactcaaaaaacggttctcaaacagcagtcgcgattcgagacgccggcgtccgaatttttgacgccggcgtcgaaggcgacgtcgaacaaggcaaggacagctcgcgagcgactgtacgtcgccaagctcgccaacctcgtcgtcaacactggcgtcggcagtttcgaaaaaagaagctgtttaaggagttacaacaacacgggctgcttcccgaatcaagttccgccgaagccgccgagcgcaagaaaacgctcgacgccgtcgacgcagaactaatccgcaaacatgttcttgactctaacacatccgacgtcgacaaacacctcgcgcaacagcggcttccctatctgctgcgggccaaagccctggacggtccgctcaatcctcatgaactgggtcgagccctctacagcctcgcacaacgtcgcggctacaaatcgaatcgcaaggctgatattgacgacgacactgacggcgaagtggcacaatccatcgaagccgtctccgcagccgcagtagggcaaacgctgggtcagttttttgctcgcgaagtcaatccgttcgataaccgcgtcaatggcgaaggcaaaccggacgccgccagcgggcgttttcgtcgccgctacaccgcccgcgacatgttcaccgacgaattcgaccgcatccgcgtcgcgcagtcacctcaccatcaactgtccgatgctgactgggaacgcgtccgccagatcattttctttcagcgtccactgaaatcgcaaaaacgactcatcggaaagtgctccctcgagccttcgaagcggcgttgcgctgaagcattgccaatctttcaggagtttcggattctgcagcaggtcaaccatctccgcgtccgcgactccaacggcctcgaacgccccttggacgaacgggaacgcgagcttttgatcgacgcgttacagacgcagggatcaatgtcgatgaagagcagagcgaaaacgttgctcggaatcccaaaaccgagcgtgttcacgatggaggaatgggatgacaaattgatcgggcatcgcacaaaccagcagatgctcaatgcgttcggtgatcgttggtttgaattcagtgacgaagaacgtcacgcgattgtttcggatgtgttgttctatcgtcatcgtaaccgcttgaaacaacgagcccgcaacgcatggggcctggatcccgagcatgccgagatcctcgctgggctccatttagaggaaggctatgcgaatttgtcggcacttgcgataaaaaagctactgcctgctatgcgagatggcttggccttttccgaagcccgcgagcaggtctatggcgacagttttaaagccggcgaggccttcgatcgcttgccgcccgttgtgcagtggaacaaggatattcgaaatcccgccgtcatgcgggcgttgaccgaaatgcgaaaggtcgtcaacgcactgatcgaccgatacggcaaacccgatctcattcgaatcgagttggcccgcgatctgaaaaattcgcgtgatggccgaaagagactctgggccaacagtcgcgacaaccaaaagcgacgcgaaaaagccaaagaggggatgctggcggaactcgggattggctaccccagccgaattgatattcagcgatggatgctcggtgtcgaatgcaatcgacaatgcccgtactgcggaaccaactttagcggcagcgaaatcgtcggcaagtcaggcaatgtcaatatcgaacacatatacccgcggcgctatctcgacaattcgtttacgaacaagacgttagcctgccgtcgctgcaatgatcgcaaaggcgacaaactgcccacggaaacattcacgaacgaagagctagcgttaattatcgagcgagtcaaagcattcaagggcccccatcgagtccgaaagttgcagcggatgcaggcaaccgaagtccctgaagatttcgtcagccgtgaccttaacgacacccgttatttttcacggctggccaccgagtacgtcggcattttatacggcggacatgtcgacgcattgggccgacgccgcgtctacacgcccacaggcggattaaccgcgttgatccgtcgcggttgggggctgaacgcggtccttagtgacgcgaacgaaaagaatcgcaacgaccatcggcaccatgccgtcgacgccatcatcgttgccctttcgactcaagatcgagtacatgatctcagccgttccgcatctcaggccgatagccaccagcagcgcgacaccgcgttccttaaacacttcgaagtgccatggccggggtttgtcgacgaagtccgcaggactattgaaaacattctcgtttcacatcgtccaacccgcaccatgggcggccgaatgcatgcggagtcgatctacagcataccgcactacgtcggcggcaagaaagaattccggatccgcaaagaactgaagaaattgactgaaaaagaaatcaacggcgatcaaatcgccgatccgggtgtgcgtgaagccgtccagcaaagatgggccaagatcaaggcggaaaacgcaaaggcaatacctgcgcaggtttggagcgacccgcgaacccagcagaacaactttccacgccttcgaagtcgagcaacaggcaagttcgatggcacgccgattttcaaggttcggatgcgggtcagagtcaaaccccgatccatcggaaaaggtgtacgcgaacgcaatgtcgccagcggcaaagacacaaatttcgcatgcctgatctatggcgttatgggcaaagacggcaatgaaaagaagtgggagcacgaggtaattgatcgccagaccgcctatcagcgcctcgctaattcgccgcgccgccacggagaacgaattctggttcccgatgaacaaggcgggagacgtcgcttccagttcgccatccgcaagaacgactgcctcgaacttgacgacgagaatggagaccgagcaatctatcgagtagtcaatatatctgcagatgagattcagctgtcaccgcttaatcttcctcgagtcgaaaaagaggacaggaacaaatggaatagagtaaggagcactaccgacctgaaatcgcggaacgcaagaccggtcgaaatcacaccagcaggtcaggtctcagaaattgattaattcggaatttattcttttggttcacatcctgcccttcgccctgcattgctgccgtggaaagtcagtttgcaattcgttaaggtcgtcggaagatgccctttcaaccccacggaggcagaactctagccttggcataagccagcggtcatcgcttgaactaactgccttctttccatctttgcatttctatcgaagtcatattaggctagctttcggagcaagccatgagaaatcgcatcatcgaaattgccgagcaccctgctggccttagtatccgacatcggcagcttatcatcgattcgcagggtcgggagacccacgttccagtcgacgatatttcggcagtcatcgtcgcccatccgcaggtccgctacacccaagcggtcatttcctcagtcaccgaatcgggcggaatggtaattacttgcgatgctaatcggatgcccagtgcgatgctgctgccactgagtggcaacacattacaagcggaacgtttccaactacaactgagcctaacccgcccgcagcaaaagcgaatgtggcaacaactcatccgccgcaagattgatgctcaagccgccgtcctgcgtgaatgccatggacaagactccgggctgtcgatgctcgcacgtcaagttaaatcgggcgacccgcaaaacgtcgagtccaccgccgctcaacggtactggccgcgtctgttcggggccgcattccgccgtgatcgcgatgcgcccgggctgaatcagtatctcaactatggttacgccgtcctgcgatccatggtcgctcgtggaatcgctggcagtggactacacccttccatcggcattcatcaccacaataaatacaacccgttttgcctagcggatgacttgatggagcccttccgtccgctcgtcgatcgccaagtctttcgactcagttgcgacctaaagccgagcagcaatctcgacagaacgacgcggatcaaacttattgagattttgcagacgcgactaatgcttggtggccgcaacatttccttgttcgatgctctcagcgcattgaccgcttcagtggtccgcgtcgctgagggcgatcgatctccacttgcgatctatgacggatgggtgtgatcgatgcgagctgagccgatttcggagtttattgccatgtggttggttaccatgttcgacttgccagtcaccagcaaacgacaccggcgcaactacactcgcttccgaaaccgactgcttgactacggttttgatcgcttacaattcagcgtctacgcgcgattttgcggcagcgaggcccggggcacacagatccagcgtcaaattgaggctgaaatgcccacagaggggtatatccgctttttgatggttaccgaccgccaattcgccaaaatgtcctcctttcacaaggcaattctgcaggacaatgagcagaagcccgcacaaatcctacttttctaaaacgccagtttcccttaagtccttgacgctagtacgtttgcgtcaggcgtagtgtatccgagtgacgcttccttacgagccacagcccaccacgccgcggcatgtacgagcggtagtgtatccgagtgacgcttccttacgagccacagcatagccagtcgaggatgggtcgttctccgtagtgtatccgagtgacgcttccttacgagccacagctggtccgggtgccggagcgtcaccgctgtcagtgtatccgagtgacgcttccttacgagccacagcggaaagcgaccgtgcgaagtgccgcggcgcagtgtatccgagtgacgcttccttacgagccacagcagagcaaaccgcaaagatgaaaggtgaacgagtgtatccgagtgacgcttccttacgagccacagcggccttgacgtcgacttgaacgccaacgccagtgtatccgagtgacgcttccttacgagccacagcgttgtcaataatcccagtcgtcgcagcggcagtgtatccgagtgacgcttccttacgagccacagcaacttctgtagcgactctgtgatctgctttagtgtatccgagtgacgcttccttacgagccacagcaaatcaaatcgtgcagtaaactcatctcctagtgtatccgagtgacgcttccttacgagccacagcgaacgccttgaactggtacaggctcttgagagtgtatccgagtgacgcttccttacgagccacagccgggttcagttcggcttgcagtcgcttgttagtgtatccgagtgacgcttccttacgagccacagcgctggagcaactgataacgcttaaggcgttagtgtatccgagtgacgcttccttacgagccacagctagtcccctagtcgatccagtccgttgtgcagtgtatccgagtgacgcttccttacgagccacagcgtccccgatcgcgtcgacaatcgcatggtagtgtatccgagtgacgcttccttacgagccacagcttgctccggtggttagtggatttgctccggagtgtatccgagtgacgcttccttacgagccacagccaccgtaggggatcgacgacacaaggccgaagtgtatccgagtgacgcttccttacgagccacagctgctggcgttcctgccactgctgctcgatcagtgtatccgagtgacgcttccttacgagccacagcctcggacggtcgtatgcccaatccgcgcatcagtgtatccgagtgacgcttccttacgagccacagcgattcctggtgtgatcctcggctttggcttagtgtatccgagtgacgctcccgcctgtatgtcatttggcgactgaaacagtaccatctattggcgattcaaacggtgccagttcgtgaggccgtgcctggttgaggctcggtgatactgtttgacttaaacttcttcggtcgccgaaccggttgacgctttggtactgtttgaagtttttcccgggtttcccatgcggtagcttcgcccggtgacctgcatcacttcgctatggtccaagaaccgatccaggatcgccgtagcgctgggcacatcaccgatcagcttgccccattcctacagtggagggttgctcgtcaccatcgtgctgcgaacgtcgtgcctttcggggacatggctggaaactttccgcgaccttcgagtcgcggcctcattgaggctgaaatacggccgcctggtactaagctccattgaaacgccgaactgtgactcgtaaaccggcgggattgcttcgctgactttgccgatgtttttctacggcatccggcggcttcgctgcagggcatcgacgtcgcggagagtccggcgaattggtcgcatcgccggtcctgatctgtattccatcgtgacccgccgttttggttcgatgcgtcgagtttgcgctggacgtccgcaatacagtggtcgatgtacgctgtgagttccggccatcgctgcgcagcaacgcggtacgcggcaatcgacgcctgccacgcacccaatgcatcgagcttggacgcagcagcgatcgcatcgccagcgctctgccattaaaagcgatgatctgaaggagcggtggagcgttgggatgcccttacggcaggcagtagatgttctcgtaagcgaggtcgcccattatgtagcggtagtttgcaagttggtgatacagaaggcatccatcgcgcggccgccgacggatgaacaagcaaggttgcgcgcatgacgggttctcacggagctcacgaaggcacggagacgaagccggtgcccgcgagacagagcagcgccgaacgaaccaacgcggatgccgacaagtagctccaggcagaacggcccgccaaagccgaaccagcactcgtctattcgcgaccattcgcgtgattggcgggctcataccgtcttcggaaaccaggcccgcgaatcgcgcgaatggacgcgaatcgaaaccgctcggcagtaccgacgaccgaccgccgcatcgatccagtcgctgatcgcggcaagtagaactaggtggccggcggtcggtggacggagctttccgccatcgcccaggacgaaaagaaaaacgcggcggacacagaggacgcagacacaggcctgtgcttgggcactctgcgcccctctgcgactctgcgactctgcgttcatcaacgactgcgcatgccgtaccactagactctgtctgaaaacctggtcggatgaaaacctggtcgggtgggatggatgggccgcgagccgctgcgaaaacccggcgatcgtggttcggttcggtggtaagcacgtcgcaacatttcattcagctttactctcccactgggagagtcgggctctcaggcccggagagggttttcgtagggccctccccgggcctaagagcccgaccctcccgctgcgcgggagggtgttgtcgcgggggttcaccgaaagattcatgccgacgtgcttaggccccgacccctctctcccgaatcctgactcgcttaggctcgccaggattcgggggagagtctgggcttggggactctgcgcccctctgcgactttgcgtttatcaacgaccgcgcatgccgtatcactagactctgtgcgaaaacctagtcgggtgggatggatgggccgcgaaccgctgcgaaaacctggcgatcatggttcggttcggtggtaggcacgtcgcaacatttcattcggctttactctcccactgggcgagtcgggctctcaggcccggagagggttttcgtagggccctccccgggcctaagagcccgaccctcccgctgcgcgggagggtgttgtcgcggggtttcaccgaaagattcatgccgacgtgcttaggacccgacgctctcccccgaatcctgactcgcttgggctcgccaggattcgggggagaggggagaaaacgatcttgttcttgaagcgtttttgatcggcagggcggcagtaaagagtcttctccgggagcgttgcttttgctggtctcggctgggacagccgagttactatgcgtttgtctcggctgggacagccgagttactatgcgctggtctcggctgggacagccgagctactttggtcttcgctgctttggtgattgacctttacttggcaaccacaaatcgactctactggggggcgggcaagcaatccgacgttcctcatgggctttctagcgtgccttcctcctcccatgcaccttcgtctgccttcgcttcggccgagcggtcgccgggcctgcgggccagcgtgatcttgaccacgttccgttcgcccgcctacttggaccgtgtcctcgaagggttcgccaggcaatccaccgggtccttcgatgtggtcgtcggcgaggatggatgcaccgcgtccacacgcgcggtgatccggcggcacgccgtccacgctcccttcgccattcgctacctcggccaaccctatcgcggcttcgacaaaacgcggatcctgaatcgtgcgatccaagccgccacgggcccctatctgattttcaccgatggcgactgcgtgcctcgggccgacttcgtccagcaacacctcttccacgctcgccacggccgcttcctttccggtggctgttgccggttgccgagaccgttgacccagcggatcctctccgggaccgccgcctacgacgatttcacgaacctcctctggctgaaagaaaacggcctagcgatgccttccaaatggacctggatcgcgcgccacccacgctgggcggcttggctggatcgcgccaccaccactcgggcttcgttcaacggacacaatgcgtcggcctggaaagcggacctggtccgcgtcaacggttttaatctccagatgcggtacggcggtctggaccgggaactgggcgagcgactggagaacgcggggatccgcggtttgcaactacggcaccgagcgatcgtttatcatttggatcacgatcgcgactatgtccgcaatagcgactggcagcgtaatgccgcgatccgcaagcgagtccgccgccgaggcatcactcgcgctgaacaggggctcgctcaagtaacgacgcccctcgaagcccctcaagattccactcgtgacgccgcgaacgccgaggcggcgacacgagtctttttcactcggcaggagattcccgtcatggacaagaaaccctcgcgcaccgaccttcgcaacagcgccgacacccaggagcaagccgaccagatcttcgcggcgctcgatcgcccggccaccgacctgaatgcccgcaaaacctttcctcaggatttttccgcttccggtactggtaagggcggaggcggaggcggaggcgtcgccagcatcgagaactgaataagctgcccatccggcccgccgcccaccgaatctctctcgtgccggcaccgtcgcgagagaggtcggaggcgcggggcgtggtcatcttccaaccaacggatcgacaatggccctcgcaagcgaaaccagtacggataccgcaaacctcggcgagctgttgtgggccgacgattgcgtgctgcgtctgaagcacaacaagaccgtgggcgtcctgttcgcactggacaaactgctccggtccatccccgaaccaaccgctgaggaaaccgccttcgcccagtccctggccgaatgccagcgggcgagcgaagacgtgttcgagcgagtcttctgtgacccgcgagcgtatcactgggcccgggtggcgtttgatgcggtggccgcggttcatcgcggggctaccgtctcggcgggaaccgccgagtacttcggcgatctggggatcaccgacccgcgggaagggctcgcctatcacctacggcagttcaacctgttcgccgcggcggtggccttgcatagcgaaacgtccattcaatttaacccgacgccgctgaacaccccggcgtaccttcccggaacgacgctttccatctcgcacggcgcagctccggtggcgctgtgtggggtgcatgccgacggcacgctgcacttgcaggtggcaggggttccggtacggcgttcggcacaccagcctacaccgcaggaaaacggagaaccccgtttgcacgtcgctccgcaagtcgcttgcgcagccggctccatcaccctccagccgcatgccttcaacgtctccggcctgaaagacatccgctcggtcgccacggccagcgtcgaagatcagtgccggatggtcgagaccctatcgacctgcctgcagacgatccagtcgttcgcaccggagtgtttccggcagatgggtcagtacctgcgggtgatcgcgttcaaaccgcccggcgccgggggcgtcttcaacaccagttgctcgcggcttcccggtgccgcgattttcaccgccaccgagaatccgtggatgctggccgacgacctgatccacgagttctaccacaaccgtctgttcgcgttggaagagcggttcgcgttcttgatcgatgacaccccggagacgcgccccacgacgttctattcgccctggcgtgacgacccccgaccgatctacgggttgtttcacgcggccttcgtgttcgaacgcgtgcatgcgttctggatcgctgcggtgcattccggaaagctcgacgagatgctcctggcgcacgccaaagctcgagcggcaaagctgggtcggcaactgcaaatcaccttggcgcaactgatctgctggggcaatttcagcgtcgaaggccgcgagatttgtgaacggatcagcgactcgctgaagcgcgacttggcgaccgccgagcgattgggcatcggcggcgacaccccgctggttgatttcacgccggaatccgggttctgttacgcgaccaccgaagacggccaacgggtgtacgcccaggacgatctgatccggcatcttcgccagtacgatgtgcaccaccgcaccgaccagatcgtgcaggagcattttgaagaagtccgcgattttgcggtcgtcatggcgggtttgttgtagccgctctgcgacagcacgcccgccggggtagcggcaggcggcgaatgcgctggagtctaggcttcagccgaccaggaacccagccgaatcgcctaaaggctagactccagcgcccaaagtctggcgacttcagctacggccggtctctcacgcgactcgccgccgcggtccccggcgcaatcgctggatcgcggcacgagccgggagctcggcggctcgccacaggggcacgacccgcttgcctggcagcgacgcttggccttcgcgatcgtcgatcctgcgcatcgccgcaaagaaccgggcgtcaaaccaatcctgcacgcgagcccgtcgcgggccgccatcgccgtaatcaaccggcaacatggggttggtgttgatttcccagacctgcagtcttccgttgcagacgccgtaatcgatgcggccaaagtcgatacctgcggtgtcgaaaatcgctcgcagctgttcgcggtgagggtcttcggtaaggtaccgccattcttcgtccaaatagttttcctccagatgctcccaacccttcacacaccattcgctggcgaagaagagatgtcgaggcaggatctggtcaccgatcttgaaggctgcgtacttgcggtaaacgccgtcgccgtcggaaacatcgcagaactccacgaccaacttgccgcgtcgaccgccgcggcgtcgttcgaagcgccgtccccaccgttccagttccgcttgatcgtgaagcagtggcgagagcggtcctttgtggtcgtcttcgccgcgaatgaaaaccggaaagcgagtcggccgcggatgcgtattcaaacgatgagcacgaaagtcgttgatgccgcgatcggccagcgtgcggagcagatcgaaacgaagctgggtttcgccgggcgagttgagcacacgaaagcgggcgtcgccgcgcagtcgttgctggatatccgccgcccgcttggtggcgatggtgtcgagccgttcgaggtccgagaatatgtaggtgcccggggcgtagcgtttctgcaggaacaaccggccgtagcacagcggacgaatcgtgtcggcgagggccgcgccgcgggaggcgaggcacttgcgaatcgtgtaattgtgtcgcttggtcgtcaggaaataaatcatcgtcgggcccaaacgtcgtcgagggtgggtggcatgaggcatccctgagggcggagatagccgataccgccgggcgtcgtcaacgccaacgggcgccggtgcgcgatcggcagcgcttgcgcgaacccggtgggcggagaccgtgtcatggcgggtttatccgaacgttttcttttttctttgtacgttttcttttctctttttgcgctgagccgtgtcgttgaccagccgccctgagacatctgtgaaaacatttgcgaaccccgcacccgctgggagcgccgccgcgtcgcccaccgcgtcatcgatcggcgggccgatggtcctgttgttggccgcgaccgtgggcctggtcgttggcaacctgtactacatccagcctttgctgggtttgatcgccgaggacctgggtctgtcgcaggcccaggtgggcacggcggcgacgctgagcatgatcgggcagacgatcggaatgctgttggtgatgccgttgggcgacatcgtcgaccgccggccgctggtgctgggatcggtcgccgcttcggtcgccacgctgctggccgtgggtctggcacgcgaccttgccagtttgtcgatcgcctgctttctgctggggctggccaccacgggcacgcatatgacggtctcgttggcagcgacgctcgcggacgctcgccagcgcggccgggtggtgggaaccgtcgtgggcgggctgctgaccggactgctgctgtcgtgaacgatcagcggcttggtcggcgaccagtggggctggcgcacgatctactttctggccgccggaaccctgctgatcctgttggcggtgctgtgcgttgtgctgccccgctgtccgccgtcggctcgactgtcctacccggccttgctccgttcgctgggcggtttggtcc

SEQ ID NO: 782 - DNA, 23183 bp, synthetic construct
  misc_feature 1..23183: note = Synthetic
  source 1..23183: mol_type = other DNA
cttgttgctcatgccttcggccgagccaactgcgcccgcaatactcggctgcagcagaatgcctccttcggccagttcgaagctttttccttcgagcggctgcggcacctgcgtcagtttccaggtctgaccgacccgcaccatttcgccaatctgcacgaagccgttcgtaccggcggtgtcgacaatcgccatcacgttttcatagaccagcaggtcggtcttggttttcccgttctcggcgggaatcagattcggcatcagcatcgagcagtcaaaccgcacccaggtggtctgcggttgaatgactttgctggaggtcagcacggtgcggaactttggcccggcttctttgagtttggcagcgagcttggcggcggcgtccccttgcaggcccaactgcttcacgtcttcggcgttcagcagcacggcggcgagacgcttctcatcgcggttcaccatcgccaggatcgcttcccgggtggcttcttctgcggaaatcatcttccaggactcgatcttcttgtcttcatcctgatcgatcccccaacgggtgccgccggtggtgaaccagcggctctgatcgatctcgttattgccgttggaatcgatgtcgcgatagacctcgagaccatgcttgtagtagcgaaattcatcgacgccgcggtcgccgttggtatccatgaatcgccgcagcaactgcccgttcgggccatagagcacccagcctgaccctgcgtcggtccgctcgacttcgagcttgcactggggaatttcggcggcggtgggggtttcgtagtcgacgtcaggctgagtcggccggtaggccagaacgctatcgaccttgacctgggcaagtgccgactgaccacagaccacaaggcttgcaagtgcgcaagcgaccaaccctaacttatttccgcagcgagacatcgattcacttctccgttgcttgaaacagcacgcatgccgtggacggcaatccgttctccagacgctcccaacagcccatttccgttgcgtcggagaatcttagggaaactgcggcagtccgtcaggatcaatttcggcaggaattgccggtaccgaaatcgaaacttccggtcttaacgacaaccaactgatcgccgcacagagggacgagcggacagggaagagcggaaagagaaatttcctgactatcccctatcccctctccccctttcccctcgcgtcagcgctacgtctcatcgccgttgaagatccgcaggtagctgtcgtaccgcaggggggaaatcaatccatgggcgaccccgtgtttgatgccgcagttctgctcgtgagtatgggtacagtcggggaagcggcaggcgtggacgaaaggacgaaactcgatgaacagaccttcgagttcttccttcacgatgtcccagagctggagcgtgcggatgcccggcgtatcgacaacccagccgccggcgtccaatcgcaggagttcggtcacacgagtggtgtgtcggcctttgttcgtgtcgctgctgacttcgccggtccgacgccacaatcccggctgcacggcattcaacagcgacgacttgccgacgccactttgaccggtgaagaccgtttcacgaccccgcaacaggcgacgcagttctggaatcccctcgccggaaagggcatcggtcagcaccacggggtaacccaatctcgcatactgaccgaccaccggctgcagcaatcgtcgcgagcccaggtcgatcttgttgatgcacacgaccccgcgaattccgcctttttccgcgctgcagagaaagcggtcgatcagtcccagcttgagatgcggatcggcaaccgacgccacgatcaccgcctggtcgatattcgacacaatgatatgagccttgtaccgactcacgcgactcagtgttccaaaccggggctcgacgagttcgatcactccagtggcatccgcctgaggcgtgaaccgcacgcggtcaccggcgacgacggcattgcggccttcccgcgacatggtgcggacgagccgccggacggaacagagatacatctggccgtctgccgcttcgacgcgacactgattcgagccaactgccgtgagcacgcggcctggaagagtggcggcctgatcgatgtcccgaatggccgcgccgtcgtctccctcgtcagaagagacaatcgtccggtatcgggtgagatccccttttccggacaggcgctcggtcgtcgagagatcgtttgtcgcttcgagctccgcttcagactggcgggtgagatcggagaaacgcttgcgcttgttgcggttcttgtgaaacgcgacgcggatttttcgggacttcttttttgcggcggcctgcattcagaaaccgtcttcaaactcccctcgccccggtactccggggagaggggccgggggtgaggggcgcaatttacgttcgatgttctttagagataacccactcacaacatgattgcttttgaagacagcatcatctcagtcgcccatcagccagtccatcgcggcgtcttcgtccgaatcgaactcgcgctgcttcggagcattctttgccatcggcggcagtttcgtttttcgcttctcttccatgcgtcgctcgagacccgccttttccagcaaccccatggcgaacgggtcttcctcaggaggaggaggcgcgtcgccgaccggttcgtactgaatcttgtaatggttcttggcaatcgcgacgtcgtcgccgggatagaggaaacgggaatcgacccgttcgccgttcaccttcacgccgttgcgactgccgagatcacgaacctgccaatatccgttgaccagttcgagttcgcaatgctgtgaggagatgtttggaaaaatcaacacgatatcgcaactgcttctgcggccaatgaccagcttgggctgcagaagaggaatcgggtcgccgccgccttgggggatcagctcgccaagcatacctgctcaagtccttttgatgtgccgccgagagccgtcgtgctgcatcacaaagaaaagaaatgaaaatcgaaaggaaaatagatacggatgatcttatgaatccatccctggaagtcaatttttgccgccggaagaacgctcggtgatattaattatccgtaacttccctgccgaatgcgcggaaaaaatcggcaacagggactccgcccgaattattgagcagccgccgattgcacccggacgagaatctgttctcgcaacagccgcaccacctgatcgagatccagcgccgtcgtgtcgaccagcaatgcatccgccgccggacgcaaaggggccaccgcccgttcctgatcacgttgatcgcgatccgactgctcgcggagcagttcttcgaaatcgacctgacttccttgcgccgccagttcttccagccgacgtcgcgcccgttcttccggctgcgcggtcagaaagaatttgcactccgcatgcggaaacgccaccgtcccctgatcgcggccttcgcagacgatgtttctcgcactggcgatctcccgctggcgacgaaccagcagctcccgcaccgccggaatctgcgcgaccagcgacgccgctttcgtcacttcagccgtccgaatctcgccccccacctcgacgccgtccatcagatagccgccgtcggtcagatccatcaccgtctcccgcgccagccggccaatgcctgactggtcgccgggatcgatctgctcgcggagcgccttgagcgcaatcatccggtacatggctccggtgtcgagaaactgaaaccgcagttgttcggccagtcgccgggcgaccgtgctcttgccagtcccggctggcccgtcaatcgtgacaatcatgcgctgctctcgtccccgtgattcgtaacgaccgcagtctcgcgctcgcggttgctggcgtcaaggagtgggggaggagtccattgtccaggggcgagagtccagagccggaggagtcgagagctgacagtccagagtccagagccagaggaggggtcaggggtgagagaattcaattcttcactcaacgctcaactctcatcgctcaacgtccttgaacaatcgcatcacacgccagcgtctcaactcccagaaacgctttcagccccgcatagcgcgccgcggcttccggcgacggcttctggcgtcgcacggcccggatgagaagattcttcggcgtgtgttcaaggtcgatgaactcaatcacctgcgtgcggtacccggcgacttcaagcgcggcggctcgcagggcgtcggtcgccattgcggagacccgttctttcaataccccatgccgcagaattccttccatggcaggcgagtcgatcttcgtcgagagttcgtgctgacagcagggcgccgccaacaccaccgccgcctgtgagttcactgcgaatgccaacgcgtgatcggtcgcggtgtcacaggcgtgcagcgacaccgccaggtcgacccgaccaaccgactccgccgcactgatcttccccgaccgaaactccaaaccagtcagtttcagcttcgcggcgatctgccggcagcgctgaatcacatgttcgttctgatcgatccccagcagcgcgacatcgcggccatgaatgacatgcaacaggtgatgcagcgcaaacgtgagataactcaacccgcaaccgaagtcgacgacccgaatctccccctccgcaggcagctcaggcacaatgtcgttgacgatttccaggtaccgattgatctgccggaatttcttctgccgtgactgcttcaccttgccgtcctgcgtcatcacgtccagttccaccaggaacaggcagggaaccccttcaggtatcaaatgctccttgcggcgatcatgcgcaggtgccgcctgcggcaactggctcgggggctttcgctggatgcgtacgccttcgggtgtcacccgggccgtgatatcagcagtcgcggtgaacagaacggcatcctgatacaccgggccaagcagcgactccgcccgagcgagactttcgtcgagagtaagattgaggtgcgtctgctgacgttcgaactgctgctcccattgcagccgcggctcattgcgaatgacgaccggccgcaccgtctgcttgcgcggctccaacttgcgatcccgccgcggccgcgccaacaccagcgacgccaacgcaccggtttccacggcctgtcgaaactgatccagaaactcgtggggcattgattgtgaggggaaagggaacaggggatcggggacaggggttgtcatcgagaggattttctaaccacggaagtcacggagcccacggaatttcaaaaccgcactctcgctctgattccgcgcagcagatgaaatgatcctgtcgagcttgcagccattcctcatttccatccgtgaattccgtgccttccgtggttcctcttacacggtcgcgatctctcgcggtcggactcgcgacgatctatgatggccgttctcaacctgtttcgccatcttcaaatcgttcgatcatccatctgtaccgcagacttgccgaaggcccatcgatgtccatgaacaagaaagacaaaaaacaggtcgagtcgctcaagaagaaactggccaatctgcagcagcaattatcaggcgccaagaaacagccagacgaccccgccgatgtcccgcgcctcgaaaaagaaatcgccgcgatgcagaaacagattcacgatctgctcaatagttgaggagggcaatcagcggtcagcagtttctgctccctcgccccggtactccggggagagggccggggtgaggggaagtggctagagcgtcgtaaatcgaagacacttcaaccgagtattccgaccccctcaaactctgtcttgaagcccccggttctctttcggcctacccaggacaacgtcgccaagaaaacagatccaccaacagcacgcgacgccacagtcgccgtccgtcaacccgtcatgaccgaccttcccccctcaccgctgcctccgaccatcatcgtggtccacccgcgtgagaagcggtcgaagtgctcggtggaaccgctccgcgggcggcctgagtttctcttctggaaattccccaaccgcggcccgcaaccgctgacgagctatgtgcgacttggcctcggcggcccgttgctctcgccggccgacagccctcacgggttgctgctgctcgacggcacctggcgactggcggcgaagatggaacagtcgtactcgcaactccccgtccgcagcctgctcccctggcagaccgcctatccccgcgtctcaaaatacgacaccgaccccgcggccggcctggcgacaatcgaagccctgtacgccgccctcacccaaatgggccgcccgactgacgggttactggacgactaccgctgggggaaggagtttgtggagaagaatgcggggttggtggagcggtgcttgaacggcattctgtaggatatggtcgacaacgataattagagatttgtctggaaaactcaaatgatccaagttggcaagcgaagcactgactacgagttgcagtctcgtgtgcaatacaacatgcgtgcagtgagtgcacctgcatgcctgatgggattcttgtggtttcttacccttgtccaggcgtcattagcgctagcttttattgcggcctgcgtcctcttcttgattgtcggcgtcgtgaattcgctgctccatattgtctcgaagccattggtcagagtgaaaggggaaatgctcttggttgtcagtagcgaaggcgcatccccgtatgaattcaggcgtccactcaaagaatgccggtttgatattttgccgaacggtgacatcagtgttcgagcctttccctggatcagtgatttgatgccaggcggctcgctcccttctcgaatgatcctcaccgccaaagcagccgaccgtgtgagatgggaagaactcgcgagaacgcagatggaagcggcgacttctaaatcatgaattggatggctaaatacggcgaagaacttttcgccaaccggtcgattccgtcaccgcccaggaatgatagtgcctttttcctcgctcgtagaaaatcgctcgaatccatgggtatccccattcatcaatctcgtaaacacgggcaggccaggttctcaggatcattttcttcatgaatcgccgagacatggcatgaatgcagtaccctggctgcgaccattcttctggcgtcgaaatgaatcgcaccaagtcgccgacgcgcagatctttgggatttggcattgctgtgtaagctgctgaaataaccaacttatactaccacgttcgagaaatcgccggaattgactgtgaggccccagaaactgcagcactgaattcaggctcattgaaaatggacgaatctagaagcactgtgaaactcatcagttgcggcggctgtgatgccgttcatggatcgcagcttcccgtctgtcccggatgcggtcggtgtcccgcttgcggagtgcgacgggtcactcgggatgaacttcgtcatcactcgacctgctctgtgtgtcgtgtcccttattgcacaagctgtggtcattgccatgcctgtagtgcgatccgctttgccgattggccggcgtgcgactgcggctttcctgatgattcagagaaaagggctgaagtcgaaaaggcttttgcctggtcgccgcagaactcgacagggtgtttcacaaactcgatcgcagtcctgttgttcgtgagcggctggattgcgtattcatggtgggtctgattatcccggacgcttcggagcgtccgggataatcctgggctcgaccacactccaatattgctccacacatgtccgtttggtgatcccgtatccgattctgcaaaccggccgacatcaatcgaacactcacccctgaaaaatgcgtgaagtcggggccggtggattgacgtattgtcatcgccaagggtacatcgcggacgcaccgttgatcgatctcgatcccacgagatgtccctgcattccatctctcggcggcgctgcttcactcaggcggcaccgcggcggtacattcccggcctggaaccggcctggaatggatcatcaggttccagggatgctgacgcgatgaaccggcgtgaattattgggtgcggtgggagctctcggcgcgagcgtggccatgggggccggtcaggccaatgcggacggtcacgggcacggcgccatgagcgacgacaagatgatggctccggtcggcaatcatcatctccacttctgcggcattcactgcgcaaagaaagatccccgcattcagatcgtcacccagcattactgcggcggcgtgggcgacggcatgcatcagtgcctgctctatgattcgtctgccaagaacgcccggctattaggcgtggaatacattatctccgacgaagcatttcgcggcttacccgacgtcgagaaaaagtactggcacccgcacacatatgaagtgctggccggcggcttgattgcgcccgggatgaagccggacgacgaaatgacctttatgaaagccctgctgaccacctggggcaaaacctggcacacctggcccgacccgacgacccccatccccatgggggaaccgctgctgatgtggtcgctgaccggcgacggccaggacgacccgaaagtgatcgccgcccgcgacgaggagtttggcgtgaagaccgccgagatccgcaaaaagcggattcaaggcatcggctacgacgtgcccgccgttcccgccccgaaagacatcgacgtcatcggccgacagtggactgccagcggcgaagataaaccgacgaaggtttaattgtcccattgtcccggacgctgaatcgccctcgcgggataaatcgaccttcgatattccagttgaaccgtgagcgtccgggacaattcgtttttggctcgacagctgttcagaagaaataggcaagcgcgttccccattgtcccggacgctgaatcgtcgcttcaagacaattgcccctcggcgttccagttgagctgtgagcgtccgggacaatttcaacgcaatctcgcaactgattgtatttgcggtaaatcagctgagatcagccgtattcacggatactcctcgctgatcaagttgattgactcactgtgccattcgatagcgtgctgcaacggctcaaaccatgcgtcatgatgagtccgctgtcagtgagtaagtttcttcagtctgaggaactccgcatcgatttcctcatattcgacgaggcatcgcaggtgttcccttggaacgcgatgggagcaatttttcgaggaagccaactgattgtggcgggcgacggagcgcgtgaccgacctcgtcatacgtcacctgagaacccggccagagacttcgctaggcatcatcgcatttaaccagtcgcaacagacggccattgaggatgcaatctacgagcgtcaccggaagtacccggaagtcgaaactctcttccacaccagcctctcttcgtcaagaatctgaaaaaatgtgcaaggtgatgagcgagatgtcatcattctctcgcaattgacctcgaaggtttagtccagcagacctcacgagtgccgggttttggccggacggggaagcagatccgtcagcgtctggagaaccttttgaacgaactctttcaaactggccacctacgatgggtgggagagcggattgcatccgcctgcgaagaatctgtcgtccccaaggggcgataaaggttcgtgatttgacagtatggctccaagctgaagccgatcaagaaggactgccgagagccgaatctggcaaatcaagcccagcgcataaaaatgggcgccttcaggaggcgcccaacggattgaaccgtgcgaaggtgaaaccctcttactgtaataggaggaaagcaccgctcggatacactcacatcaatttacacgctttaacacggtggtcaactccgatagcatcgatctgtttcaaattcccatcgacatctttgtgaaatgggcgggcagccaagatggtcaatgcaattccgtatcgtctgggtctcgatctcggggcgtcgtcactgggttgggcggtcattcagctcgatcagccgggcgggcaacccaatggaattctagcggccggagtccgcatcttcgaagccggcgttgaaggcgatatcgaacagggcaaagacgcctcgcgggcagttgtccgccgcgaagcccgtcagccgcggcggcaacaatggcgtcgccagcgacggaaacagaaactgttcatcctgctgcaacagctcggactgttgccgccatccgagacaaacgattcggccgccagaaaatcgctgctcgatcaactcgatgcgcagttgaccgaaaaatatgtccccgctggcgaccacgacaaacggcagaagcttccctaccagttgcgggacatggcctcgaccggccctgtggaagccttcgaacttgggcgggcgctctaccacctcgcccagcgccgcggctacctcagcaaccggaaaggccagagcaaagacgaggatgccggccaggtgctcagcgccatcagcacgatggacgagaagctgcaacagtcgaagctcaaattgggcgcttatttcaatcgcaaagtgaaccctcacgaagaacgcattcgccgccgttggctgggccgcaagcaataccgcgacgagtttgccgccattcgcaccgctcaggcaggcgctcactcacaactgacgaaagacgtctgggacaaaatcgacgatgccatcttctttcaacgccctctaaaatcccagagccacctcatcgggcgctgcgagctggaattcgacaagcgaaagaaagggctcaaacgctccccgctggcgctccccatctcacaggaattccgcattctgcagaaggtcaacgatctgcgggtgaaaacccctacccgcaacaacgagccgctcaacgagaaagaacgacagactctgttcgcagttctcaatgaggctggcgagatcagttggtcgaaggtgaaaacactgctgaaactgccgaaggccgcgaagttttcactggaagagtgggacgacaaactcattggcaaccgcaccaattcaaaaatgacgccggtgttcggcccccgctggctcgaaatgcctctcgaagaacgaacggcgattgcccaggaagttttgcactatcgtaagcctgaggccctgcaaaaacgggcgatgaaagcctggggactggatgaagcggcggcctaccaactcgcattcaaaacgcatctggagcctgactacgccagccacagccgcaaggcgatggagaaactgatcgagggcgagccgggcgtcgaaggcctcaaagcgggagcgtcctacagcacggtccggaaggcgctttatccggaacggttcacccccggaaaaatgctggcggcgttaccacctgtcaatcagtggaaagccgacattcgcaatccggcagtcattcgcgcactgaccgaactccgcaaggtcgtcaacgctttgatgaagaagtacggcaagccggaacacattcacatcgaactcgcccgggacatccgcaactcacgtcagaaacggaaagacatttttaagcagaaccaagagaatcaaaaacgccgactcaaggccgtcgaaggcattgtgaaagaagggggcctttccaacccgaagcgtcgcgacatcgagaaatggctactcgccgaggagtgcaaccgcgagtgcccatactgcggcaaaaccattaacatgcgaaagctgatgggggacgacgccgaattcaatgtcgaacacatctacccgcggcgctatctggacgactccttcctcaacaagaccattgcctgccgcaaatgcaacgacacgaagggggaccagactcccgccactgcgttccacggcgactactacgagcagattctgcaacgagtcgaacgctttcagggaactgcgcgtgaagtgaaactgctgcggtttaagactgaaataccgccggctgatttcacagatcgccagctcaatgacacccgatacaactcccgcctcgccgcggagtatctgcagttgctgtatggaggccggtttgactcttctggagagcagcgaattctctcccccaccgggcaactcaccgggaaggttcgggcagtctggcaattgaacgacttgctgggcgaagaagatggtcagaaggaacggcaggaccatcgccaccacgcgatcgatgccgtggtcattgccctgatgacccagaagcagatccagcggctctctcagatcgccggcgacagtgagaagcatcacgcccggcatttcttcgagtcgatccagtggccctggacgaatttcaagaatgacgtcgcctatgccgtcgaagcgatcaatgtctcgcaccgtcccactcacgccatcgccgggccgctgcatgccgaaacgatctacagcaagaacttcggcaccgagaagaagccggaacatcgagtccgcaagcacatcagcaagctgaccgccaaagagatcagcggcgatcaaatagtggatccccatgtccgcactgcggtgcagaagacatgggaagcgaagggcaaaccgctccctgcgaaactctggggaaccgaagcggggaacgaagagaatttccccaggctgatcggccagaaagattcaaatggcggctccatcatacgcaaggtccgcctgaagaccgacgccaagcctcgaggcgtgggcaagggagtccgtgagcggaactatgcttctggcaaagactcaaactacgccagcctgatctacgcgatcgtcgacaaggacggcaacgagatcaaatgggaacacgaaatcctcgaccgcctctccgcccaccgactgctatccgccaaccacggaaagcccggcgagaaagtgctgctgccgaatgggtccgagaaacgaaagttcaaattcgccctgcgaaagaatgacatgctcctggcccaagggccggacgggcaggacgtgttgtaccgggtgcagaagttttctcaggacgaaattcagctctgtgagcacagtctgtcaactgtaaccaatgaaacgagaactccctggaacagaatccgctcagcggagacacttcgaaaattcggtacacatcgagtggtcgtgacgctcacaggcgagatgggcgctcattcagaaaaatgagcgccagctgatttatttcgatcagcgagcgctcaggtagttcgagaaatcgtagccgacctctgacgaactcgaagtccccctgagcgccggagagacctttccgcccgtgaagtcctcgaatcgaggctgcttccgagaactgaaatgctagtgaactcatgagcaggccccccgagatcgacttcgattctcgggggatttttcttttcatggaatgctaaggtctgcaaactggattagttcattcagcccagttggcgtcgacaccggaggtcgtgctgttcctccggagtccgcgcgatgcggaatcgtattctcgaaatcgccgagcaccccgcacgacttcgagtcgagcggcaccagctcatcatcgataccggcggtgcgctcgccaaagttccgattgaagacctggccgtgctcgtcgtttcgcacccgcaggtttcttacacccaggccgtgctgaacgaactgattgcggccggaggggcctttctcacctgtgacgaccgccgcatgccttccgggcttctgctgccgatggatggcaatgtcatccagaccgaacgctttcaaaagcagattgccctgtctcagccgcgccgcaaacaactctggcggcagctcattcgcggcaaggtccgcatgcaggcaacgctgctgcaggaacgccttggcaccgatcacggcctgggcctgctggtgccggtcattcggtcaggcgatccgagcaacgtcgaagcgcaggcagcgcggcgttattggggcgccctgttcggcagcgactttcgccgagacagagatgccgccgatcacaaccgcatgctgaactatggttatgccgtattgagagccgccacctcgcgggcagtcgtcgcggctggcctgcatcccacgatcgggctacatcatcacaacaaatacaacagcttttgcctggccgacgacctgatggagccctaccgtccgattgtcgaccagggagtcgccaaattgatggacggcctggaagcggtgccggaaatgacccaaatggttcgcgccgacctgctgggggcgctgactgaaccagtcaaagtgcagggagaagcccgctcgctgtttgacgccctgtcgcgaacagcagcctcgctggtgcagtgtatcgccggcgaatcgcgcgaactcgttctgccggagggcttcaccgatgccgagagctgaacactatctttcggaatacaagagcatgtggctattcaccatgttcgaccttccggtcgacacgaaacgtgcccgtcgcgactactcgcgatttcgcaacctgttgcttgataacggtttcacccagatgcaatactccgtctacgcgcgtttttgcgggagcgaagagattgctgaaacgtacaaacgggcgatcgaaaccaagctgccgccggacggctacgtccgactgctcgcggtgactgaccggcagtttgggaaaatgcagagttttcacggaaaaaggcgagctggaaatgaatccgccccgagtcaacttctccttttttgacttgtgtttttgccgtaaagcctgcggttgttgtcggttcggtaaaaggtagtgtatccgagcgacgcttccccgcgaactacagcgcaagcaaccagcggtgcatcacctggctaagtgtatccgagcgacgcttccccgcgaactacagcgtgttgcgcggcttgtgatcggacttcgcaagtgtatccgagcgacgcttccccgcgaactacagccgtcttcgtgctgctggctgattctgttgcagtgtatccgagcgacgcttccccgcgaactacagctgtccataccgctggggtcatggtcccccaagtgtatccgagcgacgcttccccgcgaactacagcctttgttgacggcggccgtaacggtcgcagagtgtatccgagcgacgcttccccgcgaactacagcctcgttcagcagttcttcgtcagcgtaaacagtgtatccgagcgacgcttccccgcgaactacagctgcttccgctttactgtctcatcactgttcagtgtatccgagcgacgcttccccgcgaactacagcccatcatcgcccgctcttcgcggtctttgaagtgtatccgagcgacgcttccccgcgaactacagcagggctcaagattggagcccgccgcgactaagtgtatccgagcgacgcttccccgcgaactacagcaaatcattcgctacggctcctgctagtgcgagtgtatccgagcgacgcttccccgcgaactacagcggctcgacccatccggtgatatcgtgagggagtgtatccgagcgacgcttccccgcgaactacagcggagtggaagtcgtgcaaatgcgaccaaccagtgtatccgagcgacgcttccccgcgaactacagcagttgctgccacgtccagccaccgagcgtgagtgtatccgagcgacgcttccccgcgaactacagcaggcagaaatgcggctgacgaccggtcgcgagtgtatccgagcgacgcttccccgcgaactacagcccgacgcgagcggttgagtacgccggaaagagtgtatccgagcgacgcttccccgcgaactacagcccagaaattcgttgtgtgcagtttgcattgagtgtatccgagcgacgcttccccgcgaactacagctgattgcgggcaatcccatcttgattctccagtgtatccgagcgacgcttccccgcgaactacagcccctaacagagcggttggtaacactgatgcagtgtatccgagcgacgcttccccgcgaactacagctgcccagagcattaagggggcggaagccaaagtgtatccgagcgacgcttccccgcgaactacagcttcattcatcaatcctgtagcggcggttgcagtgtatccgagcgacgcttccccgcgaactacagccatccgtggccgcgttgaaatccgattcgaagtgtatccgagcgacgcttccccgcgaactacagcgcctgtggcggtgtccccgtcggcggggcgagtgtatccgagcgacgcttccccgcgaactacagccataatcatcaaggccccaacggatctggtagtgtatccgagcgacgcttccccgcgaactacagcccctaacagagcggttggtaacactgatgcagtgtatccgagcgacgcttccccgcgaactacagctgcccagagcattaagggggcggaagccaaagtgtatccgagcgacgcttccccgcgaactacagccatccgtggccgcgttgaaatccgattcgaagtgtatccgagcgacgcttccccgcgaactacagcacggggcggaacttgtacggcaaaccgaacagtgtatccgagcgacgcttccccgcgaactaagcgaaatcatgtacttgccgccggagatcgtaagtgtatccgtgcaacactccatctaaaggataagagaagtctgcatcgggttcgttgaaagcgcgtctgcgaggcttggcggacgcaacgctcaccgcagtgtacgcggttcgaagtttgtgatcggcagaaacggagccagttaggtttggagcagggaaatatgtactggaactggttgccgcttccacgatgctgtacgaaaggaactcaaagacgtttttcccgcaaaagcggcaactacgagctagtaaagctccggtcgatcaacgacatcaatgccctttgaagccgtccgcactgcgaaaatcgcatccagtaaaggcctatgttctctgaagagggcgttgataatacctggatcgcgtgatctcagcgcaagtcgttttcaaatcaaaagcaccgtcatcctacctgaggtgaaaaatgtgctaatgctgtccaatcactcggacaagcgggccaaactgcagaacagcatcaatgccgtctgcctacgaatcgtcggcaaagtgcagcttgatcgaatgcctgaatgcctgggggaacgtcagcgagcgtccctcgcccaaggcgggcaacaactggtgatcgagtacctccgcacggagaatcaaatcctccctcacaatgaaactggggccgaaacgattgctgctcaatgacagacagcggcggcgactgcggttaaagaacaactgacacccacaccctcggctgacttttttgaccctacgggctcagcagaaggagtcgggcggtgggttcgccattgtcccgcaagtattgtcccggacgctgaatcgtcgtttcaagacaaaccgactctcgatattccagtcgtgccttgagcgtccgggacaattcagacgccggcgagcaggatgccggcgacgagacacgcggcggctgccagcagttgccacgtcgtgccggattccggcgtctcttcgtccgcgtgcgtggaagaatcagcgatgcgctgtaccagcgtcgccgggactttctgcaccagttgccccaggaaaaaccagtcgaagaaccgcgacaactgcgcgacaatccgaatcggggccagaatgaacagctgaatcagcgtcggaatatagaagtcgacgcccgtcatccggcgcagcagactctgttgttccagttgctcgcctggcacgttcgcaggccggtctgaccagttccgcgcggcgagaatcccgatcaacatcacgatgctgctcgcaatcggcagtgaaaacgcaattcgtcccgtcccgaaccagagcaggggagaagcgacgaggcccgcgactccgcacagcagaagtgcggcaaagaagatccagcccaatgttgaaagatcaggccgcgagcgcaatgtcgccgcagaagcggggtcagcgagttcacggaagagtgcgatggtcgtgagcagttgaccggcaagcacggtccccagcagcacccgggggttgagtccgtgaagcgcttcggatttcctgacggcctcacccagttgttcctgtcccaacaggccgcagcacaagagcagggcaaacgcccacaacacccgttgacaccagacaatcgacggcccgcgttgcttctcgtccagccccagcgaaagtccgacgatcaacagcacagccgccagaccgggcaccgcggccggaatgttcgttgaattgggcgtcgcggcgagccccagccagaccagcccgatctgggcggaagcgaccgacagcagtcgtcgcgggccgacggctccagaaacggcaatcagccccaataacaccgccgagagcccgcccaggccggccatcaggagttgtgtctcggcgaagaacgtcagcatcggcgaccaccggagcgacagcagcaatccctggcccagaccaaatgccgtcacccaagcggccacgcggtacgaaatcgccgccgatcgggtccagctcatcagcgggtacaggccgcaccgcaagatcatcgaaatcagcagaaacgtctggccggtgacggcgagggcgctctgttcgagattcagattttggagttgggattggtcggtgaggttcgaaacgccgggggagacccagacaagtccgaaggtcagtagcccgcacagccagatgaagtcggcaaccgtgagccagaccaggcactgtccggccccttgagcggcatcgccgtcggtgtcgtcctgggcgagaatcaaactgagcagccaactcgacgccacgacgctcgcccattgcagccagattccgtctgccagcagcgtgaccgtcacggcaaccgccagccataacccggcccaggcttcccgaatcgccgccgcaggcagggctcgcggacgaggccagctcaaaatcagtaggccgctcagcgagctgattccaattccgcaaatggcaacccagtcaggagttagcagcggaagactccgcaaaaaagcaatcggaccggaggttcggtcagggtcgttttgatgcaaggcaaaatccgcccccagcaccacgcctgcggtcactgtcccggccagaaaaaaggcccagaactggcttcgactgaaatttgtcagccccgcaaagctccgaaacagcagcaacagccccgccgcggccggggccagcagaaggatcagcagtcccgattctggagcgaatcccataaaagtctggcgtcctggcggcgttaaaattcaatcgttcatgcaggtttggcgtccatactccgccacactccccgagatcggggctgatgacaaatcggctccttttggccgctagatatcgactcttgccgatccgttcggcgggcgtattatgaagacacagcgtattttcggaaacccgctgatgcagagaatcgaaaagatctctatcattctggaccgaagaggtccacatctgctccggagaattgctgcacgcctcctggagccacccggccagaggaacaacggccgttgtctggaccgccggcgcggccggtttgttccgaccgcgaccaatgccgttcaggacgctcaaaatcctggcggcctgaggagacttggatcgttttgagtgcaagggactgcgttctacacggcggaggttcagatctgaattgacaggcgatcgacaggtttccacgacggcgctcgccgtgggggtaacccgtgattcgccgccgatccagagagttcgcttcgcgagaacaacacacacagacaggcacgatttccccggacgggatctcgtcgttacgacatcgactttacggattctctgccatgcgtcgtcaagacattcgaaacattgccatcattgcccacgtcgaccacgggaaaaccaccctcgtcgatgcgctgctccgccagagcggacagttccgcgaatcccagttgcagggtgactgcatcctcgactccaacgacctggaacgggaacgcgggatcacgattctcgccaagaacatcgcggtccactacaagggcgtgaaggtcaacatcatcgacacgccaggccactctgacttcggcggtgaagtggaacgcgtgctgcggatggccgacggcgcgctgattctcgtcgacgccttcgaaggcccgaaaccccagacccgattcgtgctcacgaaggcgctcgaagtcggtctgaagccgatcatcgtcgtcaacaagatcgaccgcatcgactgtcgcccggaagatgtcgtgctggaaaccgtgcatctcatcgaagaactgggccatgccgactcgctcgacgtgccgtacatcttcgccagcggccgcgcgggctatgcctcgcatgacccgctcgcccggagcggcacgattctgccgttgctggacatggtgctcgaacacatccccggcccggtggccaatgtcgaagagccgttccagatgatggtgacgtcgctcacatggtcggactacgtcggacgaatcgtcgtcggccgcattaacaacggccgcgtgaagcccggcatgaaagtcgccatcctgaaaaaggggggcgtgcaggtgacctcgacgatcgagaaggtcgaactgttcgacaagctcggcaaagtggaagcggaagtggccgaagccggcgacatcgttgccctcaccggattgggcgactctgaaatcggcgacaccattaccgacaccgcggctcccatcgcacttccccgtaccgaagtcgacgagccgaccctgtcgatggtcttcacgatcaattcgtcgccgctcaccggacgcagcggcggcaaatacctgaccagccgccacctccgcgaacggctcgccaaggaactgcagtcgaacgtcgcgctgcgagtcgatgacggcgataccaaagacatcttccgggtctcaggccgcggcctgttgcacctgtcgattctgatcgaaacgatgcgtcgcgaaggcttcgaaatctcggtcggcaagcctgaagtcattcgcaagcaggtcgacggcaagtggcacgagccgttcgagattctggaagtggacgtcccctcgaccgacgtgggcacggtgatcgaagtcgtctcccagcgcaaaggtcagatgaccgaaatgaccgccggcgtcgggacgcactcgcacctggtgttcgagatccccgcccgtgggttaatcggcctgcgaacacgtctgctcaacgccaccaaaggagaagcagtgatccatcaccgcttcgattcctatcgccccatcgaaggcgaaatccctcgccgcaaaaacggcgtgctagtctcccaagacgtcggcaaggcgactgcctacgccctgttcaaactgcaggaacgctcggaactgttcgtcggtcccggcaccgagatctacgaaggcatggtcgtcggcgagaactcgcgcgataacgatctcgtcgtcaatccggttcgcgaaaagaagctgaccaacatgcgcgcctcaggctcggacgaaaacgtgatcctcgccccgcctcgcgacatgtcgctcgaaatggcgctcgagtacatcgaagccgacgagtatgtcgaagtgacgccgcaagccatccgtctgcgaaaaatctggttgaaagaaaccgaccgcaagaagagcaaccggtcggcgtcgtagggcgttgaaggttgatggttgaggcgtttaaggtttagaaatgcatgccggttgggcgcggttcgctccaccggcatgattgttttttggggaggaatttgtcattggtccttctggagggacgaggcgtgaggggtgagacctgaggagttgcaagcggagctggacacattttctctttccctcaagcctcgagtctcaagccagatacctcacctctttctggctctcgaccctggacactcgacactggactcctcccacacactcaactctcagcactcaacactcaactcctcccgcaggtgcttcatgcttcgcatccctgaattcggcatgctcatcgactgctcggacgattgtgggttggcgcagcagaatggggtgacgctgtacgggccgctgcatgggaaatttggcgttggaatcgcgacgcctcaaccaggtgacgatccgcagggaaacctcgccgatcagtatgctctcatggccgcattgggacccgtgggagaacatggcgccacatttttgaatcgtcgcgatccgcaggtgccgttcatcggcgcgatccagaatcctcacacatcacagttgtatctgctggttcctttcaatcatgcgcggctcgatgagacgcagctccgtcaggcgatcggcaagctggtccagtgcatcagcttcatcagtcctgcgatgtcgcagtggcaacagcgcttgtcaggccgcatgttcaccgcggcggaagcctatcaacggcaactggcttcctccgacggctactcgctgcaggaggacatgacgtttcacgccaacggcatgtacgagaaacggatctccggccatgtcagcgtgagcggcggcggcctgtcgctgggccgcgtgcgtgatgaacgcgaacaggggcgctgggacatcgtcgaagtgaacggccaaccgacgctgcgactcgaagacgagcagtgtcagcgacaccattggtcgctccaggtcactgcagacgcagtcttgctggatggccgaaggtttgtgcggacgaaatgaggcaggggcaagaactcttccatcttcatcaattgcacattcgagtgttgcgggggaaaatcgcggcatcgccttccgactcgcaaggaactgtcgcatgcctcgctgctctttgttggctcttgtccttgttctcgtcagcaccggcactttgctggctaaggaaaagcgtccgccgaacatcattctgatgatggccgacgacctcgggtacggcgacctgggttgttatgggcagcagaagatcaagacgccgcagctcgatcgcatggctgcggaaggcgtgcggtttacgcagttctatgccggctcgacggtttgtgctcccagccgctgcgtgctgatgaccgggctgcatgtcggccattgccagattcgcggcaactcggacgacagcctgcggccggaagatgtgacgatccccgaactgctcaaatc

SEQ ID NO: 783 - DNA, 23141 bp, synthetic construct
  source 1..23141: mol_type = other DNA
  misc_feature 1..23141: note = Synthetic
acgttgatcctgatcgtggggcaggttgccgcgtttgtgctcggtcagcgtgatccgcagatttgggagcgtcttgttctggttccgtccaaagtcctggacggcgaggtctatcggctggtttcgtttctgatactgccgcccggcaccgctctgctttgggcatttttcttctggtacctgttctacctgatgggcaccgctttagagcagtattggggcacgtttcggttcaatgtttttctgctgattggctacgtggcaacagtcgctgcatcattcatttctcccgaagcgccggcggggaacggctttctacaaggcagcgtgtttttggcgttcgcgtatctgaacccaaattttgaactgatgctggcgtttattcttcctgtcaaaattaagtggtttgcattgctaacgtgggcgttctttgtgctgacgattgtttttggtgactggcctgaacggctgagtgcgatggctggaacgctgaatttcttcctgttctttggctcagagatcttcggccgcgcacggtcggggcagcggttcatggcatcccaggcaaagcggttcggccagaagccgccagagttctttcacaaatgctactcctgtggcctcacggacgcggacgaccccagcatggatttccgttactgcagcaagtgcagcggagacctgtgctattgctctgaacaccttcgcagccacgaacatgtcctggattcgaatatcgaagatgcttagaatagtttacctaaacacgtggccgcattgggctcgtcgggataggcgatttactgtcgaaaacggttcgccgcggccacaagtcagcgtaatacgctgtggttgaattgtcaggcacgtgcgccggacctgacatcagcgcggtagagcagggctcctgtagatccccagggacatcggtttgcggaagagcgtgttcgctatgttttagtcgtcgcctttttcagcacgaacagcaccggcgatgtggcctttgcgggagtgctgttgattgtttgaagatcgtgcgtgtcagcgtatctctgcaacagttgctcgacagcggcgaattcttccggaccgccggcgtggcctcgataggccaggactgttaatactccggcaggcttgagaagttcgacagcggcggtgatagccttgactgtcgtacgcggctgagtcgtgatggcgtgatcgctgcggggcaggaagccgaggttgaacatgatcgccgtgggaggttgtgcactggtggcttcgtcggcaagtgtttcgtggcctttgtgcaacagcgtgacattgtgcaggtcagccgcctgaaggcgtttggctgttgcgttaagagccgactgctggacatcgaagccgatgacgaaacctgttgggccaactgtgcggcttagaaaacacgtgtcgaagccgttgccgaccgtggcatccactgcggaatcgccaggctgcaggacgctcgccacggcttcctgggctcgttgagttaacggccggggacgtcgttcgacttcgcttgtcgttttcagacggtcataacaaacggttgctcgaatgttgtcttcgccgtcaagtatgctcgacagttctgccgccagccgaggagcctttagtgtgcccttcgatccgagtccgttgaagacgaacagttgttggatgttcggatggcgacccagcacagcctcgtagtccttcatggtcggtcgtactcctgccgtgtggtcgacaacttccacgtcgccgtcaaccatgcgtcccagtttgtgcagcacttcgtctcgaccggccgacgatggttctgccacggtgctgttccaatcgtaggtcgctccgacactctgcgtcccatccgaattcggcgcgatccaaacgctgcggtgggccacttccggtcgaatgtagtccgggatacgcaccttcagtatgtcaccgcgcgccggattattagggacgttgggaaagtagtcgttggcggtcgctccctgacaaagcacgatccgtttagcaatcagatcaagtcgtttcacagtaacctgtcggtcagtgaattcgacgtctctggcgaaattcaattcttcgcagcgaagactgttgagagattcaaagtgtgttcgtgtggcggcgaggtaggccggcacgttgagccgacctgcgggctgcatgacgatccccagctgtggttgcccttctgcctgcagcagaccgtcccaacatgcgatggactgtacctgctggttgtcgctgcgttgcagaaattcggctctcacgtgttcattcgcaaacaacctcagcatcggtgcttctgtccagaaatgctgcccggttcgctgttcgaccttctggtaaaacgcggttgccggtgcccaatcggcttcgaagtcgggtgactgaaccagccgttttcccgtgacgggcgtgacgagtcccgccgccactcgcgaagccgagtttggttcgccacgatcaacgatcatcaggctgtggccagccgtggacaaagtccacgccaaagctgatccggcaaggccctgtccgacgataatggtttgaacatgagtcgacatgttcggattgtggtcgccttcgtgaagcgttgctgcgtgcaaagcccgccttttcagaaaagcgagccttctctgccacgctcccgctttcgaccaatcttctcgttgtttttctaccccggtttcgcgtattctccaggtattacctgcctaattcacccaccccgcgtctgctcgcagcttgagtccgatgtctctaagagtcgcgatcgccgccaccttacggagtttcttccatgacgaaccaaacacgccgaagctttctacagacctccaccgctgccgctctggccactggcatttatgcgggccatgccacggcagcccccactcgcagccctttggaaaagctaaacatcgcctgcatcggtaccgccaaccgagcggctgctgacgttaatggcgtcatgacagaaaatatcgtcgctctgtgtgatgtcgacggtaaatatctggaagcgtccaagaagatgctgatcgaaaagaacgggctcgaacctcgcgtctacgcggactaccgcgaaatgatcgaagcggaaggcgacaagatcgatgccgtcaccgtcgccacgaccgaccatcatcacgctccggcaaccatgcaggccatcaaagcgggcaagcatgtttactgcgaaaagccgctcacgcacaccgtgaaagaagctcgcatgatcgccgaagccgcagcggaagccggcgtcgccactcagttgggcactcagattcacgccggtgacaactatcgccgcgttgtcgaaatcattcaaagcggtgccattggcgatgtgacggacgttcacgtctgggtcggcaaaggctgggggatcaccgaactgacgggcaaagaatcagcacctccagaatggttgagctgggacttgtggctcggcccggctccagaacgtccctacgtcgctggccgctaccatcctgctcaatggcgtcgcttctgggacttcggtcagggaactttgggcgacatggcttgccatttcatggacctgccattctgggctcttgatctgaagcacccgactcactgcgaagccgaaggtgccgaagtgaacgaagaaatgtgtccaaccggcctggtcgttcgctacaagttcccgacctgcaacctgacatggtacgacggcgacatgattcccaagcaggtggccggcgaacgagtgccagccagcggcgttatgtttgttggtacggaaggcaagatgttcgccgactacggcagatatcgtctgtaccccagcgacaagttcaccggctttaagccccctgagcagacgattccaaaatcgatcggacatcatcaggaatggatcaaggcttgcaaagatggttcaccaaccacctgcaacttcgattactctggtgctctgacggaaaccgtactactgggcaacgtggcttaccgaactggtaagtcgctggaatgggatgccaagaacctgaaggcgaccaattgccccgaagccgacgcctacatcaccaaagaataccgctcaggctgggtggtgtaaccaccacgggcgattgccgtggctggccggttgcggtagtaagctgaatcggcggcgatgttcgtgttgggtcgggtcgccccgacgggcgattgccgtggctggccgattgcggtggtaagctgaatcggcggcggagttgttttagatcattcaacccttctctgtgacttagcagggaagggttgaatcgcttaatgccgttgcaagtcctccagccgaaggacttgatcctgcttattgaagcgtgctttgtcgttcgatgctgtgtttaaacaaatatagaaataagaaagtagtagtaataagagagtggccgtaaattgttgataacttggctgtcggcgatcgtaagcagcttttgaacaaagagttacgacaaaacgcgtctggtaagaagcaccagaacaagctcggtgaagtccaggaggttgctgtttatcaaagcgttaaacaacaacagtggccaggtaccgctgaaaggctgaccctgaaaacggcccgactttgcagcggtggttaagaagggaagcaacaagttatcaacagctttgttgataacttcgccggacctgacacactctactgaccttcgagatacttcagctgaatgttggtgtcaggcagtttgggttgcaacttcgccacaccttctgccgtgacggccgttcgcgtgaccttcagatctttgagacttgtgaggccttcgagcattggcaaaccggcgtcagaaacagtcgtagaacccaaatgtaggaaggtcagctttttcatgtccttcaacgcagatagcccagcgtccgatagctgagtattgtcgaggttcagccattccagattcgtcagtggagcaaggtgttcgacacccgcgtcgctgatggccaagcgccacagattcagcttcttcagattcgtcaggcttgataggtgagccatcccggcgtctgttagctgagagttttcgctgagatccagatccgtgagttgattcatatcggaaaggtgagcaaggccatcgtcagacacctgattgaaggccagccgcaactttttgagctttgggtactggtgcagcaacttcagtccgtcgtcgctgatcagcgtggacttcatgtaaagttcctccagattcaccagcttgtcgagcggctgaaggccgtcttcgctgacaaacaggccgtccagtgccagcactttcaggttggtcaaatcggccagatggaccaggccaccatcgtcaacagaagtcgctccactcacgccattcaaccggacggctttaagtgtcttgaggttcttcagatgagccagagcgtcgttaccaaccgtgcagtctcgcaggtccaggttcgccagcggtgacttggtgtcggccagaaaagcaattccgtccgctgcgatcggcagctcgttcaacaacagcgacgtgacgtaattcagctgcgccacgtgcgacagggcgtcattggtcgcttcggtgtctcgcagatttacttctacgatgtttccggcagccgaccgcttgaatttcgcacccacagcttccagtgcagtgacggcatctgcatcgtccggcgtggtcgcaacggcaggcgtttttgttgaagaatcggagggggtgtcgttcgtctgttgacagccaaacagaagcaaaaaaggcaggattggcagcaatttcatggggagtaaccgcagtaaggatcgaagtttgagacttcactacggtacaggaaacgctgagtgtcgtgtagcaaacgttaggcttttcgccggaatgacaacgtctattgcgtcgtcgccatcgaccgtcgagccgtgcgggaattcagctcttcgctccacgacacaatggtgtccttgatccgctggcggtccagtttgtccggctggcattccagtaaagctcgctgcagcatgcgaactgcttcccgcttctggcctacgtcgtagcgagtgtacgccatctggattcgcactacgggtaattgagggacttcgctcatagcgtgagtccacagcgtatccgggttccgccagacgggtaaatgctgtcttgtagccgacagtgccatcaacacggctaccaagccaaccgacaacttcatgcttctggcaaggtagtgcagggcagaatctgcgtgcacttccgccccataaaacaaccgactaacacccgacgccgccacagcaaaaaacagaatgcacggcaggtacaggtaccggtcgttcatcagtgtggtgattttgaagaagtttaataccggcagcagcagcagcagataagtgacggccgcccaaagaatcagcggacatttggagcggtatttccagatcgctgcggcgaccagcaaccaacccgttgttgccagcaggaccgatttccagattccgaccgtcggagggtcatacagcacgcacagatcgcttggccacaacatcatgccgatgtaccgccacatgatggtggtatcgatcgcgatgatgtgccaaatgctgtaatcgaggtggcctcgaagaccgcccagaatcgaatgctgagacgccatcgtcttgaacagcagtagcagacacatcacgccaggaatcacctgccgcacgaacgcatccgcaaatgtctgacgacggacccatacatcgtaggccagcacaacagccggaacgacgactgccaaagccttcgacagcaacgccgccgccagccacagaacgtaccaggcttcattcttcggcttcaggtccggcctcagtcggacaagtagcgcggccagcataaacgtggccgaaagcagtcccttccgcgacgaaatccacgccaccgtttcaatctgtaccgggtgaaccagaaacaacgccgccgtcgtccatgccacgaagcggttgtttgtgagttgcttgaccagcagcaacaccagcactccattaaccagatgcaacagaacattggtcgcgtggtagccgctgggattcaggccccagattgtgtgatcgatcagtagtgaaagaatggttaacggggcaaaattgcgagtcaccgtttcggtcgcgacgccaacaaggtttgatggcgaccagcttttgatcaggtcgttgtgcagcacgtaggccggatcgtcccagttgacgaagtcgaacatcaccgatggccagaaggcaaacagacctgcaaccaatagaaccgcgtaagcccaccaggggaagttctttgtttcagacgacatgattgggaatctcaggcggacgtgatgcgaaggaacggaaatggatttatccgttcccaagcatggcacgagaatcagccccagacgttgcaaaaagacaacaccaccaaaattcgctaccaaccgtgactgtcagatttggagtattcagcacaatcagactgcaatacgcccgcattagagccgtgtactttttgtcgtgggcggttcgggctcatgagacctcgggcactatcggttttgctcacgttcggaacggctgccgctgcagtttcagttttaccccagacacgatttggacggtcccaacgtgaaccatggccgctcgcctcactatggtgctgatagccgagcgatctgcttaacgccgagtgcacgattgtagattcgaacgtccttcattcgcccgttaaaataatcgtgctgaccgaagccgattttcagcggctgctcaggtttcaattgaaatgcacttccatcgaaggtcgtgctctctgctacgagctcgccatcgacgaataatcgcagcttgtcccccgctcgcactgccgccagatgtcgccagccagatttcaattgcttgtcgaaggttaccgctttgccagcttccagagaatgcacgtgtcctgagggaagtacaccgcagtagagcttgccattgaaaacagccatcgaccacgctcgccgatatcgcacgtccggcgttacgtcgagttggccggtgttggtccagtggctttcgccgtcgtagcggtacacgttggcaagcggcagcgtgcccgcgtagaacttaccgttgtagacggaaacagccatcacttctgtttcttcacccagacgtccaatgtgcgaccagttcttgccgccatcgtgacgatacacagatccggtcggccacgtaccgacgtgcaacgccccttcgtaggtcattgccgaatacacttgcgttgtttccggtacaggcccgagcgattcccaatcggttccgccttgatagcgaaggaagccgccatcgtcatagctgagtccgaacagcccgccattgtgcacaccaaggtgtgttatccgcagaccgggacaaccgcagtcagtccacttgccgatgccgtcgaatcgatacatgcctcgggttcgtggcttgtcacgccaggccccggtcgtacctgtgcccgcgtagagttcgccgttgaacacggctaatccgctgatgctgcggacgtccgcgaccttgccgcagttggtccaggcggtaccgccctcatagcggtaaaccgttccaccgtgatgaaggttgggagacaacggcagcgacgagccgccaccgctgtaaagttccgaaccgacatacaatttcccgttgtagacggccatcgccttaatgcagttggccttgtctggcgctccgcaatcaatccactttttgtcaccggcgtagcgatacacacgtccgcggtcattctcacccggctcccaggtcgaacagtaaaggtccccatcgaacacaaccagcgaattaatcaactggttgttcccgggacgaccacaatcaacccactggtcgccactctgcgccgcatcgatgccgaagaacacattgcggtaattggactgcgcgctggtgacgcccgcatagttcatcagaccaaaattgaatccgtttcgcgtcgtcggatcgtaccagctcatcacatcgcccagcacgtcgtccagcttctggtctgtatgaatccaggcggcaagcgtgaacgactcggcaccaagttccggcaccttctcggcgggcacctctaaccaggcgtcgataccatcaaaggatgcaccttcgttctcgtcaaacgatacgccgtggttaaccgcgtggcgattggctcctgacgcatcgcgagcgtctgtcgtcaaaggccaatgggcgaccattccatcggcggcgatcgtgacggaagccgtcaacaggaataggaatgagctgcacaacgctgagttcgttttcataatacctaccgggcaaggttcgtggtggggaccgcagggcaatgccgacgcggtttaatgagcggaaatgccaaacaggagctgttaccttctttcgtggacggctcatgctggtggaaacagtctccatagtgtgaaacgcttgtcccgcggccacaagtcagcgcaattggctgaacctcgatatggtgcatagaaattgaaatcgatcagcgagtttcatgacgctgtggagggtgccttcgaggccaggaaatgctggttggaagaagccaaccataagtccaaaaacggcttcccggtggagcggttgcgctaaagaaaaggggaaacacagcgcacaaaaaaaggacggtccaggaccgtccttaacggatgtgtaaacacattgccgtgcggtagagaaccttactgtgataagcaggaaccgctactcggatacactgcagaaattttaccaccattgatttccgttgcaagcacgatacgctgtttcccctgggaaggtaacaggccaccagtaggtcccggcggcccgacggaacttccgccgacaggcggacctacgcgcggctgacttccgcacaaaaaaaaagttgagcaatctaagacacttcaagacaaggtcgcagcaaagctgcgatgtaccgtcgggccgccggtacctactttggacaaaaccatgaactacattcttgggctggatcttggttccgcctcacttggctgggcagttttggaatgcaccgaagtcgacggcagcctgcagccgactcgcatcgaacgcacgggtgtgcgaattttcgaagccggcgtggaaggcgacatcgaacagggccgcgacgcctctcgagcagccaaacggcgagaagctcgtcaaccgcgtcgtcaaaactggcggacgcagcaacgaaaacgcaaactgttccgactattacagcaacacggactgctgccggcttcagaaaaggacgacgcgatcagccgcaaagccgtgttcgatcaacttgacaaggaactgaccgaaaaacacatcacggaaggcgatcacacagcccatcagcacctgccgtacctgctgcgaatgctggcatctggcgcaaaggtgaagccatttgaacttggacgagcgatctacagcctcgctcagcgccgtggctttctcagcaaccgcaaagctgacacagatgaaaaagaagacggcgttgtcaaagcgagcatctccgaacttggcggtcaaatagctggtcgcacgatcgctcagacgtttgtcgaagacatcagtccggaccatgaagatcctggtcgtcaacgcatacggcaacgctacacagcccgtgagatgtttcatgacgaattcaatcgaattcgaaaacagcagcaaccgcacttcgacctcgcggacaatgactgggataccgtttataaaacaatcttctttcagcgtccgttgaagtcgcagcgtcaccgcatcggccgttgcgaaatcgatggcggtcagcgttgtcttgatgctcttgatgtctttcagcagtttcgtatctggcacgcggtgcagaatctgcgactcgcggacgcctacagtttggggcgggacggtcggctgacgctggaagaacagcagaagattgtcgacgcattgcagactcaggccacgatgacgtggggaaaagtcgttacgctgctgggtctaaaacgcggcacgaagttcacaattcaggaatggaacacgaaagggctaacagggcatcgcaccaactctgcgatgatgcacgtcttcggcgatgaatggctggacaggccattggaagaacgagacgccatcacaaaggaagtcgtctacttccgcaaaccatcagcgatgagaaaacggggccaggaagcatggggactgtcagaggaacaggccgccctgctaccgtcaactcggctggaagaagctcacgcccgacattccgccgcgacattggccatctttgtcgaacgcatgagtcgtggcgaagactattccaccattcgcaaagacattaccggcaaagacgacagcgaaccactcgaccagcttccaccgctcagcaaagccgggctggacatcaccaaccccgccgtcattcgtggcctgacagaacttcgcaaggttgtgaacgaactggtgcggcaatacggcaagcccatcggcatccgcatcgaactgtctcggtcgctaaagaattcgcgagacaaacgcatcaagctgcacaaagataacgaagatcgtcgtaagcgtcgcgagaaggcgatcgaaggtattctgaagcaaatccctggccggtactcgggcaacgatatcgaaaaatggctactcgcagaagaatgcggctggcactgtccgtacaccggaagaccgatttcgccttccacactgcttgggtcgcaaccacaattcgacatcgagcacattttcccgcgccgatatctcgacaacagcttcagcaataagacgttgtgctatcacgaattcaatcgcaacgtcaaaaagaaccaaaccgccttcgatgcgtgttccggcctcgatagctgggacgaaatcctgcagcgtgtcaacaactttgatgggccggtcgcagcattaaaacgtaaacgctttctgaccgcagcgaaagaaattccggacggtttcacttcaaaacacctcaacgataatcgctacaacgcagttgtcgcgaagaaatacgtggccatgctgtatggcgggctgtcagacgcggatggtagtcagcgagtctttgctgtcacgggcggacacacggcactgctgcggcgagaatggggcctgaattcgattttaagcggaaccgaagagaaaacacgagacgaccatcggcaccacgccgtcgatgcggtggtgatcgcattgacagacccggcaagaattcaggctttggtaaacgctgcagagcttgccgaaaagaaagcgtctcgccgcttttacgaagccgtccaggacccgtggccgaagttcagcagcaaagtcgctgattcaatcaatgaaatagtggtttcccaccgtccgaccagaactcttccgggagctctgcatgcggaatcgatttatagcaaaccgcacatcgacaaagacggcaacacgaaccatcgcattcggaaacacatcaccaagctgtctgcaaccgaattgaagaaggacaagattgtcgacccagcgattcgcgatctggtgaaggccaaactgaaagaactcggcgaatccaatccggcgaaagccttcgccgaggagaagaaccacccgttcttaaccgcaaaagacggtcgcaaaataccgattcacaaagtgcgagtgtttgccgacaagaaacctcgggcaatcgccaaaaacgagcggcagcgctatgtcgccagcggaaaagattccaactttgcgtccatgatttacgccgtcgtcgacaaagacggccacgaaatcaaatgggaacacaaagtcatcacccgcctggaggcgcacgaacgtaagactcgtaatcgtacggtgaacggagagaaagtgctgctaccagatcccaccgacttcaacgacgacaagaagcgggtcttcaaattcgcgttgtgtaagaacgatacagtgatgctggaaggccccgacggagacgacgtgatttgtcggatacagaagatcagtcaagccgaaattcagctgtgtccactggcgacgccgtctgttcaaggaaaagctcgttcgaaatggaaccaaatccaatcaatcgacaatctgcgaaaatggaacctcagaacggttctaatttctccgacgggtattgagcataggtaggttccggcggcccgacggaacttccgccgacaggcggacctaggcgcggctgacttccgcacagaacaaacgttgagcaatctaagacacctcaaggcaaggtcgcagcagtgctgcgatgtgccgtcgggtcgccggcacctacgaagacattatcgatggtcagaaagccaaagacgaccaacttctgggtcggccgactaccgcattgggaagttgaggatggtcgctactttgtaacgattcatcttgccggtgcgattccccaggttggacaacaacggattcgcgccatcgttgatagctaccagcgtcatcccaatgtcaactcttctgaacgcctcagacattcccgacgaatcttccgggaaatggaagcatggctggatcgaacaccacaaagaacggacctgaaaattcctaatgttgccgacgctgtcaaagaagcgatcgcacaccgatcaaactcaggtatttgggaaatgcacgaatgggtgattatgccaaaccacatccacctgttctttgaactcacgtctggcaatctgaagtctgttctggagggtttcaagcaacgtaccggccgcgccgccgggaaagttctcgacgtgcccgaacaacgtttctggcaacgcgagtggttcgaccactggtcgtgtaccgacgaagaggatgctcgaattatgcgctacgttcgagagaacccagtcaaagccgggttgtgtgaacacccaagcgagtggcaatacagttcagctcagtaggttccggcgcaccgacacgcggctgacttccgcacagaaaacacgttcagcaatctaagacaccgcaagacaagtcgcagcaatgctgcgatgtgccgtcgggccgccggcacctacattttcttcttgcgtcggatttgcacgaccgttcatcataatggtatctgtccggcatggctggccgttcgtcacgttcgaaggcccgcctatgcgaaacagaatactcgaaatatcagaatctccctgccggctccgcgtcgaacatcagcaactggtggtggatcgcggtaccgaggaagacgggctgttcccaaccaaaattccgttggaagatatcgcagccgtcgttgtcgctcatccgcaggtttcgtacacgcaatccgtgctgtcggaactcagcgaacgcggcgcggcctttgtcacctgcaatcgcaaccgcatgcccgtcggaattctgttgccactgaatgccaacagtgtgcagacagagcgatttcgtcgtcaactggaacttaagctgccgcagaagaaacggctatggcaacaaatcgtcaaatcaaaaatcgacatgcaggctcaactgctgcaggaagttcacggcgagacatttggcctgccaccactgatcccgctcgttcgcagcggcgacacgaccaatgtcgaagcacgagccgctcgccgatactggacggcactatttggtaaagatttccggcgagacatcgacgccgagaaccaaaaccgatttctgaattacggctacgcgattttgcgcgctgccacggcgcgagcaatctgtgcggctgggctgcatccatcactggggctgcaccatcacaacaagtacaacgcctggtgcctggccgatgacgtgatggaaccgtttcgtccagtcgtcgacaaggtcgtcgtccatatggttaacgaagatggggccgatgcggaatttaatcagcaacggcgagcgatcctgattcgctgtttgttgtcgcgagtcttcgttcacgaccaacagcgcaccgtgctggatgcgttgagtcttgttgcggcgtcactggtggatgccctttccggctcggaggcaacgctgtcacttccgcaggagttcgctcatgccgcgtagtgaatttgtgatgtcggggtacaaagaaatgtggctgttcgcgatgttcgatttacccgtgaaatcgaaagaggacaaacgagcgtattcccgctttcgcacactgcttttgaatgaaggattcagtaaaatgcagttcagcgtgtacgccagattttgcggcagtgaagaagtcgcggaaactcatcgcgaacgcttaaggcgcaagctgccctccgacggtcacgtgcgtctgttggccgtaaccgatcgtcagttcggcaggatggaagtgttctacggaaaaaaacgtggtgaaaccgaatcaaaaccagaacaactgcagcttttttaagatggcaattcgccacaagctgttccgagttttgaagttagccgcgatatagtgtatccgagcagccgttcccgacgaaccacagcatctccagagcatggcctacgcttacaaaagtgtatccgagcagccgttcccgacgaaccacagcgtacgttctggcctgtagcggtagagtaaagtgtatccgagcagccgttcccgacgaaccacagcaatagtagtgcaggtttcccagtcccaagtagtgtatccgagcagccgttcccgacgaaccacagcgtcaacgtcgtatcacccgtattcgtgatcagtgtatccgagcagccgttcccgacgaaccacagccaagatcgcgccgggaggattaagcggtttagtgtatccgagcagccgttcccgacgaaccacagctggcgcaccagcgctgtggttggcaagtggagtgtatccgagcagccgttcccgacgaaccacagcgagattggggaatgagcaacctgcttttgaagtgtatccgagcagccgttcccgacgaaccacagcgcgcttcaggtcattcacacgatgacggcgagtgtatccgagcagccgttcccgacgaaccacagctggtgtgacatcctgcttgagcacattttgagtgtatccgagcagccgttcccgacgaaccacagctacggcgggtccgccatgtatgcgtacacgagtgtatccgagcagccgttcccgacgaaccacagcgccaaaaacgtactaaccgcgatgattcaaagtgtatccgagcagccgttcccgacgaaccacagctgggccgggttggtgtagcgtgaacggtggcttgcgaaatcggcttcttcaaccctggcggcggcggacgtcttctgcgatggcttgggggttcgggacgtctttgatgacgatttccatttcgtcctggccggaactggagatggcgatgtctccgaaaccgagtagacgttccagcaggttttgatcgatcttcatgttgcgaacatcgtcgtaacgaacctcactggtgccgcgatgaatgatgccgaatcggtagatcagacgttcgctggtcaacgttagtgactgcatgcggctggcgacgtaccacttcaggagaaacactccggcgacgagggccactacgccggatccaatcagaaggggcagtgcagggatgcccagccaggcgtcgccggccagtcccatcacgagtccgagcaccgctccaacgagcaggacggcacacagaagggcggccagaaagtttgtgcggagcacgaccgggtgaatcacgacgtccacgtgttcgtcatcggcaggaatttcaacggttggaatttctgcgcccgcaacaatctcagattgatgcaccgaatgggcgacgggtgcctcagcccgaaacggtttttcacacacggggcagtcgatcgtatcgcccagcaagtgttgcaggactcccacaactctgtcgcaatgagggcacttgaagttcagtgtatcagtggtggcttcttgtagttcattcatgggtacagctgttgcgaaagtttggcgatcacgggtatagggaactcttccgccgtttgaagcggctgagattatttttggcagcctccttcggccgatgtctgaagtcaggctacgaacaattgccacatggatgtcgaaactaagcggctgtttcggccacaagttccggttcagcggttttgggactttgactattgcttccagttttggctgttgctggttcgggagattgacgagctgctggccgtgcttcgtggaacccgtcaatcgcggcttccggtgcatgggcctgaatcgtctccagaacaagacgagcgacgatcagcatggggacagccagaaagactccgacaattccccacatccagccccaaaacaacaacgacagcatcaccatcacgggacttaaattcatggaacgtccgacgatactcggcgtaataaattgtccttcaattgcggtcagcaatagaaaaacagtgcctaccagaaatggccaggtcgaactttcaaaactgacaacggccgcaagaaagactgtcacgctgccgataacagcgcccagaaccggaacaaagttaagcaccgtggccattgcaccccacatgatgggcgacggcattccgagtgcccacatcgcgagtgcaactgccactccaagaccaagattgatggccgtgacctgaccaaggtagcggctcaatccatcttcaatccgttccagaatcgtcatgaattccaggcgcgccgaaaacgatggcagagttcttaggacgcttgcgaggacctgatcgcccgtcgacagtagaaagaacagcagcacgccaacgaccgtcacagccgatatcaggctgctggtgccgctgagcagaaacatattgttcgaccacgcgggttggcggacttcaacgggcaccggagcatcattgctggcttcttcgggttcttcacccatggaagaaattttatccgtggcttcgttcacggcgctgactttgtcgaacacgaaatccagtttcgacttgatcgtcaccacatattcggggccactggcgaacatctttttcgcgggttgatagaccgtaaatacgcttacgcccagacccaacagtagcgtgccggtgataatgcaggctccaatcgtatgtggtaatcctcgacgacgcagaaaccgcaacaccggccgcagcgtcagataggcgaacaatgccagaacaatcggaatcagcagactgcgagcgtagtagatcgcgaagcacaacagcagacccgcacacagttgcgtcgaaaacgcggcgcgaggtctcgggcgagggcctgctggtgatggcgttgattcggggttcttgagcatgtgatatcctctggttggatggatcagcgtttcggagcgagtcggcgtagcaaaatgagtacgagaactcctccgatgacggatccaatgagtccagccggatagattcgttcgcctgattctccaaagatcagatgccccagaaatccgcccgcgaacgatcctccgacgccgaccaggattgttcccacacatccgatgggatctcgccccggagtgagcagtcgagcgatcgcaccggcaaacagtccgaagacgcaccagccgataaagttaccgatcatgagtttgatttccgtgagttgtggttcaggctcctgacagtaaatgcacgtgccgtgccggaggcggtaacttcttgcggtgactgcacaatcgccacgcccaccccgcatcaaatgccttctaatggtgaaaacagcgctgagctgctcgcccgccgaccaataggaacgatcagcaaccgcgccaccttggcggattcccttgccagcgataacatcccgtaggactggatgacgtcgcgaatctggtgcttcgtcattctgtggaatgactgttcactcttagttagccatggaggtcttcgatgaatctaacgttgcttcttcactgttgttttctcgccccgatcttggcagacgctcccgcagaatccgttgcagtggttaatgtgaaggaatgcttcaggcatgtccccagcgctcgcgccgaccgggcaaaaatcgttgagttgatcactgaagcggatgctgaggcgaggatgtttgtcgaggaagtaaaagaacttgagtcgctggcggaacggagtggttcgtcagagacgcagcgggtcgatgcacggctgttgaagttcgaattcggaacacttcgtcgtcgggagcaacaacggatcaaaaaagcagaaagcgagatgtttcagaaatggcgacaatgcgtagctgtccatttccgcgtggtgcgcagcgtgaggtgtggtgttcagttggcggggacgagtttggacagtcgcgactgaccgggcggcgcggaggtcaggccgacttcaagtttcagtcgatcaaacagactgaatccatcctgctgccacgtcatgacctcggccaccacggaactgagcgttggtgttttcagatggagattcagcgattccaggacgcttgtaagaatgctgcggcgacgggctcccttcgatgttttgctcgttcgacctgtgcgacggtccatggccgcgccgcgaagactgcgttccgcttcgttgttcgttgctggcgcggccgggcttgtcacaaaacaaaacaactcctcttccgtcatcagccgaatcagttctgagaccaggttgtcaaaatccttgccgaagtcggccgcccgaacatcggaatcctcggcgcagtaacgcaccagcagagccgccagcgtgttatcaagttcatcgaccttcgccgcacgaccggcatcgccaagacgaccatcggcggcgtggcgtttggccgcgtagaaaatttccagcaggccgtcgagcagtcgctggtactcttcgttgtccggcttcagcagcgtcagacggatggccttccgcagcaggtgagcccagcatttctgtgcgtgactgaaacctcggtacacggccgcatcgtccgaaacaagcacgcctccaaacaattctttcgacaggatctgagccagtgtgtcgccgtctttgcggcatccgaagatcagcacgcgcgccttctccgacaaaaaagcccacacgctgttgatactccaactggtttcgtctgcatgcacaatcgcactgaacgccatcaggtcacacagagattcgaattcctgttcccaacgccgtgccagttgattcaacagagcgtccgcctgggatttgccgagcggcagattccagaagaattcaatcaatgcacacgtcttgtcgatcgacagtcccgtgatggtcacaatgcgagccagcgcgatatgaacttcaatgccgaattcggaccgcggccacacgcccggaatttcggatttctcgccgttggggccgtgatagatttcatagacgacctgcacggcttggccgttgatcactctccagacgaaacgttcccgaacgaaacggcactctgcgacgttgtaaccttccggcagaatgagttcgcgtcgttcggcgttgtccgctttctgctcggttgtgcgacgaccgcgacgcgccgaggattgttttttgcgaccttttcggcggcccgtttcagcgcggcgtctctcttccgccgtcaccgaaaacgcctcgtcgagtcgctctgtggggttcttaccttcgagctcttcaatccgatcacgcagccgccggttctcgtcccgcagctccgcaacctcacgctgcaggctaagcacaagctgcttcacttccacagcgatgatctgactgacatccgtgtccatccacctgtcgtatcaaaatctaaccgacagaaaaagaccagtctccaagctgaaatggacagctacgacaatgcattgatgccgcagtgaagcaagtagctgagcgcgacaacttcacaatcgttctttacatcggtgaagacaggaatggtaacgaaggcgcaacagcagagtttcagcaaatgatcgccagtagccacattgggtttatggtggatcaggaccgaacggatatcacggcaagaattgtcgctcaaatgtctacagcagcatctatggaagaagttgaacgagagaacaacattggcgagcaataacacgcagtgaccgtcaggcgaaactgtatagatcggagacataggtgacaggtgttcgggcagacggcaggcgcttttgattgaatcgttttttccattctggagagagctcgatgagccggaatggaccgccagctttgccgaaccgcatgcgaggccgctacagttggtgtcagattgatgaagacaagcgacgaagatgaggacaggggcatgagacgttttttgattctgtcgcccgcgctgcggacgttgagtgtcgtctcaatgctcttggctctcctcggcgcctgctcagcagccgacgatgcgatcgttatcaacccgaacgccacgacgtacgattttcatccggcggctgcagagacggacgacggggcgacatggtttgtgtggcacggttacgcgaacgggcgtgaccagattctggctcggcgcagggacgccaatgagtccataggtgatttgcagcaggtgtccgaacagggagccgtgcacgggcctccgacggttgtctcaacggacgaaggcatcgccgtggtttggagctcaaagcagaaggatcgctggcgaattttgtggcgagaatttcgcggcggcgcgtggcggaagtcggtcgctatcacttcagatgatcgcgaatgcatttattgcaccgctctgcaacaggctgacgacagcacaatggtggcgtggtcggaacatcagagcggacaatggaaggttcgcgcttgtcgagtggtcgacggtacgccggaacgagtgttcgatgtgtcgacagggcaggccaacgccttcaggcccgtgctgattcagcatgatggaagtgtgtgggcattctgggaccagtatgcggaattgaattattccgtgcatggaagaagcgtgttcccgcagaagtcggacgtggagcaggtgtcaccggcggacgaattttgcctgactcccaccgcgctgtctcatccaagtggcttgcatgtggcgtggctgcggaaggttgatgtggtgggcgggccgggcgtgattagtcaatggcatacgctacacacggctgttcgcggcgatgacggctggcaacagatccacacggaagatggccgcacggcagcggccgaactaactcagggtttgatggcgcagatccagcccaaagctgtcgccaccggcgggtacctcgggccacgcacgaaaccgatgctgctggcggaagatgatcgcgtgtggttgttgtgggaacgcaagtcgaatcatcgtggcagcacgccgagtgtgtccggcgatctggtcggtcggcccagcgccaatggaacgtggcaggaacccgtcgtgttgcagcagaagcgggtcgactatcacgtcatgcatccggcaacagcggatgctggcaaagcgaagatgctcgcttcgcatttgccgaagcgagcgatccggtcgtatgaaatgtatgagctgaatttgcgcgacgcgcagccgtttcatcaggacgactggattggctggcagccggtggacctgccgatcaaagaagaagtcactccgcgacgaagcatcaccgtcgacggtaagacgtacaagttgttctgggctgatatgcactgtcacaacggtctgacggccgatgcagaaggccagccagacgagatgcaggtgtacgctcgggatcgagcgaacctggatgtggttgtgtttacgaacaacgacttctatcaggttccgctaactcagtatgaattcgaacttggcaatctgttcgcgaaaacgttttcagcggcggccgcagcgggacagagtcgtccgtttttgtcgttgccgggttatgagtggacgtcacggattccgggagtcgccacggcatcgctggatgatcctggcaactggctgccaccgtaccagtatcggtcgtacccgaatcatcgcagcgttatctattctgcaaacagtggtccgctggtgcatttcccggaggtcggcaacgacatcgcgaagctgaacgacgcggttgagaaagcgggcggggtcacactgtcgcagcatccggcgttcaagctgtcaggccatccggtggaagtgggcctggaattgacatccggctggagcaactacatcgcgctgaagcctgcg

SEQ ID NO: 784 - DNA, 16806 bp, synthetic construct
  misc_feature 1..16806: note = Synthetic
  source 1..16806: mol_type = other DNA
agcccgctctgaaacagcggagcgctcaacggtaacactcgataccgatcaaccggctgccgacgtcgcacggaaaatctacggcgccttcggaaaacgcaccgaattcgtggaagccggtccgcaaggtctgccggcgttccatgtctaccggggatcgtccgatccgggcgaagccgagtcggcaacgcagacgaaggacgtctggttcaccgtcgaactcgatcagtcacggaatcaactccacctgcacggcgcggattcggtcaccgacagcctggtcaagctggtccacctgctcgatgtcgccccggcccccggcgccgcaaccacgcgcgtcattcccgacgccggaaacgccggcaagatcgcccgccaactcgaaccgcaactcgcccagcttcaggacgcccgcaaagaagccgcgcagaatgagccggccgccccggacgacgaaaccgctccggacgcgcccgcgcagagcgaccccctcgatccgtcacaattgggcgacatgcccctcccgcagttgattggaaacctgcggggagacgtgaccgtcgaggcgcttcaggatctcgatctcctgattctgcgcggcaacgaagcagacgtcgaagccgtcatggaagtcatccgcgccattgaagaactggccatcggttcgactccggagatccatctgctcaacctgagatacgtcgactcggaatcactcgccgcgcttctcaacgatgtctacgaacgactcagccaactcaacaccgattccgccgccgccgtgcggcagacgaagccggtgaacgtcgtccccgtgggacggccgaacgcgattctgatcatcgcccccggcagcgtgatgccctccgtgttggacctcgccgagcaactcgaccagcccgtcacgcccggcagcgaagtcgaggtgttcccgctcaagagtgcggtctcctcgcaggtcgccgccctcatcgaagagttctatgaggatcgtcccggactggccacgcaggtgcgcgtcgtcgacgacgtccggacgaactcggtcgtggtcaacgccagccccgcggaactcgaagaggtcgcacggctggttcgccagatcgatcgcgaccgcgcgcggtccgtcaatcaggtcaagctcgtcccgctggaatacgccctcgccgacgaactcgccgagttcctcacgctggcgatccagagcatcctcaacccgcagcaggcccaggggcagttgggacagttcggcggtgcaggggcccagggatcggaagatctccaggaaccgaaatcggtcgtcctcgaattcctcaccacggatggttcggtccagcgcctgctccgttccggactgctcgcagacgtccgcatcacggccgacctgcggaccaaccgggtcatgattaccgcgccggaagccagcatgccgctgttcgttgaactcgtcaaggtgctcgaccagcccaccaacgccgtggccgacatcaaggtgcacacgctcgaaaacgccgacgcgaccgcggtcgccgaactgctgctcaccctctttcccgaacccgacgaagacgagccgggcatccaggtcgccggttcgggcgacgcgggcgccagcctcattccgctccgcgtctcggtcgacacccgaaccaacagcctcgtgattgtcgccagccgcgacgtcatggccgtcgtggaagcgatcctctaccggctcgacgccggagacctgagaaaccggcggatcgaggtgctccggctccgcaacaacccggcgcaaagcatcgcagacgccatcaacgtcttcctgcagtcgcagcgcgacctgctgctgctcgatcccgacctcatcagctcgaccgagctgctgcaacaggaagtcatcgtcacccccgagcctctcagcaacaacctcatcatcagcgccacgccccgctacttcgaccagattcgcgatctcgccctcgaactcgaccgcgaaccggagcaggtcgtcattcaggcgctgctggtcgaggtcacgctcgacgacaccgacgaactcggcatggaactcgggttccaggatcccgtgctcttcgaccgcagcctgctcacagacgtcgtgaccatcaccgaaacaatcgccggcgtcgataccacccgcgtcgtgtcggtcacaggcgcgcccggattcggcttcaacaaccaaccgttcggcaacaacgtgatcgggaaccccggccgcgtcggaacgcaggggctcagcaactttgccctcggccgcaccaacgacgacctcggcttcggcggactcgtcctctccgccagttccgattccgtcagcgtgctcgtccgcgctctcgcctcccgccgagacgtgcgcgtcctctcgcgtccgcaggtcaccgccctggacaatcagatcgctcaggttcaggtcggacagcaggtgccgatcgtcgacggcgtcaacatcaccgcccagggcatcgccaatccgaacatcattcaggatgaggccggcatcatcctcaccgtcactccccgaatcagccccgacgggcagatcgtcatggaggtcgtcgcggagaagagcgccttcctcggcgacggcgtgccgatcttcaccgacaccgacggcgccgtcatcacctcgcccatcaaggacatcaccaccgccctcacctcggtcaaggtgcccgacggacagacgatcgtgatcggcggcatgatcaccaaaaccgaagacaacgatcaccgcaaagtgccctacctgggcgacatccccctcatcggcagcctgttccgctacgactcttcgcagcaccgccgcacggaattgctcatcttcctcaccccgcgaatcgtccgcaccgatgccgatatggaactgatcaagcacgtcgagttcgagcggatgcacgccttcgaggacgaggtcgaaaaaatccacggaccgatcttcgggattccgtccgcccagggtgggttgcccgccgcctatcccggcgccatcaatccgcccgcgcccggttcgatgagactgccgaccggtcccgccattcccgaagtccccgtgcctccggcgccggaagtcgacgagacacagccgcgcgtcccgcccaccgtacccgattcggatcgcgagtcctcacaggaacccgccggtcccggagtccgtcgcctgccctaggacatctgcgccgcgaattcgccggcagcaccccgtaatgctgattcaatccaggttctccctatcaaccactccgccggcaggcaggacttcatcacacaactccgcgcctccgtggtaaatatctcgggttgcgcgtgccgctgtgtcaccgcattcaagtctccgtccgcagaagggacgaacgactcatgagcattcgcttgttctcactgctcactgtcctgattgttccgctcatgggcggatgtcagtcgctcgatctcatttcgttctccgacgacgagccgcagatcccggccgctaccgacgtcaatcccgtgcgggagatcatctgcatgtgggaggcggcggaagggctcggcctcgacggaaagcccgctcggggattcgcgggacagatcctcttcttcaccgcagcgcatccgcagccggtccgagccgacggggacgtccggatcctcttgtatgacaaacagggactggcggaggacgatccgcatccgttcaagcagtacgaattctccagcgaagtctgggacgccttcctgcgggatacaaacctgggcgcagcgcaccacgtctttattcccgacccccggccggggaactactacgaagaatgcgcaatacgcgttgtcttcaccccgaaatccgggctgcccgtctattccaaaacggccatggtcgtgctccccggccgcaagcggccggaggagacgcgcaccgcggaatcggccgtcgagacggcgatgcgttccgccgcgcaacacgtcgaaacgtctcctccccgcgatctgctctcgctcaaggtctccgccgatccgatgcaacctcgccgcggcgccgctcgcatcaatgaactccgccgcaccgcggatcaaatgatgcagggactccagcccgatgccgatgaaaacccggcaggccaaaccgcgccggaatcggcctcccggccggagccgacccggccccgctatcgactcaccggagccgccgacgaatccacccagcgcggcctccggccgcaaccaatgtagccgactcgctccgcgagtcggatgtccatgacgaggaacttgctgcacgcgaaaattgcgcgccacgcgacgattctccccggtagtagcacagagttccctcaagaacacgatcaagcctgttggcgagcggcgctcccgtggtagaatctcgggcggcggaattcgtacgaaaatcccgactcgacgctgacgaaacatgcctgatttcagactctccctgattgtcgccgcactgctgctcaccgttgcatcgaccgcctcggcacagacaaacggcctcttcggaaacagcagtcccatcaatcgcacctccgagtcgtcgctgctgacgggcggtatggggcgaaccggcggaacccgcggcatcggcggtcaacagacaggagccggcatcgccgacccacagatcagcaccgaattgggcgcgctcagttcgatggtggggcagggcagcttcgtcggccaggggaatacagcgcaggggttcgtcggcagccggcaggcgggtacgcagacgcagggcgcgtcgaatcgcaacttctccgcaagcggcttttccgggggcgatgatttcaatcagttcaaccagcagcaggggcaaggtccgtccagccgccgcaggatccagccgcagtaccgcattgcgttcgagcgtccccccctcgccacatccgaggtcaacgatcgtgtgcaacagtccttgagccggctgtcagagacgcatcccgcgtttgacggcatcgacgtcgccgtagacgaagccggcacggtcggcctgcgcggaaccgtgcagtccgatgacgtccgccgcctcgtggaggcgatcgttcgtctcgaacccggcgtccgcgacgtccagaacgaactcgacatcgccgccgacctcacgactccctgacagctcctccctgcttcaccgccagacgccggccccatacgcaacaggggcccccaaagacgcagcatcggctcccgaacgcccctcagttcagatccgaaactgagcggcgaagccgcgccagcatatagctgcgggcgtcagcccgcagtccaaaaggcgaaccaaaacggagccgcgaacgcggcgccggcaagctcacccaccgcaacgatcagcgcgttgacatgggccgacgcgattcgccattctccagatcgcgacgcggcgccggattgacgcaccgccgccgaggcacggacgatccatcccaacggcggggcaacgaggctcaaccacatggcggaaacggcccagctacttcaaatcaacggactgaaaacctatttccagtccgaccagggcgccgtccgcgccgtcgatgaccttaccgtccagatcgccgaaggccacaccctgggactcgtcggcgaaagcggatcgggcaagtcggtcaccgcgctttcgatcatgcgcctgctccccgacgtcgccgcccggatcgccggaggcaccgtctcctttctcggccgcgacctcgtcaaactccccgacgccgagatgcgcagcatccgcggtcgcgacatcagcatgatctttcaggagccgggcacgtcgctcaatcctgtcttcaaggtcggcaaacaggtcatggaggcgatcgtcctgcaccagaaagtctccagatccgaggcccgcgagcgaacgatcgatctctttcgagaagtcggcatcccggaacccgaacggcggatcgacagctacccgcacgaaatgtccggcggacagaagcagcgcgtcatgatcgccatggccctctcctgcaatccgaagctcctcatcgccgacgagccgaccaccgcgctcgacgtcaccatccagaaacagatcctcgacctcatccgcaaactccgcgacgagcgcggcatggccgtgctcttcatcacgcacgacctcggcgtcattgccgaaatcgcagacgaagtcgccgtcatgtttcgcggcgaactcgtcgagcacggcgacatcgaacagatcctcaccaatccccagcatccctacaccaaaggcctcctcgcctgccggcctcacaccgacaccacctacaagcggcttcccaccgtctcggacttcatgaagctcagcgtcgccgaagacggttccgtgacgatcaccgaaaagcccatggacgaaggccgcctccagcaactcgccgagaaaggccgcggtcgactcctccatccccgcagcgaacttgaagcgatcggccacccctacgacgaaaccagacacgccgccgacaccaccaccgtccccgaggggcaagtccccatcctcgccatcgaaaacctcaaggtctactaccccatcaagcaaggcgtctttcgtcgcaccgtcggctacgtcaaggcggtcgacggcatcagcttcaacgtctatcgcggacagactctcgggctggtcggcgaatccggctgcggaaaaaccaccaccggccgggccatcgtccgcctcacgaaaatcaccgacggacgcgcagtcttcgacgggcaggacgtcgcccacatccacggcgaagaactccgccacatgcgcagccgcatccagatcatcttccaggatccctacagctcgctgaacccccgcatgaccatcgagaacatgctcatcgaggccatgtcggtccatcgcatcggcgactcccgcgccgaccgccgcgatcgcgccgccaggctcctggtcgaagtcggcctcgaagccggccacctcggccgctatccccacgagttttccggcgggcagcggcaacgcatctccgtcgcccgcgccctcgccgtcgaacccgaattcatcatctgcgacgagtcagtctccgcgctcgacgtttccgtccaggcccaggtattgaacctcctcaaggacctccaggaagaacgcggcctgacctacatcttcatcagccacgacctcagcgtcgtcaagttcatgtccgacatgatggccgtgatgaacgacggcaagatcgtcgagttcggcccctccgaaaacatctacgccgcaccgcacgaggactacaccaaacgccttatctcctccatccccgaccccgacatccagaaagtccgcgagcgaaaacaacaaagagaagccgcccgaaaaaaacgcctcgctgctgtcacataaccctccttctcccaagtccaaatcccgtttagccgcgacccgcaggggagcgctccacctcgaatccctcgttcccaaacttccgttcgggaacgcccttccgcagtcgcccgcccccatcattccgtgatttccgtgccttccgtggttcccccgtcaatccgcgtcgcgcacgtcaagaacccccgcaccgccgccaggaactcctccggctggtcctgcggaatcgaatgcgagctgtccgcaaagatcttcagatgcgcccgcggaatccgctccgcgatcaaccgtgaatgctccgccgggcagatccagtcgtgagccccccccagcaccagcgtagggcaggggatcgtgtgcagttcgtccgtaaagtcaaactcccgcaggaaccctccgaaccccaggttcaactgctcgaagttccgaatcccctgattccagctcttctcgaacttctccgcatcgaacttcagcgaatacatcgggctcatcgcgcggtagtactcgtagagctgctccgccgactcgaacgcccccgcccacaaccactcgcacacccgcttctgctcgtccgtcccccgctcctcgacgatcttccgcgcgtcctccagaaaccgatagctcggcgacgtcgccgccagcaccaggttgtcgacccgctcgggaaaccggatcgcatacccctgcgccaccatcccgccgtacgacgaccccaggatcgatatccgctccagccccagatagtcccgcagcgcatcgacgtcgagaacgttctcctccagcgtataggtcgccgggtccgccgccgcgctccggcctgacccgcgatgatcgatatacaccaactgcgccacgtcccgcagcttggctacggtcgacttgaaccccgcgtggtccccgcccggccccccgtgcagcagaaacagcaccggccgctcgtccatccggtcccccgccggaaccagacccatcccgtccacgtcaaaataaagctccgtccccctcacccgcgcccgcatcgcttaacctttctccctcaccaaaccgtcaacgggtgccactggcgtcccgccagtgcaaatcacaaacaactccaacgggtgccactggctccgccagtgcgaatcaccaaaaacctcactccaccagcaaacccttcgtgtccttcgtgccttcgtggttactccccgcccgccgccacctcgtccgtaaaccggatccacgagcactgcgtcaccagttgatcgagcgacgcaaacgagatgtgcgcgttcgtcgcataccgcggcgtgttgttcgccggaaacgtcgccagcgtcgcatcacccaccaaaaacacattgaagtcctgcgacagattctcatacccggccgtcgtcttgcagaagcacatgtcggtcgcgtacccggtgagaatcacatgccgcacgccgttctctttcaaaaagtcccgcagcggcggatacccgtcgttgtcgtaaatcaccacatcctgcgggaacatcgtcacgtccgcacacaccggcgtcggcaactcccagaacccctcgttgttatatcgggctcccgcatccagccccgggaactgacgaaagtaatcccccaccgggtgactctccgacagcacaagctcctccggcagcggctcccccgtatagtcgaacccgttcaggatctccgccaactcctgcgccccctcctcgcgctcctccgccgtcggcgtcttgcggatgctccggtacagcttctcatgcaccggatgctctcccccccgcaggctgaacatcacctggttcacccgcccccgcaaccgcttcagcagcggatcgaccacctcccgcgtatgaccggccgccaggtggttcttctcgatcgtgcagaagtcgcacacccccgccggctccggcgtccgccacccctgaccgtcatcgatcccccacggatgcaccatgatcaccgccgtcgcatccgcccgcagccggttcggcatctcgatgatcccccgcgcattgtaagagaaccgccacgcccgcacctccagatcggcccccgcctcatccacaatcgccggcgcctcaaaccgccgcgtctcctccaccggctgcacatactccggataatccgccaagagcggcgccgcatcctccagcggcgtcaacacattctcatacacccgcaccgcttccggactggccaccgccgtctcctccccggctgcctccccctccgccaaccgaaaccccaccgccgtcccccccacaaaccccaccgccagcaaaccacacaccacccccagcaaacccgttcgacgaaacatcggcgcttcccccaaagttatagtgactcaccccacccaccccgccatcgtcgcccccaaccacccctcggtcaatcgaaccaccccccccaccaccgttgatccgcgccccacagggaagcgcgccccccaccgcgcaaaaaaagagacccctcaagggggtctcatcggatgcctgtcggcattgccgtgcgcgttgaaaccttactgtgatcagaaggaatcaccgctcggatacactgcacagagcctagcatgcttgcgtcacacggtccagcgcggcattctggaatcgtgtgggacacggcatatagttcattgagccacgggagacagtcgtgatggcgggctattccgattatgtgctgggcctcgacttgggcgcttcatccctcggctgggcgatggtcgaactcgatccggcgcgcaagtacaaaccggtccgcatccgcgacgccggcgtgcgcatcttcgaagcaggcgtcgaaggcgacatcgagcaaggcaaagacagttcacgggccacgcagcgtagggaagcccgcctgccgcgacgccagcactggcgcaggcagcaccgcaaacggaagctctttcgcgtcctccagaaacacgctctcctgccgcaatcagaatcggactccgccgcagaccgcaaggcgacgctcgacgccctcgacgccgaactggcggcctcacatctgccacaaggtgaccacctcgcccaccagaagctcccctacctcctccgcgccaaggccgccgagcaacgagttgagccgtacgagttgggccgcgcgctctaccatctcgcccaacgtcggggctacttgagcaatcgaaagggcgccgacgacgaagacgaccgcgaaggaaaggtcgccggcggcatctccgagattgaccaggccaaaggcgataaaacgctcgggcagttcttcgccgaagatgtcgacgtcttcgcacacgaaaccaagtccgacgatgacggccgcgacccgaaaaccggacgtatccgccgccgctacacgtcacgcaagatgtaccaggatgaattcagcgccatccgtaatgcgcagcaggaccatcaccccggggtcgataccgatgcgtggaacgagatcgaacgagcgatcttctttcagcggcctctcaaatcgcagaagcatctcatcggctgctgctcgctcgaaccggaacgccgacgctgcgccgaagcgctcccggtctaccaggaatttcgcgtcctccagcaggtgaatcacctgacgctaaggctgccgggcggaaccgaacgcccgctgaacgacgacgagcggacaacgctgatcgatttgctccgccgacagggcgaaatgaagttcaccaaggctcgcaaggaactgaaccttcccaaaggcgcggaattcacgatcgaggaatgggaggaacgcctcgtcggccaccgcaccaacaaacagatgctctccgtcttcggcgaacggtggtttgagttcactcccgagcagcaggatcgaatcacgctcgacgtgctccactacttgaagcccgaagccctcgtccagcgcgccatggacgagtggggcctcaaccgtcaagacgcccggcggctgtcgaagacgcgccttgaagaaggctacgcatccctctccagacgcgccctggaaaagctcctcgcgaaaatgcgcgacggcacaccctatgccaccgcgcgccgcgaactctatccggaacagttcgccgccgaaatcgccttggacgcgctccccccgctctacatctggaaccgcgatctgcgaaacccggccgtccagcgggccctcaccgaggtccgcaaggtcgtcaattcattggtcgccaaatacggcaagcccgcccgtatccacatcgaactcgcccgcgaactcaaggcctcgcgcgatgagcgcaaacgacgctggaagaacgccaccgaacaacggaaacgccgcgagaaagccgccgccgaaatcctcaaggaagtcggcatcgaacgcccctcccgccgcgacatcgaaaaatggcttcttcgcgaagaatgcggtggcatctgcccctactccggcaagtcgatcaacggccgcgccctgctcggctcgcatcccgagttcgacatcgagcacatctatccccgcaagtacctcgacgactcctttcgcaacaaaacgctctgtcacgtctccgtcaatcgcgaccgcaagcgaaacctcttgccgtcgcaagccttctccggcgcggagtacgaaaaaatcctgcagcgcgtgaaggccttcagcgggccgttcgccgccgagaagctcaagcgtttcgaggcggaagacgtcccggaagacttcgtctcccgcgacctcaacgacacccgttacaactcccgtctcgccgcagattacgtcgccgtcctctacggcggccgcgtcgactctgacaacatcacacgcgtctacgctcccaccggcggactcacctggatgctccgcaacggctggcaactcaacggcatcctctccaccgagaacgaaaagacgcgcgacgacaaccgccatcatgccgtcgacgcactgatcgtcgcgctcaccgacgccgcccgcatcaaagcgctgcaggaagccgccgaggacgccgcgaagcaggagagccgcgccttcgtccgggcgatgaaactcccctggaacaatctgctcgacgaggcgcgaaaggtcatccacggcatcaacgtctcccaccgtcccacccgcacgatcagcggccccctgcacgccgagtcgatctacagcaagccccacgtcaccgccgacggaaagaccgagcaccgcatccgcaaggaactccacaagctcaacgagaaagagatcaacggcgagcagatcgtcgacccgtccgtccgccgcgcggttcagcagaagtacgcggccctcaaggcagagaacccgcgagccaagccggcgcagttctggagcaacaaggacgacgtcgagaagttcccggcgctgccgtcgaagtcggggagttcgacgccgatcttcaaagtgcggttgaaggtggatgcgaagccgcgcccggtcgggaagggcgtccggcagcggaacattgcgtccggcaaagacagcaacttcgcctcaatggtctacgccgtgctggacaagaacggcaacgaaaagaagtgggttcacgaaatcatcacgcgcctcgaagcccacgaacgcctctccgccaacaaaaaccgcgcgggtgaaaaagtcctcatccccgacgaacaggacggcaaacgccgcttcaagttcgccctcgtcaagaacgacatgctcctcctcgaaggcccggaccggcagcatgagttgtaccgggtgctgtcattctccgattcggagatccaactgtgtgagcacaaccgggcgaggttggagaaacgcgatcggacgaagtggactcggatcacaagcaccgatgcacttcgaaagcgtaacgctcgaaaggtcgatgtaacggttgttggcgacattggttgacgccacgaaatacgcagaacttcggtgttcggttcgctcaacaatcatgcatccacggtgcgaggtcgtcgggcctgccgcatcgagactcgatagtttgcgaccgatcatcggttctccagttccttccatgcccacaggcatgccaggaaaaacttgcggtcatcggtcggcgccaatctctggaaccgctccacgtggctcttcgcctgatcgatcagcgtgagcacttcggaacgccgccacggttcgctcaggtcgtagtcggccaggtgccgcttctcctgcaactcggtgaaggtcgcggcgatgtcccgaatctccctcgggacggagtagttcccgttcgcgtcgcgcggcaggcccttgattacagactctcgcagcgtgccgcccccgaaactgctgcacgcttttttcatggttgtgtgagcgaaggcacggcccagcgaatgccggtagcctcgctgcgaattctgtgtaccgatctgcgcacagcacgcttcgtgaacgaggtagtggaagaccgcgtaataggcggtggagaccgcgcgccgcagatgagcctgtctggtacgcccggcggcgtcgatttgcacgatgtgctcagccagcgcgatcaggtcgtcgtacaccgttacccctcgtcgtccggctcatcgagttcgctctgcttggcgaggaagatatacggaaaaacctcaattccatgttctcgcaggctctcccggatcgcgaatttcaactccccgacgtcttcgccggagacctgatccagatcggcggactcgtccagcaccaccagtactctcagcgacggttcccccgtcgagtcggtgtactcctccgcctccacgcgcgccaccggcgggctcggggggagttgcaacccgtcgagggccagtgcttcccgtgtcttttcgtctaccggcatggcaagatccttcggtgagtgacggacagcatcgcggccgccagaactatggcatcaatgccgcgaggatgcgaggtcgttgctacgttgtggggcacaccggattcttcctctgaagtgcttagtccttgcaattcgtcgacaccggaggccattctagagattggctaaccggacggccgctcgcgaacactggaggtcgggaccttcgcaggcggcccgatctgtgcgcaatcgcattgtcgacattgctgaacagccggcccgcctcagaattgagcggcggcaactcgtcatcgacgtcgagccggaaccggcccgcgtgcccctcgaagacctcgctgtcgtcgtcgtctctcatccgcaggtcagttacacacaggccgtcctctccgaactcgccgcccagggcggcgtcttcgtcacgtgcgaccgcagtcgcatgccggtcggcctgatgctcccgcttgctggtcactccgtacagaccgaacgctttcgccggcaactggaactctcgcggcccaaacagaaacgcctctggcagcaggtcgtccgcggcaaaatcgccatgcaggcggtcgttctcgccgagtcgaccggaggcgacgctcacctgccggcgctcctcagcaaagtccgctcgggcgacccgtccaatgtcgaagcgcaggccgcccgccggtactggaccgccctcttcggcagcgacttcaggcgcgaccgcgaggcggccgaccacaaccggctgctcaactacggctacgccgtcctgcgggccgcaacggctcgcgccatctgtgcggccgggctgcatccgtccgtcggtctgcatcaccacaaccgctacaacgcctggtgcctctccgacgacctcgtggagccgtaccggccgcttgtcgacagggccgtcgtccgcctcatgcagggccgcgaggatgtgcccgatctcgacggcgagactcggggagaactgatcggcgcgctgacgtcagcggtcgtcatcgccggcgcgcaacgcctgctcttcgacgcgctggcgaggaccgcgtcatccctggccgcggtcgtgacgggagaacggaacgacctcgaactgcctacgggagtcgtcgatgccgcggagtgagctttcgttctcggggtaccaggccatgtggctgttcgccatgttcgatctgccggtgaagaccaggaaggagcggcgggattacacgcgcttccgcaacctgctgttggatgaggggttctctcagctacaatactccgtgtacgcccggttctgcgccagcgagcagatcaccgacacgcaccgcaagcggttgcgcaaaaaactaccgcccgacggacaggtccggctgctcgccgtgaccgaccgtcagttcggcaaaatgcaggtttttttcggcaggaaacggaccgatgtggaatcgaagccgtctcaactcacgcttttctgagatgttcgttgtgtgcaagggtatgctgcggcaggagttggcttcgaggtagtgtatccgagcggtgcttccctgccgaccacagcatgcgccacagaaactcgacgagccgcagcagtgtatccgagcggtgcttccctgccgaccacagccggaaagcagactgacggagacctggcctcagtgtatccgagcggtgcttccctgccgaccacagcgagactccagggagttgaccgacgcccagcagtgtatccgagcggtgcttccctgccgaccacagcattcagattgattgttagttgtagcggtcaagtgtatccgagcggtgcttccctgccgaccacagcatcgtcaaagatgactgtggtgagttcgcgagtgtatccgagcggtgcttccctgccgaccacagcggcacgcgagtcagccgccggaccatccggagtgtatccgagcggtgcttccctgccgaccacagctgatgatctgtgtggatcgtcccggtcattagtgtatccgagcggtgcttccctgccgaccacagcttagaatccgatcgaccaacggggtggtgagtgtatccgagcggtgcttccctgccgaccacagcgagcggccgcccggaggcccgtttgtctgagtgtatccgagcggtgcttccctgccgaccacagcgagacttcagcgcctccgccgtgtttccggagtgtatccgagcggtgcttccctgccgaccacagccattttcccccgcgaacattgatagaccgcagtgtatccgagcggtgcttccctgccgaccacagccgatcagtccgccgcaggcgaaggccattcagtgtatccgagcggtgcttccctgccgaccacagctcgtgacaaccagactcacagacttatcgaagtgtatccgagcggtgcttccctgccgaccacagcaggtcgtgcgcctgaaacataccgtccgtcagtgtatccgagcggtgcttccctgccgaccacagcatgtggggtaacacccgtggaggttcgagtagtgtatccgagcggtgcttccctgccgaccacagctcccggtccgcgcgacttttcctgttcgttagtgtatccgagcggtgcttccctgccgaccacagctcgagcaacttccacgcgctgcaaatcgagagtgtatccgagcggtgcttccctgccgaccacagccggaccgtttgttcttcgcggtc

SEQ ID NO: 785 - DNA, 4677 bp, synthetic construct
  source 1..4677: mol_type = other DNA
  misc_feature 1..4677: note = Synthetic
atgtcaatctggtgaaactggaaagctatcagctggatgcgagtttcacctccacgcaattttatgccgacattgaaggccatcccgagcatgaggcggtgcgcagggcgctggaggagctcatgttcttctgctccaaactgacgattctgggcgtctatcgcgcccacaccttccgccgccgcaccaaacccagcccccaaggagaaggctaaaaaacgcaacccccgccgaggcgggggcaacgaaatcggcgaatagtcctgggatgccgagcccgcacgaaggaccacttgtttcaacatgcggtcgcttcttaacttgcacgggagagtatgccaattatactcgcgggaggcaaggaaaatcgcgatgggatatgttttgggtctggatattggcacggcgtccgtcggctgggcggtgctgtcatctgagggcggcagcgcaagcggcgtcaagcacatgggcgtgcgcatttttcccgaagccctgcacccgaaaacacgcacaccgctgaatcaggagcggcgcgcagcccgcttgcgccgccgtctgctgcggcggcggcgagacagattgcaaaagttagcggacctgcttgccgatgctggcttgctgcccacggcgaaggttgcaaccgataaagacagcgactgggcgcgaagcatgaatacgaaaaataagaaagatccggatccgtatgagctgcgcgctcgcgccgccaagggtgaaaaattaacaccgcatgaattggggcgtgcgctttatcatctggcgcaaaggcggcaattcaaaatgcgcgacagtgcggaacctgatgagaaagataaagattctgccgacaaggatgtcgaaaagaagaataaaaccgtcaaggaaaaacaggcggaggccgaagacaagcaggccaatgccgaaagcatcgccacctcagaaaatctgaaaacgcaaaatatcaccttcgggcaatatttgcacaatcaagtcccggaaaaagaccgccgccgcaccacgcgtgcgctgcgtagaaatgtggaatatgagtttgagactatttggcagcagcagggcaagcatcacgcgtctgtcctgaccgatgagttgaagcaacaaattcacggcgcgatattttttcagcgccccgtcttctggcgcaaaagcacgctgggcgaatgtccgtttttttccaaagagccagtctgccgccgcggcagctggctttcgcagcaaaagcgcatgctggaaaaagtcaataatttgcgcctcgtcggcggcaatcaaagagagctggataagggagagcgcagaaaacttgcggaccatctgcaaacgaggacgcatatgagctggctgcaagtgcgcaaattgctggatttggagacaactgacaaatttaatctggaagaaggcggagagaaaagccttttgggacacaagctggaaaacaaactggcaaaatgtctgggcgatgattgggcgaaccatccgcacaagcaggcgatacgggacggcgtgccgcatgctatctgggaagccgattatggcgaaaaagggcagcgcgtggtgattcgcaatgaaaaagagcgggcggcagtgcgcgaaaaattgcggcaggaatttgtggacaaatatggcatcaccgcggagcaggcggaagccctcagcaagttgaaatttgagcaaaaatgggagccatattccgaaaaagcgctcaaggcatttctgccgaaactggaagctggcgagcggtttggcgatttgatggcgggtgcggattgggaaaaatggcggcgcgagacatttgagggctatgagcagccgacgggcgaggtctgggaccggctgcccagcccggccaacaaggaagagcaggagaggctgaaaaagattcgcaatcccgcggtggtgcgcgcgcaaaatgaattgcgcaaggtggtgaacaatctgatagccgtccatggcaagccggagcgcatacgcgtggaaatgacgcgcgatgttggcaagtcaaaggatgcgcgcatagagatacaaaaagccatcagcgagcaaaccaaaaaacgcgcggcggcaagggcggatttggttgcccacggatttgccgagccttcgcgcgacgatatagaaaaatggctgctatgggatgaatgtgcgcatcgctgcccctacacgggcgcgcatatcggttttgatgcgctgtttcggcgccatgaatttgaggtggagcatatctggccgcgctcgcgttcgctggatgacagttatgccaacaagacattgtgcgagacagccgagaataaaaagaagggcaatcgcatgccctacgaatatctgaaagacacgccgcaatgggaggaggtgaaagctcgcttgcggaagctgcaagacgaaaagcgcatgcgccgcggcaaggtgaagcggtttcaggcgaaagaaatgcctgagaattttgccaatcgccaattgacggatacgggctatgcggcgcgcgaaatcaaggaatggctgaagcgcctgtggccggatctcggttcaaccgcgcccgtgaatgtggaagtggttagcgggcagatgacggcgcggctgcgcggcctgtgggggcttaatggcttgctttcggagggtgagcaaaaggcgcgcgacaatcacaaacatcacgcgctggatgcgctggtggtggcgtgcattgacaagagtctggagcaaaaattgtcgcggcattataaactcaaggaagaaggcggggcagagaaatttccgccgccctggcgcgggattcgcgaagacgctgccaaagcgctcgcgaatatcgtggtctcgcacaaggtgcgcaaaaaagtctccggcgcgctgcataaggacacgctttacggcgacaccaaacacgctgaaggcaaatatcatttttatgtgcggcgcaagccgattgccgatatgacgcccaaggaagtcaaggatattcgcgatggtgttgtgcaggctgaggtgacgcaatggaaagcggacgcaaaatcggtggcggcggcaaatcagggcaagccgaaagatgagcgccaggagccgccgtcttttccgcgcgtgggcaagacggatgcaagccgggaaattcgcaaagctcgctacaccataaaaaaacagggaaaattcatgcgcccggtgagcgcaaggggcaaaacacttggctatgtggagcagggtgccaatcaccatgttgccatttttcgtaagcccgatggcacacccgatggcaagattgtctatgatgtggtgtcgctgtttgaggctgcgcagcggttgcggaatgggaagaaaatcgtggaggacacgcacagcgaacataaggatgcggaatttgtgatgtcgctttctctgggcgatgcgctgcaatttccgcccgaatcagaaagaccaggcatcaagattgtcaaaagcattaaagaaaatggacagataggactgcgtgatcacgatgatgccatacaagaaaagaaggaaggttctctttggcagccgactgtgtcatctatcatcaaagccggcgtcaaaaaaattgcgatagatccgataggccgcatcagaaaggcaggcggttgagcctgttgcgccatttgacgcaggctggtttggcaagttaagaggcgaccgcaagccgaaactaggagaccgaaatgccccgccaccaaatgagtttagcaagttaagaggcgaccgcaagccgaaactgtcggtggggcgcgccacaatcttgcactagtttagcaagttaagaggcgaccgcaagccgaaacggggactgcatgatgcttttgattttgacgagtttagcaagttaagaggcgaccgcaagccgaaaccagcaaaggctaaacctgccgccaagaagcagtttagcaagttaagaggcgaccgcaagccgaaactatatccttatcgtcatgctgcatagaatcagtttagcaagttaagaggcgaccgcaagccgaaaccgaccgaccatcgcgggcgcaggaagccagagtttagcaagttaagaggcgaccgcaagctgaaaccagacgcatatccgcacgattatctcatcaagtttagcaagttaagaggcgaccgcaagccgaaacgatatgccgcgcactgcccaaagcggcgcaagtttagcaagttaagaggcgaccgcaagccgaaacattctctcggcaggcggcaccccctctatgagtttagcaagttaagaggcgaccgcaagccgaaacatgcgcaagcggcatcgttgcgctggtggcagtttagcaagttaagaggcgaccgcaagccgaaacaaggactttgaccgcgagagcaagcaggatagtttagcaagttaagaggcgaccgcaagcccctaccccttcgcaaaatggcggataaggtggtgggcgatggccatgggcggtggcacggcgagggaggcgtgcttgccggccagcgcctcctgcacctcggcgcgggtggcccagagggcggtttccagctccacgccgtccagatgcagcgtctcgtctttggcgtccgccatgcagcctatcatcaattgcgccgggaacggccagggctggctcatgcaatagcgcacgccattgacggcgatgccggcttcttcgtgcaattcgcgcgccacggcggcttccagcgtctcgc

SEQ ID NO: 786 - DNA, 23375 bp, synthetic construct
  misc_feature 1..23375: note = Synthetic
  source 1..23375: mol_type = other DNA
cggaccgaaaggtactggtcattgaacagaaggttaaggaatacaacgatgccgcctggcattccggtattctatacgaggactgcctgcggtacagcacccgcgtagaatatctggaaaccgcctatacctatgatgagcaggacaagcagagaatcatggcggctgtggatggggcggatgtgatcgtggctaccagttactttctgcgcggaaccctgtccaaccgggattttttggcggagatgatcggaaaaaccaacaaaaaggtaatcatcgtaagcaacacgccctttgaagaaatctccgttccctacaatgcagaaaacgttgtggttacttttgccacgtcaccggaaaatatcgcagttacggccggggtgttgtacggtcggatcacgccggaagggaggatgcccgttgcaaacggatgtgtgcgcgctgctgaagagctggtgtgatgcgctgctgcaataccagatcaagaataccggagacccgcagctggatggcgccttgctgtgccccgcatgtcagaccatccatggccgctgcggcgaattggtctatccgctgatgaccctgtgcgaccgcctgggacggcaagaatacttggatgcggccagaaaattgtttgactggagcgggagcctattctgttctgacggcgctatgctcaatgatggtcaaagtatgtggaagggaatcaccgtttttgcggcggtatccctctgtgatgcgctgcgtcggcacgggcatcttctcacggcagaggaaaaacagcgatgggaacagcggctgcgggcccacggcgattggatcctgactcatatcgacgaacactttgacagcaatatcaactacaacgccgcagccgccggaagtctggctctgttggggaactattttcactgcgaagcatacctggaacatgcggaccgcatggcccgctacgcggtgacccacgttgaagcggacggcttattttacggtgagggcaaacccatcgaaagcctgaccgccaaggggtgtcggccggtggacattggctacaatgtggaggaaagcctgcctcttctgttgctgtacgcccgccagcgcggcaatgaggatgtttaccgctggataaaaaagactttgaaagaccatctggagtttatgcttcccgacggcggatgggacaacagcttcggcacgcgcaacttcaagtggacctactggggaagccgcacgtcggaaggctgcatcgcgccctatgcccatttcggcaagacggacccacagtgtgcggcagctgctgcgcgcaatctggaactgatgtgccgctgcagccgggacggcctgcttgccggtggacccgactaccccaaggtgggagcccgggcctgcctccaccacagcttttcccacgcgcgggtgctggcggaactgctggacgaggacctgatcccgcagggggatgcacctctgccctgtgaggcggctcccgccctgaaatactatcccaccatcgacacctggcgcgtccatctgggcgactggtatgccgatgtgaccgcttacgattttacctaccacctgggcggacatgcatccggtggaacactctctcttctctggcacaaaaagaacggcctgatgatcgcatcaagcatgacccgctactcgctgtatgaagcccataacatgcagcagctcacggaccgggaactgcagaaaagcctgaccccgcgggtggagtgccgccgggcaggggagttgtgggctagctgctgggacaacaccgctgtgattcgggctgtttcggaagaaggcggcgtttatctggaagcccggggtactttgtcccgtatacagggagatgccatggcggagcagggggaataccgattggggtatcgtttccggccggaatgcctggaaatcgaggtatggacctcctgtccggactgctgtttcctattgcccatggcagggggcgcggcggaacccgcatcacccgagaaagcggtatgcttctcaccggccggcggtcttctggcgcaggaacaccgctggaaactgagcgccggaaccgccttcacggtccggattactccctgacacttgcttgtacggatgattcaaagcggctataatcgaaattggaagagaaaaataatgtcgctttgaaggaggacctctcttgaaacgctggtttatgaaagcgagcctggcgcagaagatcctgtgcatccctctggtaacggtgctgttgatgggcctggggctgatgacggcgggaaccgtagccgtgcagaacagctatgagaacaaggtcagtcagatcatcgaacagacagtgaccgaaacctcccgctatgtcagcgcggaactgcggaatctggtggcgctggtgcatttcagcctgctggaccagagcttgcaggcggcgctgctcacggatctggacggggacttggccaaatatatccaggctcaggatgtgatcatctccatgctggcgtccctcaaatcccagagcacttatattgagtcggtggcattgacggttcagggcaaggtctttacagatgacctgcacgaagtcagctacgacatgacccccttgctgcaggccgcgcaggaaagccagctggcctactggacggacaccgccatcaccaacgaaagtaccggcaaaacggtcctgcccatggtcatgcgtgtgcccaccggcagcttttccgaaacccgggaagcttatatcctggtcaatctggatgcccaggaactgtttgggcatatccatcggctggaacaatccttggggtgtgccctggtgctgcacagtggagataatgtgctgtacggcgatgaacagtttccccaggctttcgatgacacggcctatgtggtgaacgatactgcactggaaatcagcgggtggagtttatgttgcgtgatggagcgcagccgtctgtatgccagcagaaacgagtcgctggccaatatgttggtggcgtcggcggcaatttcggtggtgtgcctgcttctgtcctactttgtggctcagagcattctgcgcccactgcggagcttgaccctgaccaccgagagggtggccaggggagattattcagcccgtaccggcgtgacgggggcggatgaactgggcctgttgggccgtaccctcaacgatatgaccagacagattcagcagaatattgccgcgctggaagaaaagaaccggcagatatccttaagcgagcagaaaaagcgtctggcggaaatgaaggtactgcaggcgcagattaacccacacttcctctataacaccttggattcggtatactggtacgcgttgtccggacgccaaagagatatcggcatgattgtagagaagttatccgatatgcttcgcatcggcctttccaaaggctcggaatacattcctttgtcccaggaactgcgccacgtgcaggactatctgggcatccagaagattattttcagcgataagtttgactatgagattcggtgcaatgtgccggacgagtatctggtggtcaaagttctgctgcagcctttggtagaaaacagtatcaaccacggcttcgagaatatggagcgggggggtatgatctggatcagtgtggatgcggacgagcattatcttcatttgaaggtggcggataacggctgcggttttgcattgtcggaatcgcagcaagggcgcagcccgtatgctggttttgcacttaaaaatattgaagagcgcctgtccgctcactatggcctggcggcggagctgctgatacagagcgaagcataccagaagacggaaatcgaaatccggattcgaaaagagctgtgcgggatgaaaccgggaaatgaggcaatgaaatgatggatgtggttttggtcgacgataaaaaggacattgtccggggaattgcggcggcggtggactggaaggcacgagatgttcagatgcacggatttttcaacggtgccgatgcgttagcttattgcctggacaataagccggatctggtaataacggacattcgtatgccttttatgacgggattggaattgatggccgctctgaaagagcacggcgtggaaacccgggtggttctgctgaccgggtacgaggactttgcctatgccagggaagcactgcgtctgggggcagtggagtatctgaccaagcctgtccgggtggaagctattcaggaactgatcgaccgcgaatacaaaatttcggtgcagcaccgccgagataaggatgctcagatggaggagtggcgtcggtaccagcgcagcttgcccgctcttaggaggcagtggctggaaagcctggcccaaggaaaaatgctgaagcaggaatccctgtgcacccaactggcggaactgggctttgacctgaaaccgaaccaccttctgtttgtggtagtgtctctgacggaggatggggatgaagttcccgcgtccgatgagcaggaactcatgcgctatgccgtgtccaacatcggtctggaattgatccgggcttccttcccctgcgaatgcgtggacttgggcaaagaccggctggcatttcttttgaactaccccgggcaaagcacccgggcggaggtcaacagacaagtggaggcggtgatcgcctccctggcagacaagtgcagcgagatcttgcatatttccttggccggaggtatcggtagctgtgccgccgatgcaggagaactgcgtacaagttgggaagatgcggtgcgggctatggaacgcaacttctttatggacaagccgactgttttttccgtttgctggctgccaggtgaaaccgtgggctgggaacagaagtatccctacaacctgcaggatgaagcaatccagctgctccgccgccgggaattgaatcaagcccgccgagtgctggatgaactgtttgaccggctgatgggcatgaccgaggccccctccgtcgggctgcgggaacacctgttgtcctttttgttgcgcctgttccatgaatgtgacttggaccagtatctgcatgtggccagtgcgctggaccagttccgtagcaaacgaaacattccggcgctgcgggaatggtttgacagtctgacagcctatctgaaggaccagatggacgaaaatgcatcccagatcgcggcgggggtgtacaaggttaagcgatatattgaccagaactatgccgaaaatatcaacctgaaaaacatggccgcgctggcctttgtcagccccgcatatctttccatctccttcaaggaggtgttgggggtcaattttaacgagtatctcaccaccgtacggatggaacgggccaaggaacttttgtccggcggcaatatccgggtgtacgaagtgtgcgaactggtggggtatcacgacaaaaagtatttttccgaactgttcaaaaaacatgtgggagtgtatcccaaagactggaaagaaggtacaacgtgaatatctatgacgattcgctgatggaagtgctggaccgaaagctccgtgccgaaatggagcgcaacgccgataaaatcccctatattgcccatgacggccggtacgaaaccgatatgcggcagaaaaatctttcctggtggactaacggcttctgggcggggatgttgtggcagatgtatcatgccacgcatgacccactctaccgccgggtggcggaaaagaccgagggctggctggacgaagcgatggaaaacttcctgggtctgcaccacgatgtgggatttatgtggcggctttccgccgtggcagattatagcctgactggcaacgagaaaagccgggtgcgggcccttcatgcggccacgctgctggctggccgtttcaacctgaacgggcagtacatccgggcctggaacctggacaagcccggttggatgatcgtggattgtctgatgaatctgagcctgctgtactgggccagtgaggaaactggagatccccgtttcgggcagatcgcccgggcccatgcggatacggcgctgcgcgtgctggcgcggccggacggcagcaccaaccacatagcggtactggacccggattcgggagagctgctttcctgcccggcggggcagggatatagcgagggctcttcctggagccgcggccaggcttgggccgtgtacggctatgctatctcggcggcccatactggagaacagcggtacctagatgctgcccgccgcgctgccaactactttattgccaacgtggccgaggacggctgggtatcccgggtggatttccgttcgccgcagacgccagtgtatctggataccaccgctacggcctgcacggtctgcggattgctggcgctggaagagctggtgacggcagaggagcgccccctgtaccgccgggcggcggaaaagatgctgcaggctctcttggacggccactgcgattgggaccctgtccgcgacggtattttgcagaatggcaccgcagcctacggtcatgaagacacccacgtgcctatcatctatggtgactatttcctggtggaatcgttgctgtggctgcgccagaaggcattccgggcttggtaaggaggaacggagatgaaaaaacttctctgcatagactccgacggttgcgccattgattccatgaataccaagcaccgcttgtgctttggcccggctctgcatgaggtgtggaaatttgctatacccgatgcggaagtgcagcgccgatgggaaaaaatcaatcttttctccgcgcaaaggggtatcaaccgttttgcgggtgtggctgctattctgcagcagattgagagcagtgtgccttcgcagcaggtgcaagaatttgttcactggaccacccgggcagaggaactttccaacagcgcggtggaaaaatgtgtgagggacggtgcacctcttgtattccgccaggcgctggaatggtcccagcgtgtgaacgaaaaaatcagtgcgctgcctctagctcagccttttgccaatgttgcggattgcttggcttctgcagccgattttgccgatatagtggtcgtttcctccgctaatcgggacgctattttgcaggaatggaaagccggtggactggacggctatgtaaggcggtattattctcagaatgacggcagtaaaactcagtgcattgcctgcgcaaaagcagaaggctatggcgacggggatgtcctgatgattggggatgcccccggtgactggaaagctgctcagagcaatggtgtttggttctatcctattctggctggcaaagaagcacagtcctggatgcagctgggcaagcatgaacttgcggatttcttacaagagcattggacaatacaacagcaaagaattttggtgaatggtatgatgtccaatttggagtaatagatgacttaatgttagaaggcgaaccaagagcctttgtcagcgtgaaagtatacgcgaataagaatgcctacttggtagagtaactgagacttaagtagtaggtcctgatggtctcgtccccgatggtgcgtaaataatactgcaacattggattctggggcaataaggaagtattttagaaatgatggtgtagcaaaaatagacaggatattctggtgattgatgaggattaccagaacaacgcaacgctgggggttctgaaagtctgcaagaccagcgaagtttttaccggctggcaggaggatgagggcgccacttttgaaccggcattttccggcaaagcccagctactttgtgtatgaagaacggcccatcccttatgccgaatataccatcacagccaatgaggatatttgcactcaggaacggcagacggatgccgatgggaacatatctctctggtatgccgaaggcgatgtggtaagccgttgtccgcaccggtgatggcaccagcgacattgctgcctttgctccgggacgtaccaattccacctatgatttcctcccggccaaacacggtggcgcggtaggtgaagttacggtgaacttgccgttgggcagttaccatatcgaagaaaccggtgcttcttatagattttgtcggtaccaagcagagttacaatctgacccttgtccgggacaagcagaccaacgatgtggttctggcaaagaccattacgaccattaatgagcaggtaaggaaaataggaagtaagctggaacagttggagatgttggaaaatactctcattttctatagttcgaatcatggggaaatgttgggcagccaaggggaaaaggataagcagttgccatatgaagagtctgtcgatattccactgattgcctattggaagaacaagattggcacaggcgtctgtgaggaattgatagaattggatgatttactggtaacgatttccggtctggtaaacgcctcttttcctagaactgtacacgggaaaggtttgtacggactgttctttgatgaaaaagcagcgagttactccgtatcgttcacgatggatacttatgtgcacagcatggatgagcacaagcgaaacgagatggataaaatggatgacctgttcgggatgagcctggaaatctcggtggagcaacagccttacccggtactgtttactgccacagaagagggacgcaaagcctttgcgccggactttccgaaaatacagattcaagccggcacaatggaagcggccttgatggaagcaaaaaagcagatccagaaggcgctgagccagttcaaatatccaccgatccccacccggcaggaagatatcgtggtgccggagaacagcgtgctgatcctcctgaagacagcctgaacaaacagaaacagccctggccagatggccggggctgttgtccgttatattgtccgttacgattttccaccgattagaaatgaacggtggaaaagaaaaagcgttttggggtcattttggagtcaaaattgaagatttttaagactgtatctgaaaacaaaagaaaagaacggtaaaactttacgctttactgttcttttggtggcatggcttaacaaaaaagatatttcaaatccgtaaaatgtcgagatgatatttcacgcgaaccgtgatactatgaatctggaacaggagatcataaagtaaggagggataccgatggaaaaggagaatctcatctgccccatctgcggcccgctggcggcacagacgaaagagcctctcaacggttcctaccgccaatatgaccagatccttcgcaggctcatggaactggagcggcaaggctgtatggaactgtttgccggtgactgcccactggaggataccgatgcggtgctggatgccgagcagcattataccgtttgccactatgtgcagtgccgcagatgcggcgctctctattttgtgggggcctgcatccggggcgcaccagtatttcggcaggtgacggacatccggaaggaaaaccttggcacccggctttggggccggtgcgggacctgcttttcgcagggaaaaggctgaaactggtgtcaacgcggatgtcgcaaaactttccaggaaagtgcgcctggtttgccatgtgttcatgaaagaggcctggataaaccggccttttgcagcaaagccaaaagccgcgggaaaacctgcggctttttcatgttcatacgcggaaaagccggtcgaccattcggtcgaccggcttgttggttgcggggacaggacttgaacctgcaatctccgggttatgagggccggattcctttgggtaagcacaaagccgctgtaatcggcctttgattcccgcttgtttgccgctaattgcatctgaaatgtaaaaatagggtggaccctattttacattttacgaaaccatttgcacggacaggggacggacaagtgcctggccccaaaattgggaatattggtattcaaaaataggtatagcaatttacctaagccacatggtatcatacttttaggatcagttcaacaaagtttgcatctttacaaaagggctgaaatttgctatactatatacagttcttataccataccaagaactgttatggttgctacaataaggtagtataccgtaaagctctgacgccctgcttgcagggcgtcatctttttttatacgcacaataggaggttgagacgaatgcattggccttatggaattggtctggatattggtgtcgcttcaattggatgggccactgttgcgttggatgagaaagcacagccctgtggtttcattcgtcttggaagccgtgtgttcaagagtgcggagcatccgcaaacgggagaaagtctggctgcgccaaggcgagaggcccgcagtatgcgccggcgtttgcgccgcaaagctttgcgcaaacaggacttttatcaacttctggagaaaaatcatctgccaggcaaggaagagctttcccaactatttgcggcaggcagcttggaggatatttatgcgttgcggacaagagccttggatgaggcagtcacacctcaggaatttgcgcgtattttgctacatctgatgcagcgtcgtggctttaaaagcaaccgtcgggccgataagtcgaaggaagatggagcacttcttcaagcggtgacacaaaatcgtttgcgcatgcaggaaaatggctatagaactgttggtgaaatgctgtataaagaccagctttttgcggcgtgcaaacgtaataagggagaaaattatctttccacagtaagtcgggaagaaattgccaatgaagcccaactgctctttgctgcacagcgtgaaaagggccaggcatgggcaactccggagctggaggcagagtatctttctattcttttgcggcaacgttcttttgatcagggccccggcgggaatagcccttataggggaggctggatagaaaaaattggcccttgcaccttgttaccggaagaaaagcgtgccttcaaaaacacatacagctttgagcgcttcaccttgctgcaaaagattaatcatatccgggtacaggaatctggtcagacccgggctctttctgataaagagcgtcaaaaagtaatagacctggcctatcgtgtggagactgtgccttatgcccggattcgtaaagagctgaaatggccacaggaaatccggttcaccgatgtacggtatgacgtagatgctgcaccggaaacagcagaaaaaaagtacaagctcccggtgatgaaaggatatcacgcgctccgcaaagcattgggcacacaacagccagagcttcccttgtgggatgatattatcacgatcctggcatcccatcgggatgaagatgtccggaagaagttgttggaagaaaaaggtttgactgcagagcagatagaagccgttcttggcctggatttttccggcgtcgggcacatttccttgaaggcttgtcaaatgttggaaccatggctgatgcaggggcttgtctatgacaaggcatgtgaacaggctggattgaatttccatggccatggaaatacggaaaaaacatctaagctgccagcttcggccccggaattggaggacatgaccagtccggtggtgcgccgtgcggtgtctcagaccatcaagctgatcaatgctatcatccgcgaaatggggcagtcgcctgtatggattcacattgaactggcccgggaactgagccgcacgcttgaggaacggcgcaaagaccagaaatccatggaagacaacgccaagcagaatgaacggttgatgcaggaaatccgggatacattccacaaactgaatcctacgggacaggatttgatcaagtaccgtctgtggaaagagcaggatgggatctgtgcctattctcagcagagcattgcagcggaacggctgttcgaacccggctatgccgaggtagaccacattgtgccatacagcatcagttttgatgattctcgcagcaacaaagtgctggtgatggcagctgaaaaccgtcagaaaggaaatcggctgccgttacaggatcttcagggagaacggcgcgaaaaatttatcgtgtggaccaagtcacaagtccgcaactatcgcaaacagaaaaatctgctgcgggaaacattgagtgatgaagaacaaaagggtttcaagcagcgcaatctgcaagacacgcagtatatggctcgctttctgctgaattacattcgggatcaccttgcttttgccgatcatccggctgccggaaagcagcgggttatggcgttggcgggtgccgttaccagccatcttcgcaaacgttggggcctgaccaaagtccgggcagacggtgatcttcatcatgccctggatgcagcagtgattgcctgtgccacccaggggatggtacagcagatttccggttactaccatcgcattgagggtgagtatcagcagtcgccggatggcacctattctgtgcatacccgtaccggagagcgcttcccggctccgtggccgcatttccgggatgaactgattcagcggctgagccaggaaccacagcaaaatctgatgcagtggaatccggtgttttattccaattttgatgtgaaatcgattcggcctgtttttgtgtctcgtatgccgcagcataaggtaacaggggcagcccacaaggaaaccatcaaaagcccgaaagccttgcaggatggtttcctgatagtcaaacatccgttgacggatttgaaactgaataaaaagacaggtgagatcgagggatactaccagccgtcaagcgataagctgttgtatgaggcccttcgcgcccggctattggaatttgacggggacggtaagaaagctttcaccgaaccattttacaagcccaaggcggatggtacgccgggaccgctggtgcgcaaggtcaagctgtgcgaaaaggccagtctgtgtgtgccggtccacggcggaaatggtgcagccgataacgacagtatggtgcgtgtggatgtgttttttgtaccgggggacgggtattacatggttcccatttacgtgtctgataccaagaagaaagaactgcctaaccgggctgtggtggcacataaggagtttgctgcatggaaggtgatggaggaaaagaacttcctgttctcactgtatgcggatgacttgattgaggtggctcgtaaaaaagtaatgccatttagtatagtcaatagtgggagcactttgccgcactcttatgaaacaactcatgagatggtgtattacggtgggttggatatttcttctggaaatataaaagttataactcatgataattcgtactctcttagaggacttggaattaagacgttaaatactcttcaaaaatatgaagtggatattcttggcaatgtgagagaggtgaaaaaagaaaaacgtcaatcttttcgataaggtggtgatcatatggcctaccggaatgtgatgatcacgacaccttgccggatcagctgccagcgggaacagttggtgattcaaggagaaaccaatgtcagctttcccctggaggatttactctctctcctgattgaaagccgccaatgtaccgtaacgacagcagccctttctgcattggcgaaaaatgggacaaccgtttttctatgcgatgaaaagcatattccttgctccattactcttccgctggcgcagcatagccgacagctggaggtgacaagagtacaatttgcctggacacagtctgaacggaaccgctggtggcagcagcttgtcaaggcaaaaatacaaaatcaggcagagtgtctggctttatgcggcatctgtgacgttgccgccgttttacacagccaggctgtggcagtcagcaggggagataaagaaaatcgggaagctacggcagcggcactttatttcccatccttatttggcaaaggatttacccgcaatgaagatatggacggacgcaacgcagcacttaactatggatatgccattctgcgcggttgtatggcgcgatgcctggcggtgtatgggttcattccgtggctggggctgcatcacagcagtacattaaatgcctggaatctggcggatgatatgatggaaccatatcgtccggtggtcgatttgtttgtggcatcacagataagggaggaggcagcattggataccatattgaaaagttgtctgttcaacttattgaatatggacatcctttccggaaaacagcggtacagtgttgcctacgccatggaacggcaggtacagagcctgcgcagtggcagtaaagaactgtgccttccctgtttggttccattgcagcaacacaggtatgaatagattcatgagattggttgttctctttgatctgcccgtcaaaacaaaaaagcagcggcatgatgccaccgctttccggaattttttgttgaaagatgggtaccatatgttgcagtattcggtatatgtccgcatctgtaacggagccgatgccgtacaaaaacatcgggtccgtttgtacgatcatctgccggataatggggctgtccgccttttggtcattacagaaaaacagtatgcttccatcgaaattttgcttggccatttgtctgaggcagaccagccttttgagagtcaacagctgacaattctgtgatttatagcaacatgaaaaagcgcttcagcgtgatgctgaagcgcttttttgacagtctattataccataccaaaaactgtcagggagctacaacttcccggccccacgccaatgatagactgtgattataccataccaaaaactgtcagggagctacaacgccaggcgacagagtggcgcaaacgcggcgattataccataccaaaaactgtcagggagctacaactgcgcctgtctgaacccgttgagtcagcctaattataccataccaaaaactgtcagggagctacaacagtcgctcggtgtttattccaaaagccggtattataccataccaaaaactgtcagggagctacaacgtgcttgcggtttccgtttccgttatatcaattataccataccaaaaactgtcagggagctacaacaatgtatttatagtccgttttgattccgccattataccataccaaaaactgtcagggagctacaacgtaccacgcagctgggaactggtaacacggattataccataccaaaaactgtcagggagctacaacgtaccacgcagctgggaactggtaacacggattataccataccaaaaactgtcagggagctacaacaatgtccacaatgcctttgtagtcgggctgattataccataccaagaactgtcagggagctacaactgctttccccacgtactgattgtacgtcattattataccataccaagaactgtcagggagctacaacggatggtgttcgtgttcccgaaaacactacattataccataccaagaactgtcagggagctacaaccaaccaccaaccggtttgaccagctggactattataccataccaagaactgtcagggagctacaacttgactacggccgcagccaggacaagccttattataccataccaagaactgtcagcaaactacattcacactatagtattcggcctattctgtatacatatcagctatttgactgacgtgtttcttcatctgctgcacaacattgtccggtgccgcaattttgaagccatgcgtaaaatgacagcaccaagcaaaaaacgtgggactgatgtcaacttccacaggaactaggtaccaaccatctggctccggattcttcgggacaaccgggccaaaggcatccgtaacagcatcaatccattttggaataatccgaagtgtaacacgggttggctgcccggtatacattgaaaatactctcttttggtattgatctttgctgaaacggcggccaatatcggttaaagcgcggggcaacggggatatttccagtttttgcattctgtctacacggtagcttaccagtgaagaaggatgatcctttgattctccaaccagatagtaaaatccatcgttgaaaacggtacccaccggacttaccagataccgcttggggaagccgtcttcctcctgtcggagctgtcgattacgcagatacaagaaggatacttggtggtctgtttgtatggcctggtgcagttggtcagtgtagcgaaaaatgttttcgttgcttgatttctgaacgctgtatacccgatgcttatgttccaaaacttctgcacagtgccgcccggccaaaagcgacaacttatccacaagctggtgggttttcttttcggtaatgcaggtggcggagcggacggcatctgccaaaatctgaagctctgctatatcaaaatcacgccccaacagacagtacatgttttttggatactggaattctttttgaatatcgtatccgccctccaccagggctttcagggctgttcgcacagtgcgagtatcacaagggtacccacgcatggtaagcagttcccgcaactccgccagggaaaggggatgctcctcatcgctttcctcatgtaaaatctcatatagttttagagccaaaattcgctggaaattttccttgctcataagggacacctccgcatccgcttcttaataacaccataccatacatgacatatatatgctatacatgtttttgcagatatgcagatacaaagcaaaacagccgtatcgctctgatacggctgttttgcctttttataataactttccgtaatcccgtctgccataaaaaatccgatggacaatcactgtctgcttttcttcatatacccggtacacaaccacatattttttccgtacggtcagtgtccgatatcctttccgggccagcaaatcgtcccgggcttgcggggcagaataggggaactcacgcaggttggaaatggaggtctccacttcctgcattagctctttggcagccttttcggcatccagttcgtaggaaatatagcggaatagttcatctaggtcacgggcagcatggcgggtaaagcgcagggcatacggctgatcaatactcatatttggccctcatcgcagaaaagacatcatcagcatcggtcagatcaccgcgggccacatcgccttctgcttccagaagctttgcatagatttcttcccgggcacagcgacgctcaaattcctcattgctcataatcaccaaatcctgataaccgtttttggtaatgaagacaggctctgatgtagcatggcacaggcgggaaatggcattggtatcgcgtaagtcgcgcataggtctgatttcaggcatagtaatcacctcaatgtaagcgtagcataattgtgctgcaatgtcaatttttcttctacaaaacgttaaagttcgtgtgcaaaatgtgcctggatgtgatacagcaattttgtgttccgccgggctgctttgtacacagattggtggtaatacctatgctctattatgacgttgaccccgatgattgtcaggatttgccgagagttttgaagccggaagaagttgccgagtttttatgtgtccacaaaaatacggtatacaaattgatcaagcagggccttcttcctgcgtttcgtgtaggaaagtcctggcgaatttatcgcaaggatcttccgaaattgagtacaagcttttgactataaagaccgccccttgagcacaaattagttcaaggggcggtcttattttataatcccaataaccaatctactgatacattcaaaacctttgaaaagaccggcaattcatagcacggaacgaatctggttccaatctcaatcagcctgatgtcatctcactcaataataattcactctaccacaagcgaaggtcaaaccatgcgaccggataccctgaccaattggtttcacgcattcatcataaagacggacttgccgcccatacacctgcatagtttgcgccatacaaatgcaacgctgcagattgccaatggcgttccgcttaccaccgtggccagcaatctgggtcatgcagattctgccactaccacaaagatctacgcccatgcgatccaaagcgcagcagcggcttcggcagagatgatggatcatttgttgaatccggtacatcaaacagattaaaagggagataaaacataaaaagggaagcgcagacttttggctgcgcttccctttttataacattggataaaaaacatttaagatggcaggagttcactgcagattttccctagaaatgtcccaataacatcgagtagctcttgtttgttcttctggtgaacaagctcctcaaggctcatatcaagtcgaattccttgattatgtgcaaagtttagcaaaaatctttcatatgcttgcttagcctgtgtttgacaaatatccatgtgatgctttctacataatcttttatatgtaaagaagatatctctgtaggtttccatgtttgcgagagctaaatacgctttataagtgtacgaaaaatagtcatcaaacgaggaaggcgttacggaaacgtaacatgtgctttcttgaaatttacgtgctactcgccttgattttttatcatccgaagttaataacttgcctacgcctattaagccaatgtcagcgtcagaaaggtggaaagaatatttgaaattttgacgcaaaaaaagttcaaatatagagttgaaacaaattagcatatgtgatgcgggcaactcgaaatctggcggaaaatagtgatagatatctgaatcaatatggattgtgggaataggtgttttccatacatcttccaaatactgaaaaactgaagtatcagatgctaaattatccggaatcaatttggtgattttaaatattcttctatgatttcggtattctatcaaagaaaagaaagtgacttcaagtgcagtatcatcttgaaaacatcttatccacggataaaaataatagacgcgttctattacattttcttttaaactattctcgtatgattgtttcttattaggaacactgtaaatacaaggcttttcggggcctgcaatccgaaaaaaataatatttgatctatcacattacgcagaaagtcgtccaggtgctatcttgggcggcttttttgcgtggatagaccggaaggaggcggaaaaataattacagaaatttaagctcgaaaattgtgcaactttcacgaaaaggaggttagtgaatggcagatgaaaaactgaacacgggccccgaggtgcagaaaaccgaggaggctcccgcgcccgctgtggctgatccggcccacggggaggccgccgttcccgaacacccgccggaacaggccgggcctgccgatcccggagatgtggtaatctctgcggagcaaattgacgcgctcatggcagaaaagcggcaggcggcccgggccgaggtggaaaaggcagaggcatcccgcgaacaggaagccggggctcctgcgccggagcgtcctgtcgctgaaagcgagaaagccgaaaagccgcgccggggccgtccccctaagtctgataagacagagcgccccgggccggaggctgaaaaagagcccaaaaaggccgggccccgcaagggccgcccctctaaggctgacaaggcggcccccgacaaggcccagccctcacaacgagacaaattgtcccgaggtggcgggaaagctcccgaagctcctgctcccccggatgccggaaaggataagcccgcaaaggaggccgatcccccggagcagggcgtgacggagccgactgcaccgccccgccctgtggaagagggaaagctggtctatctgaaactttccgaactccatccgttccatacattccgcccccatccgttcaaggtacgggacgatgccaaaatgcaggaaactgtggcatccatcaagctcaacggcgttatggtgcccggacttgcccgcccggaaaaggacggaaacggctatgagattgtggcaggccatcgccgctgccgtggcagcgaactggccgggctggaggaaatgccctttattgtccgggatatgaccgaccacgaggcggtggaggccatgaaggacagcaacaaacagagggatcagacgctccccagcgaactggccgcccttttggatctggaggtagaggacatcaagcaccagggctcccggctgaaaggtgtggccgagggcgatgtggggaaacgctcggttgagattgtgggcgaggcgcatggcatgaactataaaaaggttatgcggtatctgcgccttaaccaccttgtcccggagctcatggataaggtggatgataaaaagatgggcttcatgcctgcggtggagctttcctatattaagccgaaaaaccaaaggctgattgccgtttccattgacggggaacaggcatccccctctctggcccaggcgaaacagcttcgggagctggataaggaaggcaagctcaacggcgatgtgattgacggcatattaagcgaaaagaaaaaggaggatcgcggcgtgattatttcgatggctgaactggagaaatattttggcaaggaggccactccagccaaaatgaaggagcagatcatgactttgctggacgagtggaaggagaaacagccgcccgagctggcaaaggccccgaaaaagatggaaaaagacaagtaacccgaccacacttcgagacaaattgtcccgaggggccccgcccctcctgcagagggctctgtggtgatatatcccccgtcgccgcctatcttcctgtacagccgggagtgggccgtcaagggtgcaacgcaccgccgcttgcggcggcctgccctttacggtctgccccggctgtgctatttccagcggcgcggcgggggtatatatcctccagagccgccccctttcccatgactgggaaagggcggggggattgggctgaagtatcttttttcaaagaacggaggttttgacaatgaaacggccacttgcctatattaccgccggatggcttggcggtgacagtgaaaatgcagaacaggcagcccgctactgccgggcggtgtacgaggcggggttttcgcccatctgtcctaccctgtatctgcccttgttcctcaatgatgcagtgccggaggagcacaaaagcggcattgacatgagccgcgacctgctccgccgctcccatgtgctggtggtctgcggccataccatgaccgaggccatgaaaaacgacatcgccgttgcccagcggctggggattactgctaccacccttgagggcatccttaccgtcaagggacagggccgccgctgatggcggcccttttcgaagcctacatcacgaacctggggaaatataacgagggcgagcttgtaggagaaacgctgaaattccccactaccacggaggaggtgcaggcgctcctaaagcgcatcggtgtggatggtgtgcggtatgaggagtttttcattaccagctttgacggggatgtgctggggctctatgactatctgacggaatacgaaaatcttgacgagctcaaccatctggcctgcctgctttccgaactggatcagagcgatttggagaaattcgaggctgtgattgacagcggcgagcacacttccagcgtggccgacctaatcaatctcacgcaaaacctggactgttttgaattttatcccggtgtgggggacgatgaaacgctgggccgcatctatgtggaggacatggaggccattgatgtgccggagcatttgctgaattattttgactatgaggcatacgggcgtgatattcggattaacgaggatggtcactacgcccccggcggctatgtgctgaataacggtgggaaattcatcgagcactaccacgggatcgaggacatccccgccgagcacagggttttctcctatccgaaactttctatccgggaacagatggcggcctacaaggagattattgacggttcctctttggaaggctatcggaaactttctaataaggagcgtgaggaacgatagacggcacttcgagacactttgtcccgaggtggccgccggaaaggaggcggtataactgattgatgaagatgtttcccggcgtaccatagcaatttctgtccgggccagcaagctgacggcgcggggccttgcctatgtgctgggggctgtgggccggaagatccgcaaggcttaccgggaacaccaaacgccacacggcaggcagagcgtgaaaaagctcatgggacacggtgcggctacaaacagcattgaactttccggggacacgaaggcttttgaccgggtggcccggaagtggaatgtagactatgccttttataaaaccgggccggacaaatacctgttgtttttcaagtcggggcaggcggatgcgatcaccgcctgcttttctgaatactcgcggaaggtgctgaataaatccaaatcccgccgcatccccatccgggaacagcttaaacaggcggcggatcagcttgcgaaggaaaagccccgcaagcgggaacgggtaaaggaggcggttcgtgaggacagataacatcaaaaaatatgtactccccaacatcccctatctgtttgtgctgtgggcctgcttaaagctggggacggcttaccgtctggccgctggcgcggatttcgcccataagctcatggggctggggcagaccatcggcccggcctttgccgactttgcgccggggctcaatccctttgactggctcgtcggcattgtgggcgctgtgggcttccgcctgctgatttacttcaaaagcaagaacgcaaagaaatttagacgggaagaagaatatggatcggcccgctggggcaccgaaaaagacatcaagccttttatcgatccgaagtttgaaaacaatatcattttgaccgggacagagtttcttactatgaacacccgcccgaaaaacccggccaacgcccgcaaccttaacgcctgcgtgatcggctcgtccggctcgggcaaaacccgcttctggctcactccgcagattttgcaggccagcgcggataaaaacagcggatgcagctatgtgtgcgtagatccgaaaggcggggtgctctcccaggtgggctctttcttacagcggcgcgggtatcggatcaaggtgttcaattccattgatttcaaaaaatccatgcactataatccgctggcctatatcaagaatgaggccgacatccttaaatttgtggatgcgctgatttccaataccaaaggcgagggcaaggagggcgatccattttggacgaaggcggaaacgcttttgtactgcgctttgattgcctatatcattttcgaaggccccgccgaggatcggaacatgaatacgctggtggatatgatttccggcatggaagtaaaggaggacgatgaaaactacttaaacgccgtgg

SEQ ID NO: 787 - DNA, 23237 bp, synthetic construct
  misc_feature 1..23237: note = Synthetic
  source 1..23237: mol_type = other DNA
gccccgcgcggccagagctgcgcggggcttgccgcagttataaggttcacaacaaataggggtaggcagattcaggcagcgtgcccgctgcgcacaacgcacagttgtacggaggggcggctggtgcgggcaggtacggccctgcgcggctccgctgccggggtgcccagcaggatgccgcaggctgcgttgagcatgacaaccgcagcaaaaagtcccagcagtgcagcccacagcggcatggtgccggaggccgcggcgctcaccataacgccgcccagcaggagggacgccgttaccacgagcctgcaaaatttgtgcttgatgagttcccagttcataccgttacctccaaaggagccggccccgcaatggccgactgccgcaaattcaacaacggataacagcgttccgtttgttgtcttaactataatacatctttaggttgttgtcaatatgtttttacaacttatttttgaaaataattgcaaaaaactctttacaaaaaccacagacggttgtataatgaagctaaagaaatgggatcgtctacaagatgtggttttaccctactttatataaaggagttttcccgatgtttgcagagcgcttgaaagaggcccgcaaggccaaacgatacagccaggccgaggtgtccaggatgctgggggtaacgcagcaggctgttggcaagtgggagaccgggcgttccactccggatccgcagaccgtggcgcgtctggcggagatactggatacccccacagacgttctgctgggtctgcgcaaggagtcgggcgcggcgtccgctgtgggccgcaacgccttcagccgctatacggagtcccagatccccgtcgtgggcacggtgcgcgccggatacggggccctcgcgtttgaggaggactacggcaaggagtatgcctgtgtcaaggacccggaaaactacttcttcctcgtcgtcaagggcgacagcatggaaccgcgcatctctgacggtgacctggcgcttgtacaccgccagaacacactggacaacggcgatctcggcgttctggtctacggggcagacggcgagggcacgctgaaaaagtacatccagcgcggcaactcggtcatcctgcaccccttcaacccagcctatgaggagctggtcatcaagggcgaggaactcgaccacctgtatattgccggcaaggtcgtggagaccaaggccaagtggtaaggctgccttacaagttcaattatagcatacggtaagtcccataatttggactttcaaccctaaaacagaagaaatttacaaaaatgctgcccgcggcacaccttgcaaaacaaggatatgcggcgggctgtattttttatacccttttttcaggaggcgggcgcgatggaccttgcggaaaaactggaaatcctggcggacagcgccaaatatgatgtagcctgtacctccagcggggtggatcgccccggacggcacggtgcactgggcagcggtgcggcggcgggcatctgccacgtcttcacggcggacgggcggtgcgtctccctcctgaaggtgctctactccaacgtgtgcagctacgattgcagctactgcgtcaaccgccgctccaacgacagaccccgcgcgaccttcaccccgcgtgagctggcggagctgaccatcggcttttaccgccgcaattatattgaagggctgtttctgtccagcgctgtgctgggcacgccggaccgcacgatggagctgatgatcgaggctctgcgcatcctgcgggaggagtaccattttaacggctacatccacgccaagacgatccccggcgcggacccgatgctggtcgaaaggatcgggaggctggcggaccgcctgtcggtcaatatcgagctgcccagcgagacgagcctgaccacgctggcccccgacaaaaagaaaactgcgatcctgcgccccatggggcagatcgcagtgcagagtgcgcagagcaaaaaggagatggtgctctaccgcggggccaagccgtttgcgccggctgggcagagcacccaaatgatcatcggggcgacgccggagacagaccgccatatcatggacctgactgagggactctacaggaaatactcgctgaagcgcgtgttttactctgcctatctgccggtggtggaggatcgccgcctgcccgcactgcacacggcccctcccctgctgcgggagcaccgtctgtatcaggcggactggctgctgcggtactaccatttttcggcccgggagctgctgaccgaggacgagccgaattttgacccctacctggaccccaagtgcacttgggccgtgcgccacccggagtttttccccgtggaggtcaacacggccagccgtgccgagctgctgcgggtgccgggcatcggccccaagagtgcgctgcgcattgtcgaggcgcgccgggtgcaaagcctcggcatggcagagctcaagcgcattggagtcgtgcttaagcgggcacagtatttcattacctgcaagggcaaggcagcggcccgcggcagccgcgcggagatcgcgggggcgctgcttgaccccaaggccttcagcgtggggatgcagcagctttcgctggacgattttgtacccaaggccctgcccgacgctgccccggctgtgcaaaggctggaggcgcacggcatggcggcggacgtggccgcccggacggtgcggcaggaggcactgcaatgtcttacgaagcgcatgtgaccgacacagcctactgctatgacggcagctttgcgggctttttgtgctgcgtgttcgagagctacgcccggaaggagatccccgccgaggtctgcccgcccgaggagggacagctgaatttcttcggcacgcggcagatttttaccgacgagcagcacgcgcggcgggtcgcggcagggctggaccggcttggccgcgaggtgaaggaccgcgtgacgacgggctttctctgcaccgaccccggcaaggacctgacactgctgcggtttgtgcggctctgctttgcgcaggggccgcgcgccgcgcagatgctgggcgacccggacgccgccgcggcgtttgccctggagcgggctgtcgacaacgaggcctgcaggctgatcgagttcatccgctttgaggagcgggacgggatgctcggtgcggtcatccacccgaagcaccggattttgccgctgctgcgcggacatttttgcagccgcctgcccgatgagagcttcctgatttatgacgcggcccacggcacggctctgctgcaccgggacggccaggtgcgctatctggcgatggagcgctatattcccggcaccgacgagacagagctcgactggcagcggatgtggaaacggttctttaaggcgttgaccatcgagcagcgccgcgacgaaaaggcccagatgagccatgtgcccaagcggttctggcaggatatgtgcgagatgcagcctgatttggctttccccgcgggggcagctgtccgcaaagcggactgaggaggggcgggcttggagctactcatagtcatactccgggttcgcggcctgatactcggtcagccagcggagcagacgctcggtgtcggcataggtcatgcggcctgtgtcggccagggcgcacaccatggcgcggatgtcaccgccgtagagcgtctgcagatgcgcctggctgaccgcgccgcagtaggtcaggcggcggaccagcggcgtgtacagatttttattgccctgcttctcggtacggacgaagtttttcttctcgagccgcagcaggaaattgagcagcgtcgagtctgcccagcggcattcgggcggcaggtgtgacgcgatctcgcgcctggtggcggcgcggctgcaggcccagagcgcggccatgacctgttcttcactgcgggaaagctgttccatgatgaactccttttataatatgtagtgcctgtaggggccgggcatacccggcccgcaggtgcaaggcagacggtagtctgtgggaaggctgcgggccgcacatgtgcggcccctacagagcgaggaagaaataagtttgatattttacaaatgtggtaataagaactgaatatattttacaactgtggtagatataaatgcaagacaaaatattgcacaaattttgtgcccggaatttgacaatgacggcaaatatcttttacaaatgtctcataaagcgtttccggtgcaaaaacaattagtcacaatacaaaaacacatccccgattttcggcttttttcggtattttgtccgcttgcccgcaggggggcaaagctcctataatattggcataccgcaacggcgcggcagatgcgatccgccgtcggcgggtcgcatttgatttactgtaggaggaaataaagatggctagagtttacaatttcagcgccggcccttcgatgctgccggaggctgttctgaaaaccgcacaggcagagctgctggactaccacggctccggcatgagcgtgatggagatgagccaccgcagtaaatggtttgacgagatcatcaccaacaccgaggccgccatgcgccgggtactgaacattcccgacaattataaggtgggctttttccagggcggcgcgacccagcagtttgcgatggtgccgctgaactttatgaccaccggcacggcggattatcttgtgaccggcaacttcagcaagaaggcagccgaggaggccgtcaagttcggcacggcccgcattgccgccagcagcaaggacaagaactttacctacatccccgacgtcgcggccatcgactatgacccgaacgccagctatatccacatctgccagaacaacacgattttcggcacaaaatatgtcgatgtaccgcaggtggacggcatcccgctggtggcagatatgagctcgatgatctgctccgagccggtggacatcagcaagtacggcgtcatctacttcggcgtgcagaagaacattgcccctgccggtatggctgtggccatcgtgcgtgacgacctgctgggcaaggccgccaagggactgacccccgacaagatccccacgatgatgaactacacgaccctgctgaacgccgacagcatgtacaacaccccgccgtgctggtgcatctacatgaccggcctcgtcatgaactaccttgagaacgagatcggcggcctggagaacatgcagaagcgcaacgccgccaaggccaaggtgctgtacgattacctcgacgggcaggacttctacaagaatcccgttgagaaaaagtaccgcagcatgatgaatgtgaccttcaccagccccgacgccgacaccgacaaggcgttctgtgccgcggccaccgaggcaggcttcgtcaacctgaaggggcaccgtctggtgggcggtatgcgtgcgtccatctacaacgctatgcctgccgagggcatcgacaagctggtcgactttatggagaagttccgcagggagcattgagctgctgcacagtaggggtcgggtgtgtccggcccgcggcactgtggcagccacccgtgagagggtcactgcgtaaggctgagggccgggtgtgtccggcccctacggcgcaaaataaggggaacagggagtaacgatatatgtataccatcaaaacattgaacgccatttcgccggtgggtctggccaagctgcccgccaaccagtttgagatcgacaacgaggccgctgcaccgcagggcattctggtgcgcagcgccgatatgcacgataccccgctgcccgacagtctgctggccattgcccgtgcaggtgccggtacgaacaacattcccgtggaggactgcacgaacaagggcatcgttgtgttcaacacgccgggcgccaacgccaacgccgtggccgagctcgtcgtcggtgcgctggtcgcgggcagccgcaatctggtggatgccgtgaactgggcgcagaccctcaagggccgcgacacgattgccaaggacgtggagaagggcaaaaaggccttcgtcggtcccgagctgcgcggtaagacgctgggcgtcatcgggttgggtgccatcggtgcgcgcgtggccaacgccgccgtcgcgctgggcatggaggttttgggctatgacccgtatatttccatcgatgctgcgtggagcctgtcccgcagcgtgcagcactgtgtcacgctgggcgatatgctgccccgctgcgactacctgaccatccatgtcccctacctgcctacgacccgccacaccatcaacgcccagacgctggcgatgtgcaaggacggcgtgcgcgtgctgaactttgcccgcggtgagctggtggacaacgccgcactgctcgacgcactgaacagcggcaaggtcgcgcagtatttctgcgacttccccaccgaggagctgctgggcgtcaagggcgtctgctgcacgccgcatctgggtgccagcacgccggaaagcgagacgaactgcgccgtgatggccgccgccgagctgagtgactacctgaaaaacggcaacatatcccacagcgtcaacctgccggatgtcagccagccgcgcgtgggaggccgccgcatctgcatcatccacaagaacgctccgggcgcgatctcggccatcacgggcattttgaccgaagcacacctgaacattgaaaacatggtgaacaagggcaaaaaggatgtcgcttataccctgctggacgtgacgggcaatgtcaccgatgacctcgccgtcaagctgggtgcgattgaacccgccatccgcgtgcgcgtgctgtaaaagcatcaactttgcgaaatctcctctgctgaaccaatcagcaggggcttttttgtggatgataaccatgaaatagaatgaatcgctcgcggagacgcgggcggtttttgttctctttgcccaaaaaccaaacaaaacggaacaatcgcccgaatacggctttttttgcggtgggttttatggtagaatcaatgagaactcaaaaaatgaagagggaggccgcagcatgaccaacgcgccgaaaaccgtattagccatccatgacctgccgggctttggccgggcggcgctgtcggtcatcgtgccggtgctctcgacgctgggcgtgcagaccgtggcactgcctacggcggtgctgtccacccacacggggggcttaggcaccccggctaagctggccaaccccggctacggtcccgcggcactggaacattatcatcggctgggcgtgaaatttgactgcatctactcgggctatctggcggacgccgcgcaggcaaagctcgtcgagcaggcgtttgagctgtggccccgcgcgttcaaggtcgtggacccggtgctgggtgacggagggcggctgtacagcggcctgggggccgacatggtgcccgctatgtatagtctgtgcagcaaggcggatctgatcgtccccaatgtgaccgaggccgcgctgttgctgggcgacccgctgcccggtgtgggcagtgccgagcaggccgccgcacaggcggcccggctgacccgcgtagcgccgcaggtcgttgtgaccggcgtgacgggcatcggcggcggacgctacataggctgtgtgggcgcggcccgcggcggcgagggctatgccgtaaaaacgccgctgcagccgcggatgttccacggcacaggcgatatttttgctgccgtgctcgtcgggcgcattttgcggggcaacgtcccccaggctgccgtacaggcagctgccgccttcgtagccgagtgcatcaggcagacgcccgagggagccgacgagcggctgggcgtctggctggagaacgccctgccgaaactgcggcaggagtaagaccatgagactgccgcgagacaaggatgtccttgaaaatgcccgagcgctgcgaaaaagcatgacgcgggaggaacgctatctgtggtatgattttctgcgcggatattcgccgcgctttgtacggcagaaggttgtaggacgttatattctggatttttattgcgatgcggcaggtctggcgatagagctggacggcagccagcattatgaagcggcgggacagctgcacgatgcacagcgcacggaatatctggagggcttcggaatcagagtgctgcggttttccaatctggatgtgatgtggcattttgagggcgtatgccgtgtgattgataacgccgtgaaaagcctcccctagaggggaggtggccgaaggccggaggggtggccgggagccgacccatgaacggcgtgccgcccggcccctcacccggcgctgcggcgccaccctcccccaagggagggctaaagcttatagaacgaggacttgtaaatttatgccaaccttaaacattgtactggtcgagccgcagatcccgcagaactccggcaatatcgcgcggacctgcgcggtgacgggagcgcggctgcatatagtcggcccgatgggctttaccatcgacgacaaaaaattaaagcgcgccgggcttgactattggcaccagcttgatataacatattatcaagatcaggcggacttttttgccaaaaacagtggtccgtttttctacttcacgtccaagggcccgcgccgccatgtggatgtgacctaccccgacggcgcgtatctcgtctttgggcgcgaggatgccggcctgcccgaggagctgctggccgcgcatgaggccgactgcgtgcgtatgccgatgcgcaggggcgagcgctgcctgaacctgtccaacgcggtggcagtgggcgtgtacgaagcattgcgtcaatgggattttgccggtttggagacccacgggcagttgacccgatacgaatggagtgaggatgtaaaatgagcaagataggttttctgacagattcctgttccgacattccgcaggagcttgcggataagtacggcatcgaggtcgtgggcttccccatcaaccttgacggtgtggagtacatggagcgcaaggactttaccaacgaccagttttaccagatgatgcgcgacgcccagggcgtgcccaccaccgccgccatcacccagctgcagttctgcgatatttacgcccgttatgcggacgagggctacaccgacctggtgtacctgagcatcaacgcgggcggctccagcacctacaacaacgctgtcaaggccatggagctgttggaggaggagcgccccggctacacgatgaagattcaggtcatcgacagccacacctactcgatgccctacggctggtatttctgtgagtgcgcccgcaaggtgcgcaacggcggtgagctggcctcctgcgtggccgagctgaagcagaagctggactgcgttgagatctgtctggccgcctacagcctgaagcagatgaagaagtcgggccgcgtcagcgccgccgccgctgtggtcggtgacctgctgggcatccgccccatcatcagcctgaatgcgggcgtctccaaggtcgagagcaaggtccgcggcgacgccgccgtgcccgccgccatgatcaaatgggtggagagccgcgtcgattcgatgaaggacacgccctacatggtggcctacacgtccagcaccgccaagcgtgacgagctggtcaagctgtgcaaaaaggcgtttggccatgcaccgctgatcgtgttccagctcggcggcgttgtcagcgccaacaccggccccgacggcatcgccatcgtctacgagggcaagccccgcaatctcgaggcttatgcgccggagctgccgtaatatttttcggcagcataggtaaggtattgcaccttgcctgacaatgtagtataatacagacagttcttataccataccaagaactattatggttgctatgataaggtcataggaccgtaaagctctgacgccctgctgtttggcagggcgtcatcttttttgccctaaatttcgtttaaattgtcagttgcccaataatgccatagtgcgctatgatagtagaaaagtgaaaggatgtgcaaaaaaatgaagcatccctatggaattggtctggatattggcattgcgtccgtcggctgggcggtggtggcactgaatgaaaacgcggagccctatggtctgatccgatgcggctcacgcatatttgataaggccgaacagcccaaaacaggcgacagccttgctgccccgcgccgtgaggcccgcagcgcccgccgcaggctgcgccgccgcagcctgcgcaaggcggatctgtacgagctgatggagaaaaacggtctgcccggtaaggcggaaatagagcaggctgtgcaagcgggacatctgccggatgtctatgcgctgcgtgttcaggcgttggatggcccggtgacagcactggattttgcccgtatactgctgcacctgatgcagcgcaggggctttcgcagtaaccgcaaggcagacgatgcacaaaaagacggtaagctgctgcaggcaattgacgcgaacacccgacgtatggaggcaaaccggtaccgtactgtcggtgagatgatgtaccgtgaccctgtgtttgcagagcacaagcgcaacaaagcggaaaattatctttccaccgtcaaacgcgaccaaatcatagacgaggctagactggtttttgcagcacagcgtcaatacggtgcgacatgggcttcgccggagatggaggcagagtacctttgtattctgacacgccagcgctcctttgcggaaggtccgggcaaaggcagcccgtatagcggcagcaacagggtcggcacctgcacgctggagggaaagagcgagcagcgggcagccaaggcggccttctcgtttgaatattttacgctgctgcaaaaaatcaatcatatccgcattgcggaaaacggaaccagccgcacgctgacaccggcagagcgacaggtactgctttctgtgtgcagccagacggacaagctggattttgcccgggtccgcaaggtgttggcactgccggaagaagcacggttcaacatggtgcggtatcgcggggagcagacggcagaagcctgcgaaaagaaagaaaaaataacggcactcccctgctaccacaagatgcgtaaggcactgaataccctgcggaaggatcatatccgcaatatcagccgcgagcagctggatgccgccggagctgcgctgacgaacccggaaaacgaggataagctgcgggaggcattgaaacaggcggagtttgaaccgctggaaatagaagcactgctgacgctgcccagctttgcgggatatggacacatttcggtcaaggcgtgccgcaagctgatcccctatctggaacagggcatgaactataacgatgcctgccaggcagccggatatgattttcagggaaggcaaaacggcgaaaaagcgcagttcctgccggcctcaacggaggaaatggaggatattacaagcccggtggtgcgccgtgcagtggcacagacaatcaaggtcgtcaatgcgatcatccgcgagcagggcgaaagtccggtcagtatccatctggagctggcaagagagatgaataagaacttccagcagcgcagcgagttggacaaggcgatgcgggataacagtgcggaaaatgaacgcctgatgaaagagctgaatgagctttttccgggacgcaccgttaccgggcaggatcttgtaaaatatcgtctgtggaaagagcaggacgggcgctgtgcgtattcgatacagccgttggagctggacaaggttattacagtctccggctatgccgaggtagaccatatcatcccttatagcataagctttgatgaccgccgcacaaataaggtgctggtgctggcatcggagaaccgtcagaagggaaaccgtctgccgctgcaatacctgcagggaaaacgacgggacgactttattgtgtacaccaaagcaaacgtaaaaaatttccgcaagcgccagaacctattgaaggaaaggctgagcgaggaggacggcaagggctatatccagcgcaacctgcaggatacgcagtatattgcggcttttatgctgaactatatccgcaatcatcttgcgtttgcagactgttccggggcgggcaaacggcgggtcgttgcggtaaatggcgccgttacggcgtttttgcgcaagcgctggggtcttagcaaggtgcgtgccgacggcgatctgcaccatgcagtggacgcggcggtcattgcctgtacgacacaggggatgataaagcgggtatctgacttttgcaagcgtgcagagacgacggcggtgcgtaatgagcacttccccgaaccttggccgcacttccgtgatgagctgacgcagcgattgtcggcctgcccgcaggaagacctgatgaagattaacccggtctattatgcgacggtggatatttcgtctattcagcctgtgtttgtatcgcggatgccgcgccataaggtgacaggtgcggcacacgaagagacgattcgaagccaagtgaacgaaaaatatacagcagtgcgaaaatcaattacagaattgtcactggataaggatggaaaaatcaaagactattttaaaccaagtagcgatacgcttttgtacgaagcactgaagaagcgtctgacagaatttggcggaaacgcaaagaaagcctttgcggaaccgttttataagccacgtgcggacggaacccccggcgcacaggtgcgcaaagtgaaggttatcgcaaaaatgagcaacacaattcctgtccgcagcggcggaggcgttgcaaaaggcggcgacatgatccgtatagatgtgtattatgtccccggtgatggttattattgggtgccgatttatgtggcggatacggtgaaagaaaccttaccgaataaggcggttgtgcgagacaaaacaatggaagagtggaaagaaatgaaagaagatgacttcctgttctcactttatagcaatgaccttattttagtggaaagagataaaccaatctgcttttcacttatgcatgaagatagcacacttccgaaaaagtatgagacgaagaaggaactggtttattacaaaggcggagatatatcaaacggaggaattaggatagaaacccatgaaggggcatacttccttaaaagtttgacgtttggcatagtacaaaaagttcagaaatatcaagtcgatgtccttggcaattatacccctgtgaaaaaagaaaaacggcaaaccttccctgcccaacggaggtgaattatgtcctaccgctgtctgatgatcgtgaaccctgcgcacatccgctgcaaaaatgagcagctgttgattgaaacggaagaagttcactctgtgcccatcgaggacatcagtgccattgtactggaaagccgccaaagcacgatcacaacagcggctatggcggcgctggcacaaaacggtgtggtgactttctggtgcgatgaaacacatctgccgtgcggcatctcgctgccgtttgcacagcacagccgtcagctgggagtactgcgctggcagatggaattgaccctgccggcaaaaaagcggatgtggcagcaggtagtgacagcaaaaattcaaaaccaagcggagtgtcttgcactttgcggcaaaacacaggaggcggcgtttctattcgggcgtgccaaggctgtgacgagcggcgacaaagataacgtagaggcaagcgccgcagcgtactacttcccggctttatttggtgagggctacacccgccgcaatgaagatacgcgaaatgctgcactgaattatgcctacgcgattttgcggggctatatggcgcgctgcctgacggtgtatggttttcagccgtgcctgggtctgcaccatgacagtgagctgaaccaatttaatctggcggatgacctgatggagccgttccggcccgtggcggatttgtacgtggcagcaaatgtggccgaggatgcagcattgacacccatactgaagggaaagtttgtaaacctgttgaatgcggatattctttccggcgggcagcaccacagcgttgcctatgcaatggaacgcctggtgcaaggtctgcgtggacaagccctgctgttacccaaattgcttgaatacaaacagcatagctatgagtaaatttatgcggatgattgtcttttttgacctgcctgtgcagacaaagactgaaaggcggcatgcgacggcgttccggaattttttgctgaaggatggctaccacatgctgcaattctctgtgtacgcgagggtgtgcaacggcaacgacgccgtgaagaaacacgaaagccgtttgagggcatccttgccgccaaacggctccattcgcctgcttgtcgttacagaaaagcagtaccagtctattcagattcttctgggaaattatcagccggaagaagccccttttgtatgtgaacagttgagttttttctaaaacaaaaagcgcatcggaccgcaatccgatgcgctttttgcatagcctattataccataccaagagctattagggaactatgactgacgatgtactcaacggagatttcagcacattataccataccaagagctattagggaactatgactacttactcaaacggaagtgatgaaagagaattataccataccaagagctattagggaactatgacttctggacgtaacaggacagccaaaaacgcattataccataccaagagctattagggaactatgacgtgtccctcatcgttgggagtaatggcctttattataccataccaagagctattagggaactatgaccgccgacgctgccaggctccagggcgcagaattataccataccaagagctattagggaactatgacagcaagataatccactaccagttcatcggcaattataccataccaagagctattagggaactatgacagatgaacgatgagatcggacggctgctggattataccataccaagagctattagggaactatgattttcagataatcgacaatgcactccgatgtattataccatatcagcacaatatgcgcagaatctaccacaaattttccccgcaggtcttgcaacggcctgcgggttttgttataatttaggtttgttgagcaacttaggattttaggctccgctgccggctgctggtcggcagcgcaaaccccgcaaggctggcggtcttgcgtgtggtcaaaatctatccgccggagtattgtatgaatatgaaaaatctgtccgtccgtcgccttgtgcgctgcgctgtcattgcggctgtctatgtggtcgtctgccttgtgctggccccgttcagctacggcgcggtgcaggtccgcgtggccgaggccctctgcctgctgccggtgttcggcgccgagtatatcgtcggcgtcacgctgggctgctttttggcaaatctgctcggctccaccgtcgttgacgtggtgttcggcacgctggcgaccctgctggcctgccttctgacctacaagctgcgcgacatccgcgtgaaagggctggccattccggcatccctgccgcctgttgcctttaatatgatcattgtcggcgcgttcgagatcaccttcttcttctcggacggcgcacccacggcgatgctggcggtgttcaatgccgttactgtcggcattggcgagctcatcagctgcacgattctgggtgtggcgctcgtcaagctgatcgaaagcaacgcgggtctgaacaaaatttttacagaagaataaggcaacaccgcacaattctaagtgccgatacggcgagcaaggcacgtcagatgctaagcaaaaagcgcaggcaatactttgtgtattaccgagcatttttgcgacgcaggtgacgtgccgcagccgccggagcggtgcttaagcccgtggggcgggaattgtgcggtgctgccgtgagaggtaacatctatgtgcccggaactgattttgtgggattggaacggtaccctgctcgatgatgtcgatctctgcgtggacgcgctcaaccgtctgctggcaggattcggctacccgcagcggtatgaccacgagcggtaccgggccatttttggctttcccatcgaggaatattacgtccgcgcggggtttgactttacaaagcacagctttgccgagctggccgaaaaatacatggaggactacgtccccgccagtgcggcctgcccgctggcagacggcgccattgacgcgctggaggcgtttaaggccgcgggggtgcggcaggtcattctgtcggccagcaatctggacacgctgcggcgtcagaccgacgagcgcggcgtgacgggctattttgaccgtttgctgggtctggacgacatctacgccaagagcaaggtcgaggtcggactggcctatttaaaggaaaacggctttgacccggcacgcgccgtcatgatcggcgattccgtccacgactatgaggttgcacaggcgctgggcgtgcgctgcgttttgcagtccggcggccaccagccgccggaaaaattgagggaaacgggcgcaccggttgtaaagggattgcgcgaagccgcggcgctgattttggaataagggcttacgggagactgtaggggcggatgcttgcatccgcccgcggggcgtcgaggacgccgccccctgcaaacaactgcccgccgttatggtgcgggtcgatgcgagcaacgacccctacaacagaggagcaacacaatgtctgaccgcataaaaggctccgccttgacgatgggcggcgcggcgtgctggggcgtttcgggctgtatggggcagtacctgttcacccgcgagggggatggattcgacctggctcgtgcccatccggctgtttctggcggggctgatcctgtgcggattcttttttataaaggaccgcaaaacagaaaaattaaatatattacgaaatacacccgcgcaggtttgacatgaacccctgtgcgggtgtattatagtatcatgtgtaaaactatataaaaccactattagccgcacctctacacgcggcggaaaatacaggggaactgttatgtctttttttgaaaaactgttcggctctttctcggacaaggaactcaagcgcatcaacccgctcaaggacaaggtccttgcccttgagccggagatggccaagctgaccgacgacgagctgaaggccaaaaccaccgagtttaaagagcgcctcgccaaaggcgagaccctcgacgacctgctgcccgaggcgttcgccgtctgccgcgaggccgactggcgcgtgctgggcatgaagccctaccccgtgcagatcatcggcggcatcgtgctgcaccgcgcctgcatcgccgagatgcagaccggtgaaggcaagacgctggtcgctaccatgcccacctacctgaacgccctgaccggcgagggcgtgcatgttgtcaccgtcaacgattacctggcccgccgcgactccgagtggatgggcaaggtctaccgcttcctgggtctgaccgtcggtctggtcgtccacggcgtcgaggccggggaccgcaagaaggcctacgaggccgacgtcacctacggcacgaacaacgagttcggctttgactacctgcgcgacaacatggtcgtctacaaggccaacatggtgcagcgcggccatgcgtttgccatcgtggacgaggtcgactccatcctgatcgacgaggcccgtaccccgctgatcatcagcggcaagggcgaggattccagcgtgatgtacaagcgcgcggacgactttgccaagacgctgaaaaagagtgttatcgtcgagctggacgacaaggtcgaggccgaggagcaggtagacggcgattacgtcgtggacgaaaagcgcaagaccgctaccctgaccgagtccggcgtcaaaaaggccgaggcgttcttccacgtcgagaacctggccgacgccgacaatatgtcgctgcgccattacattgacggtgcgatcaaggcccgcggcgttatgcaccgcgataccgactatatcgtcaaagacggtgaggtcatcatcgtcgacgagttcacgggccgtctgatgtatggccgccgcttcaacgacggcctgcatcaggccatcgaggccaaagaaggcgtgaccgttgccgccgagagcaagacgctggccaccgtcaccttccagaactacttccgcatgtacaaaaagctgtccggcatgaccggtacagcctccaccgaggccgacgagttcagcgaaatttacggcctgaacatcgtcagcatccccaccaacaagccccgcgcccgcaaggacctgcccgacagcgtctacaagaccgtcaacggcaagtacaacgccgtcattgagcaggtcgccgagtgccacgccaagggtcagcctgtcctggtcggcaccgtcagcgtcgaaaagagcgaggcgctgtccaagctgctgaaaaagaaaggcatcgagcacaacgtcctgaacgcgaagcagcatgagcgagaggccgagatcgtcgcgcaggccggcaagcagggcgcggtcaccatcgccaccaacatggcgggccgcggtaccgatattatgctgggcggcaacgtgacctacatggccaaggcggcccttaaaaaggagctgtccaaggagctgaccgccaacctggcagagctgaaggatgcctacgagcatgagaaggcccgcgccaaggccagcggcaccgagctgcctaccccgccggaggccggtattgatgccaaactcgagatgctgatgaccgagtgcgacggccacgccgagaccgaggacgccgaaattctccatgcccgcaagcgttttgaggaactgtgcgaggagtttacccccgaggtcaagcgcgaggcggaggttgtccgcaatgcgggcggcctgttcatcatcggcaccgagcgccacgagagccgccgtatcgacaaccagctgcgcggccgtgcaggccgtcagggcgacccgggtgcatcccgcttcttcctgagcctggaggacgatctgatgcgcattttcggcggtgaccgcgtccagaacctcatggattccctgggcctcgacgaggatgtgcccatcgagaacaagctcatcaccaacaccatcgagagcgcccagaagaagctcgaagcgtcgaactttgcaattcgtaagcaggtgctgcagtatgacgacgtcatgaaccagcagcgcgagatcatctacaagcagcgccagatggtgctggacggcgaggacatctccggcaagctgcacgagatgatgcgccaggccatcgacgatgcctgcacgaactacctgaacggcgagaccgccgacgactgggattttgccgggctgcgccgccacttcatgaactggctgtgcctgcccaccgacttcaactacaccaccgagcagctgggcgacctgacgaaggagggcattgccgacgagctgtacaagcgcggcatggacatcctgaccgccaaggaaaagcgctacggtgccaagacgatgcgcgagcttgagcgcatctgcctgctgcgcaatgttgacagcaagtggatggagcacatcgacaacatggaccagctcaagcagggcatgggcctgcgcggctacggccagcatgaccccgtggtcgagtaccgcatcgagggcttcgcgatgttcgatgagatgatcgcgtcgatccgcgaggatgccgtccacatgctgctgacgattgagatccgccagcagaacgccgagccgaagcgtgagcagatcgccaagcccaccggcgataatgcgcccggtgataccggtgccaaggccccggcccccgtccgcgtgacgaagatcggccgcaacgatccctgcccctgcggcagcggcctgaagtggaaaaagtgcacctgcaaggagtaccaccccgacctgtaagcaatacaaaaggcgctgcccgggataaggcggcgcctttgttgtagggggcgtcttagacgccacgcaaacgtccgcttgcggccatgctgcgggccaggcatgcccggcccttacaggaccgctctctccgtaggggcggattccatatccgcccgcggaggggtcaagacccctcccctacaatgcttttttgaatgggtagagttgtaggggccgcacatgtgcggcccgcagctttcccgcaaacgacctcttatttttatgccgcgggccgggcgtgcccggcccctacggtggcagcgtctctgtaggggcgaacatggttcgcccgcccgttcaccaccttccctttttacgaggtaacatcatgaaagcccgaatcatccgcgaaccccgctgcgccttactctggcgcattgacgaaagctaccccaactatgccgccatcgcccgcgcggccaggcgctatgacgtcaagctccgccccgtcgcggacggcgacctcggcggcatcgtcggggacctctgcgcgggcaggcctgccccggcgtttgcgctgcttatcgcggtgccggaccgcccggccatcatcgtcagtggactgcgccatgacaacggcgagttgggcgcgttccttgaccttatcaaaatgggcggcgcgtccattccggtgcgcagcatggtcacgcccaccagcaagggctggacgctggcaaacctgctgctggaattaaacaccgagcacgagaccgtgcagggcggcaacgcatgaagcgccgcctgaccgcgctgctgctggtactgctttgtctgccgctgaccgcctgccaaaagcagcaaaatttgtacagtgccacctggttcgacctgttcgacactgtcgccatcgtgcagggctatgccgacagccaggacagctggaacgcccagacacaggccatgtacagcgatttacagcgctataacgaattgtttgacatctaccaccactatgatggcgtcatcaacctgtatgatgtcaacgcccgggctgccgctgcgccggtgcaggtcagcgacgagctgtacgcatttttgcgctggtgcaaagacaccgcttaccctgccgtcaacggcgcgacgaacatcgccgcaggtgcggtgctgcgcctgtggcacgacgcgcgggaaagcgactcccctgccccgcccgacgcggacgccatcgcggcggcgctggcgcatatcgacatagaagatctggttctggacgatgcagcacaaaccgtctattttgctgacccggagatggcgctcgacgtcggtgcggtgggcaagggctacgccgtggagcagaccgcccgggccgcacaggcccgcgggctgaccagcgccctgctgaacatcggcggcaacgtgcgcgccatcggcacaaagcccggcggcaagccctggaccgcgggtgtcgagaatccttggggcgatgaccccgcgtacatacaggccgtcgagctggccgacggcgacagcctggtcatcagcggcgactaccagcgctactttgagtacgacggcgtgcggtacgcccacctgatcgatctgacgacgggctaccctgcccgctacgtcagcagcgtggccgtgctggcccgcgctgacaccgggggtctggccgacgcgctttccaccgggctgttctgtctgcccgaggagaccggccaggccctggccgcgcaaaaccactatgccgtcctctggatgcaccctgacgagaccacgagccggagcgcagactggccgcaataaaaacaacccccgatttcctgaaatcgggggttatatatttgctgtaaatttatacaaactgtacaattctcaccgctgcggattgatgatcgtgcgccaatcgaggtcaccgtgctccaggccgtggatgaggacctcggcggtggcgatgtttgtggcaacgggaacgttgtgcacgtcacagatgcgcagcaggttcatctcgttcggctcgctgggcttggcgctgatggggtcgcggaagaaaagcagcatgtccacttcctcacaggcgatgcgcgccacgatctgctcagcaccgccgtggccgccgggcaggaactttgtgaccttcagcccggcgttttcctccaccaggcggcctgtcgtgccggttgccagcagacggtgctgctccaaaatatggcgatacgccatacaaaactgcaccatcaactcctttttggagtcatgggctatcaatgcaatcgtcataggtaaatgccaccatccttcgcagcagagtacaatatattaaaaggtaagcgggacgcgctgcccgcacaaacgctttgccatggcctgtccggccacaacggcgggatccgcagcgggcggtaccgtgccgttggccccggccagctgcagaacgcggctttcggggatgaccgccaaaagctgcacgccgacggtgtcgatgcactcgtccagatcagccacggcagcgtttttgccgaagctctcgcgccggacgcggttcatcaccaggcgcacggcgctctgcgggcggccacccgccagcagccggtccgccacgatcttgccgtcgcgcagggccacggggtcgggcgtcagcaccagcagggccttgtccgccacggtggaggccgctgtgaacggcgcacccatgccggcagcggtgtccagcaggataaaatcaaaatagggccgcatagcggtcagcagacgtcccagcggggccgcctccaccgcgccgccctcatacggggcgctgatgacggacagcccagggtacagcgggctgggcacaacggccttggccccctcgcatctgccgcacaaaacatcctcaatgtcgtaaacggtgcggccatagacgcctgcgataatgtccacgctgcgcagaccggagtccagctccaccagcagggtcttgcggcccagccgtgccagacaggcccccagcagtaccgagacggtactttttccggtaccgcccttgccggagcagaccatgatacactgtgcgttcatgtcggctcctctccacagttgcattaacactatctcgcatatattctatcacacttccggctggactgcaactggctttttgtcaaaatgtgacatgttctttttgaagaaaatcacgataaggaaaactttttgatgcactaaatcggcagaatgcccaagcgcacccgatgggggttgagcggcgctccgcaatcatccgccaaagacagcatccagcacagcgcgcaggatgggcgcggcattggacccgccaccgccgtattccagcacgacggc

SEQ ID NO: 788 - DNA, 23237 bp, synthetic construct
  source 1..23237: mol_type = other DNA
  misc_feature 1..23237: note = Synthetic
cagcgcacgggcaggttcaactcggccttgatctgccgcagcaggtcggcgtagggcgtcaggccgcccacggccagtgcgctgcaaaattccagacggtccgctcccccctgctttgcggcgcgggcggaggcaaggctgtcaacgcagacttccaacagcttcatgtcaggtcacatccttttgctttttccccattgtaacataggctttgggatacggcaagccccgcgcggccagagctgcgcggggcttgccgcagttataaggttcacaacaaataggggtaggcatattcaggccgcgtgcccgccgcgcacaacgagcagttgtacggcggggcggctggtgcgggcaggtacggccctgcgcggctccgctgccggggtgcccagcaggatgccgcaggctgcgttgagcatgacaaccgcagcaaaaagtcccagcagtgcagcccacagcggcatggtgccggaggccgcggcgctcaccataacgccgcccagcaggagggacgccgttaccacgagcctgcaaaatttgtgcttaatgagttcccagttcataccgttacctccaaaggagccggccccgcaatggccgactgccgcaaattcaacaacggataacagcgttccgtttgttgtcttaactataatacatctgtaggttgttgtcaatatgtttttacaacttatttttgaaaataattgcaaaaaactctttacaaaaaccacagacggttgtataatgaagctaaagaaatgggatcgtctacaagatgtggttttaccctactttatataaaggagttttcccgatgtttgcagagcgcttgaaagaggcccgcaaggccaaacgatacagccaggccgaggtgtccaggatgctgggggtaacgcagcaggctgttggcaagtgggagaccgggcgttccaccccggatccgcagaccgtggcgcgtctggcggagatactggatacccccaccgacgttctgctgggtctgcgcaaggagtcgggcgcggcgtccgctgtgggccgcaatgccttcagccgctatacagagtcccagatccccgtcgtgggcacggtgcgcgccggatacggggccctcgcgtttgaggaggactacggcaaggagtatgcctgcgtcaaggacccggaaaactacttcttcctcgtcgtcaagggcgacagcatggaaccgcgcatctctgacggtgacctggcgcttgtgcaccgccagaacacgctggacaacggcgatctcggcgttctggtctacggggcagacggcgagggcacgctgaaaaaatacatccagcgcggcaactcggtcatcctgcaccccttcaacccagcctatgaggagctggtcatcaagggcgaggaactcgaccacctgtatattgccggcaaggtcgtggagaccaaggccaagtggtaaggctgccttacaagttcaattatagcatacggtaagtcccataatttggactttcaaccctaaaacagaagaaatttacaaaaatgctgcccgcggcacaccttgcagaacaaggatatgcggcgggctgtattttttatacccttttttcaggaggcaggtgcgatggaccttgcggaaaaactggaaatcctggcggacagcgccaaatacgatgtagcctgtacttccagcggggtggatcgccccggacggcacggtgcactgggcagcagtgcggcggcgggcatctgccacgccttcacggcggacgggcggtgcgtctccctcctgaaggtgctctactccaacgtgtgcagctacgattgcagctactgcgtcaaccgccgctccaacgacagaccccgcgcgaccttcaccccgcgtgagctggcggagctgaccatcggcttttaccgccgcaattatattgaagggctgtttctgtccagcgctgtgctgggcacgccggaccgcacgatggagctgatgatcgaggctctgcgcatcctgcgggaggagtaccattttaacggctacatccacgccaagacgatccccggcgcggacccgatgctggtcgaaaggatcgggaggctggcggaccgcctgtcggtcaatatcgagctgcccagcgagacgagcctgaccacgctggcccccgacaaaaagaaaactgcgatcctgcgccccatggggcagatcgcagtgcagagcgcgcagagcaaaaaagagatggtgctctaccgcggggccaagccgtttgcgccggctgggcagagcacccaaatgatcatcggggcgacgccggagacagaccgccatatcatggacctgaccgagggactctacagaaaatactcgctgaagcgcgtgttttactctgcctatctgccggtggtggaggatcgccgcctgcccgcactgcacacggcccctcccctgctgcgggagcaccgtctgtatcaggcggactggctgctgcggtactaccatttttcagcgcgggagctgctgaccgaggacgagccgaattttgacccctacctggaccccaagtgcacctggaccgtgcgccacccggagtttttccccgtggaggtcaacacggccagccgtgccgagctgctgcgggtgccgggcatcggccccaagagtgcgctgcgcattgtcgaggcgcgccgggtgcaaagcctcggcatggcagagctcaagcgcattggagtcgtgcttaagcgggcacagtatttcattacctgcaagggcaaggcagcggcccgcggcagccgcgcggagatcgcgggggcgctgcttgaccccaaggcgttcagcgtggggatgcagcagctttcgctggacgattttgtacccaaggccctgcccgacgctgccccggctgtgcaaaggctggaggcgcgcggcatggcggcggacgtggccgcccggacggtgcggcaggaggcactgcaatgtcttacgaagcgcatgtgaccgacacagcctactgctatgacggcagctttgcgggttttttgtgctgcgtgttcgagagctacgcccggaaggagatccccgccgaggtctgcccgcccgaggagggacagctaaatttcttcggcacgcggcagatttttaccgacgagcagcacgcgcggcgggtcgcggcagggctggaccggcttggccgcgaggtgaaggaccgcgtgacgacgggctttctctgcaccgaccccggcaaggacctgacactgctgcggtttgtgcggctctgctttgcgcaggggccgcgcgccgcacagatgctgggcgacccggacgccgccgcggcgtttgccctggagcgggctgtcgacaacgaggcctgcaggctgatcgagttcatccgctttgaggagcgggacgggatgctcggtgcggtcatccacccgaagcaccggattttgccgctgctgcgcggacatttttgcagccgcctgcccgatgagagcttcctgatttatgacgcggcccacggcacggctctgctgcaccgggacggccaggtgcgctatctagcgatggagcgctatattcccggcaccgacgagacagagctcgactggcagcggatgtggaaacggttctttaaggcgttgaccatcgagcagcgccgcgacgaaaaggcccagatgagccatgtgcccaagcggttctggcaggatatgtgcgagatgcaggcagatttactatagggcttcccccgagggggaagctgtccgcaaagcggactgatgagggcggagtgaatcgctgcagaccgtttacgggtaattgcggtgggctggccctcatccggccctgcggggccaccttcccccgagggggcgggcttggagctactcatagtcatactccgggttcgcggcctggtactcggtcagccagcggagcagacgctcggtatcggcataggtcatgcggcctgtgtcggccagggcgcacaccatggcgcggatgtcaccgccgtagagcgtctgcagatgcgcctggctgaccgcgccgcagtaggtcatgcggcggaccagcggcgtgtacagatttttattgccctgcttctcggtgcggacgaagtttttcttctcgagccgcagcaggaaattgagcagcgtcgagtctgcccagcggcattcgggcggcaggtgtgacgcgatctcgcgcctggtggcggcgcggctgcaggcccagagcgcggccatgacctgttcttcactgcgggaaagctgttccatgatgaactccttttatagtatgtagtgcctgtaggggccgggcatgcccggcccgcagggcaaggcagacggtagtctgtgggaaggctgcgggccgcacaggtgcggccccttcagagcgaggaagaaataagttcgatattttacaaatgtggtaaaaagaactgaatatattttacaactgtggtagatataaatgcaagacaaaatattgcacaaattttgtgcccggaatttgacaatggcggcaaatatcttttacaaatgtctcataaagcgtttccggtacaaaaacaattagtcacaatacaaaaacacatccccgattttcggcttttttcggtattttgtccgcttgcccgcagaggggcaaagctcctataatattggcataccgcaacggcgcggcagatgcgatccgccgccggcgggtcgcatttgatttactgtaggaggaaataaagatggctagagtttacaatttcagcgccggcccttcgatgctgccggaggctgttctgaaaaccgcacaggcagagctgctggactaccacggctccggcatgagcgtgatggagatgagccaccgcagtaaatggtttgacgagatcatcaccaacaccgaggccgccatgcgccgggtactgagcattccagacaattataaggtgggctttttccagggcggcgcgacccagcagtttgcgatggtgccgctgaactttatgaccaccggcacggcggattatcttgtgaccggcaacttcagcaagaaggcagccgaggaggccgccaagttcggcacggcccgcattgccgccagcagcaaggacaagaactttacctacatccccgacgtcgcggccatcgactatgacccgaatgccagctatatccacatctgccagaacaacacgattttcggcacaaaatatgtcgatgtaccgcaggtggacggcatcccgctggtggcagatatgagctcgatgatctgctccgagccggtggacgtcagcaagtacggcgtcatctacttcggcgtgcagaagaacattgcccctgccggtatggctgtggccatcgtgcgtgacgacctgctgggcaaggtcgccaagggcctgacccccgacaagatccccacgatgatgaactacacgaccctgctgaacgccgacagcatgtacaacaccccgccgtgctggtgcatctatatgaccggcctcgtcatgaactaccttgagaacgaaatcggcggcctggagaacatgcagaagcgcaacgccgccaaggccaaggtgctgtacgattacctcgacgggcaggacttctacaagaatcccgttgagaaaaagtaccgcagcatgatgaatgtgaccttcaccagccccgacgccgacaccgacaaggcgttctgtgccgcggccaccgaggcaggcttcgtcaacctgaagggtcaccgtctggtgggcggtatgcgtgcgtccatctacaacgccatgcctgccgaaggcatcgacaagctggtcgactttatggagaagttccgcagggagcattgagctgctgcacagtaggggtcgggtgtgtccggcccgcggcactgtggcagccacccgtgaaagggtcactgcgtaaggctgagggccgggcatgcccggcccctacggcgcaaaataaggggaacagggagtaacgatatatgtataccatcaaaacattgaacgccatttcgccggtgggtctggccaagctgcccgccaaccagtttgagatcgacaacgaggccgctgcaccgcagggcattctggtgcgcagcgccgatatgcacgatgccccgctgcccgacagcctgctggccatcgcccgtgcaggtgccggtacgaacaacattcccgtggaggactgcacgaacaagggcatcgtcgtgttcaacacgcctggcgccaacgctaacgccgtggccgagcttgtcgtcggtgcgctggtcgcgggcagccgcaatctggtggacgccgtgaactgggcgcagaccctcaagggccgcgacacgattgccaaggacgtggagaagggcaaaaaggccttcgtcggtcccgagctgcgcggtaagacgctgggcgtcatcgggttaggtgctatcggtgcgcgcgtggccaacgccgccgtcgcgctgggcatggaggttttgggctatgacccgtatatttccatcgatgctgcgtggagcctgtcccgcagcgtgcagcactgtgtcacgctgggcgatatgctgccccgctgcgactacctgaccatccatgtcccctacctgcctacgacccgccacaccatcaacgcccagacgctggcgatgtgcaaggacggcgtgcgcgtgctgaactttgcccgcggtgagctggtggacaacgccgcactgctcgacgcactgaacagcggcaaggtcgcgcagtatttctgcgacttccccaccgaggagctgctgggcgtcaagggcgtctgctgcacgccgcatctgggtgccagcacgccggaaagcgagacgaactgcgccgtgatggccgccgccgaactgagcgactacctgaaaaacggcaacatatcccacagcgtcaacctgccggatgtcagccagccgcgcgtgggaggccgccgcatctgcatcatccacaagaacgccccgggcgcgatctcggccatcacgagcattttgaccgaagcacacctgaacattgaaaacatggtgaacaagggcaaaaaggatgtcgcctataccctgctggacgtgacgggcaatgtcaccgatgacctcgccgtcaagctgggtgcgattgagcccgccatccgcgtgcgcgtgctgtaaaagcatcaactttgcgaaatctcccctgctgaaccaatcagcaggggcttttttgtggatgataaccatgaaatagaatgaatcgctcgcggagacgcgggcggtttttgttctctttgcccaaaaaccaaacaaaacggaacaatcgcccgaatacggctttttttgcggtgggttttatggtagaatcaatgagaactcaaaaaatgaagagggaggccgcagcatgaccaacgcgccgaaaaccgtattagccatccatgacctgccgggctttggccgggcggcgctgtcggtcatcgtgccggtgctctcgacgctgggcgtgcagaccgtggcactgcctacggcggtgctgtccacccacacggggggcttaggcaccccggctaagctggccaaccccggctacggtcccgcggcactggaacattatcatcggctgggcgtgaaatttgactgcatctactcgggctatctggcggacgccgcgcaggcaaagctcgtcgagcaggcgtttgagctgtggccccgcgcgttcaaggtcgtggacccggtgctgggtgacggagggcggctgtacagcggcctgggggccgacatggtgcccgctatgtatagtctgtgcagcaaggcggatctgatcgtccccaatgtgaccgaggccgcgctgctgctgggcgacccgctgcccggtgtaggcagtgccgagcaggccgccgcacaggcggcccggctgacccgcgtagcgccgcaggtcgttgtgaccggcgtgacgggcatcggcggcggacgctacataggctgtgtgggcgcggcccgcggcggcgagggctatgccgtaaaaacgccgctgcagccgcggatgttccacggcacgggcgatatttttgccgccgtgctcgtcgggcgcattttgcggggcaacgtcccccaggctgccgtacaggcagctgccgccttcgtagccgagtgcatcaggcagacgcccgagggagccgacgagcggctgggcgtctggctggagaacgccctgccgaaactgcggcaggagtaaaaagcagagcgctcctcagccgtgaacgggcacggggcgtcggggacgccgccccctacaacgcggcagcggcggtgcggcagccggaggactggccgccctacaccgcaggggcggattccccatccgcccgcccctcccccaagggagggctaaagttatagaacgaggacttgtaaatttatgccaaccttaaacattgtactggtcgagccgcagatcccgcagaactccggcaatatcgcgcggacctgcgcggtgacgggagcgcggctgcatatagtcggcccgatgggctttaccatcgacgacaaaaaattaaagcgcgccgggcttgactattggcaccagcttgatataacatattatcaagatcaggcggacttttttgccaaaaacagtggtccgtttttctacttcacgtccaagggcccgcgccgccatgtggatgtgacctaccccgacggcgcgtatctcgtctttgggcgcgaggatgccggcctgcccgaggagctgctggccgcgcatgaggccgactgcgtgcgtatgccgatgcgcaggggcgagcgctgcctgaacctgtccaacgcggtggcagtgggcgtgtacgaagcattgcgtcaatgggattttgccggtttggagacccacgggcagttgacccgatacgaatggagtgaggatgtaaaatgagcaagataggttttctgacagattcctgttccgacattccgcaggagcttgcggataagtacggcatcgaggtcgtgggcttccccatcaaccttgacggtgtggagtacatggagcgcaaggactttaccaacgaccagttttaccagatgatgcgcgacgcccagggcgtgcccaccaccgccgccatcacccagctgcagttctgcgatatttacgcccgttatgcggatgagggctacaccgacctggtgtacctgagcatcaacgcgggcggctccagcacctacaacaacgccgtcaaggccatggagctgttggaggaggagcgccccggctacacgatgaagattcaggtcatcgacagccacacctactcgatgccctacggctggtatttctgtgagtgcgcccgcaaggtgcgcaacggcggtgagctggcctcctgtgtggccgagctgaagcagaagctggactgcgttgagatctgtctggccgcctacagcctgaagcagatgaagaagtcgggccgcgtcagcgccgccgccgctgtggtcggcgacctgctgggcatccgccccatcatcagcctgaatgcgggcgtctccaaggtcgagagcaaggtccgcggcgacgccgccgtgcccgcagccatgatcaaatgggtggagagccgcgtcgattcgatgaaggacacgccctacatggtggcctacacgtcaagcaccgccaagcgtgacgagctggtcaagctgtgcaaaaaggcgtttggccatgcaccgctgatcgtgttccagctcggcggcgttgtcagcgccaacaccggccccgacggcatcgccatcgtctacgagggcaagccccgcaatctcgaggcttatgcgccggagctgccgtaatatttttcggcagcataggtaaggtcttgcaccttgcctgacaatgtagtataatacagacagttcttataccataccaagaactattatggttgctatgataaggtcataggaccgtaaagctctgacgccctgctgtttggcagggcgtcatcttttttgccctaaatttcgtttaaattgtcagttgccaaataatgccatagtgcgctatgatagtagaaaagtgaaaggatgtgcaaaaaaatgaagcatccctatggaattggtctggatattggcattgcgtccgtcggctgggcggtggtggcactgaatgaaaacgcggagccctatggtctgatccgatgtggctcacgcatatttgataaggccgaagaaccccaaacaggcgacagccttgctgccccgcgccgtaaggcccgcagcgcccgccgcaggctgcgccgccgcagcctgcgcaaggcggatctgtacgagctgatggagaaaaacggtctgcccggtaaggcggaaatagagcaggctgtgcaagcgggacatctgccggatgtctatgcgctgcgtgttcaggcgttggatggcccggtgacagcactggattttgcccgtatactgctgcacctgatgcagcgcaggggctttcgcagtaaccgcaaggcagacgatgcacaaaaagacggtaagctgctgcaggcaattgacgcgaacacccgacgtatggaggcaaaccggtaccgtactgtcggtgagatgatgtaccgtgaccctgtgtttgcagagcacaagcgcaacaaagcggaaaattatctttccaccgtcaagcgcgaccaaatcatagacgaggccagactggtttttgcagcacagcgtcaatacggtgcgacatgggcttcgccggagatggaggcagagtacctttgtattctgacacgccagcgctcctttgcggaaggtccgggcaaaggcagcccgtatagcggcagcaacagggtcggcacctgcacgctggagggaaagagcgagcagcgggcagccaaggcggccttctcgtttgaatattttacgctgctgcaaaaaatcaatcatatccgcattgcggaaaacggaaccagccgcacgctgacaccggcagaacgacaggtactgctttccgtgtgctgccagacggacaagctggattttgcccggatccgcaaggcgttggcactgccggaagaagcacggttcaacatggtgcggtatcgcggggagcagacggcagaagcctgcgaaaagaaagaaaaaataacggcactcccctgctaccacaagatgcgtaaggcgctgaataccctgcggaaggatcatatccgcaatatcagccgcgagcagctggatgccgccggagctgcgctgacgaacccggaaaacgaggataagctgcgcgaggcattgaaacaggcggagtttgaaccgctggaaatagaagcactgctgacgctgcccagctttgcgggatatggacatatttcggtcaaggcgtgccgcaagctgatcccctatctggaacagggcatgaactataacgatgcctgccaggcagccggatatgattttcagggaaggcaaaacggcgaaaaagcgcagttcctgccggcctcgacggaggaaatggaggatattacaagcccggtggtgcgccgtgcagtggcacagacgatcaaggtcgtcaatgcgatcatccgcgagcagggcgaaagtccggtcagtatccatctggagctggcaagagagatgaataagaacttccagcagcgcagcgagttggacaaggcgatgcgggataacagtgcggaaaatgaacgcctgatgaaagagctgaatgagctttttccgggacgcaccgttaccgggcaggaccttgtaaaatatcgtctgtggaaagagcaggacgggcgctgtgcgtattcgatacagccgttggagttggacaaggttattacagtctccggctatgccgaggtagaccatatcgtcccttatagcataagctttgatgaccgccgtacaaataaggtgctggtgctgaaatcggagaaccgtcagaagggaaaccgtctgccgctgcaatacctgcagggaaaacgacgggacgactttattgtgtacaccaaagcaaacgtaaaaaatttccgcaagcgccagaacctattgaaggaaaggctgagcgaggaggacggcaagggctatatccagcgcaacctgcaggatacgcagtatattgcggcttttatgctgaactatatccgcaatcatcttgcgtttgcagactgttccggggcgggcaaacggcgggttgttgcggtaaatggcgccgttacggcgtttttgcgcaagcgctggggtcttagcaaggtgcgtgccgacggcgatctgcaccatgcagtagacgcagcggtgattgcctgtacgacacaggggatgataaagcgggtatctgacttttgcaagcgtgcagagacgacggcggtgcgtaatgagcacttccccgaaccgtggccgcacttccgtgatgagctgaggcagcgattgtcagcctgcccgcaggaagacctgatgaagatcaacccggtctattatgcgacggtggatatttcgtctattcagcctgtgtttgtatcgcggatgccgtgccataaggtgacaggtgcggcacacgaagagacgattcgaagccaagtggacgaacaatatacagcagtgcgaaaatcaattacagaattgtcactggataaggatggaaaaatcaaagactattttaatccaagcagcgatacgcttttgtatgaagcactgaagaagcgtctgacagaatttggcggaaacgcaaagaaagcctttgcggaaccgttttataagccacgtgcggacggaacccccggcgcacaggtgcgtaaagtgaaggttgtcgcaaaaatgaacaacacaattcctgtccgcagcggcggaggcgttgcaaaaggcggcgacatgatccgtatagatgtgtattatgtccccggtgatggttattattgggtgccgatttatgtggcggatacggtgaaagaaaccttaccgaataaggcggttgtgcgagacaaaacaatggaagagtggaaagaaatgaaagaagatgacttcctgttctcactttatagcaatgaccttattttagtggaaagagataaaccaatctgcttttcacttatgcatgaagatagcacacttccgaaaaagtatgagacgaagaaggaactggtttattacaaaggcggagatatatcaaacggaggaattaggatagaaacccatgaaggggcatacttccttaaaagtttgacgtttggcatagtacaaaaagttcagaaatatcaggtcgatgtccttggcaattatacccctgtgaaaaaagaaaaacggcaaaccttccctgcccaacggaggtgaattatgtcctaccgctgcctgatgatcgtgaaccctgcgcgcatccgctgcaaaaatgagcagctgttgattgaaacggaagaagttcactctgtgcccatcgaggacatcagtgccattgtactggaaagccgccaaagcacgatcacaacagcggctatggcggcgttggcacaaaacggtgtggtgactttctggtgcgatgaaacacatctgccgtgcggcatctcgctgccgtttgcacagcacagccgtcagctgggagtactgcgctggcagatggaattgaccctgccggcaaaaaagcggatgtggcagcaggtcgtgacagcaaaaattcaaaaccaagcggagtgccttgcactttgcggcaaaacacaggaggcggcgtttctattcgggcgtgccaaggctgtgacgagcggcgacaaagataacgtagaggcaagcgccgcagcgtactacttcccggctttatttggtgagggctacacccgccgcaatgaagatacgcgaaatgctgcactgaattatgcctacgcgattttgcggggctatatggcgcgctgcctgacggtgtatggttttcagccgtgcctgggtctgcaccatgacagtgagctgaaccaatttaatctggcggatgacctgatggagccgttccggcccgtggcggatttgtacgtggcagcaaatgtggccgaggatgcagcattgacacccatactgaagggaaagcttgtaaacctgttgaatgcggatattctttccggcgggcagcaccacagcgttgcctatgcaatggaacgcctggtgcaaggtctgcgtggacaagccctgctgttacccaaattgcttgaatacaagcagcatagctatgagtaaatttatgcggatgattgtcttttttgacctgcctgtgcagacaaagactgaaaggcggcatgcgacggcgttccggaattttttgctgaaggacggataccacatgctgcaattctctgtgtacgcgagggtgtgcaacggcaacgacgccgtgaagaaacacgaaagccgtttgagggcatccttgccgccaaacggctccattcgcctgcttgtcgttacagaaaagcagtaccagtctattcagattcttctgggaaattatcagccggaagaagccccttttgtatgtgaacagttgagttttttctaaaacaaaaagcgcatcggaccgcaatccgatgcgctttttgcatagcctattataccataccaagagctattagggaactatgactgcctgtgatgttcggcaagagcaacacgcattataccataccaagagctattagggaactatgacatagtaccgcagcggagaaggcgttacaggattataccataccaagagctattagggaactatgactagatattcttgcgtccacgcgcaacgagaattataccataccaagagctattagggaactatgacgatcgcagcgcgcacgatctcgctctcataattataccataccaagagctattagggaactatgacaaaaaaacggctatgatacatcattttatgattataccataccaagagctattagggaactatgacaagatgtaaagttctgcccaagtgataaatattataccataccaagagctattagggaactatgacatgcccagcgctatgggtcaattccagcagattataccataccaagagctattagggaactatgacatcaagacgaaaaaggcgattggcatttgaattataccataccaagagctattagggaactatgacatgcccggcgctatgggtcaattccagcagattataccataccaagagctattagggaactatgaccgccgacgctgccaggctccagggcgcagaattataccataccaagagctattagggaactatgacggaagatttgaccgagtatttaggccgccgattataccataccaagagctattagggaactatgaccgcgggggtttatccccccgccccgcgcccgattataccataccaagagctattagggaactatgaccttcaatgtttttcatggcgttgcccccttattataccataccaagagctattagggaactatgacgaatcagatcgccgttttcgtccaactcatattataccataccaagagctattagggaactatgacggtctgctgccacatattgttgaccttgttattataccataccaagagctattagggaactatgaccttgtaaaacacgccgtcgtcccagtacgcattataccataccaagagctattagggaactatgactatcgcccccgaccaaaaaacgcggaactgattataccataccaagagttattagggaactatgacccaggcgtccggcatcagtgttgacaccctattataccataccaagagctattagggaactatgattttcagataatcgataatgcactccgatgtattatactatatcagcacaatatgcgcagaatctaccacaaattttccccgcaggtcttgcaacggcctgcgggttttgttataatttaggtttgttgagcaacttaggattttaggctccgctgtcggctgctggtcggcagcgcaaaccccgcaaggctggcggtcttgcgtgtggtcaaaatctatccgccggagtattgtatgaatatgaaaaatctgtccgtccgtcgtcttgtgcgctgcgctgtcattgcggctgtctatgtggtcgtctgccttgtgctggccccgttcagctacggcgcggtgcaggtccgcgtggccgaggccctctgcctgctgccggtgttcggcgccgagtatatcgtcggcgtcacgctgggttgctttttggcaaatctgctcggctccaccgtcgttgacgtggtgttcggcacgctggcgaccctgctggcctgccttgtgacctacaagctgcgcgacatccgcgtgaaagggctggccattccggcatccctgccgcccgttgtctttaatatgatcattgtcggcgcgttcgagatcaccttcttcttctcggacggcgcacccacggcgatgctggcggtgttcaatgccgttactgtcggcattggcgagctcatcagctgcacgattctgggtgtggtgctcgtcaagctgatcgaaagcaacgcgggtctgaacaaaatttttacagaagaataacgaggtaacatctatgtgcccggaactgattttgtgggattggaacggtaccctgctcgatgatgtcgatctctgcgtggacgcgctcaaccgtctgctggcaggattcggctacccgcagcggtatgaccacgagcggtaccgggctatttttggctttcccatcgaggaatattacgtccgcgcgggatttgactttacaaagcacagctttgcagaactggccgaaaaatacatggaggactacgtccccgccagtgcggcctgcccgctggcagacggcgccattgacgcgctggaggcgtttaaggccgcggggctgcggcaggtcattctgtcggccagcaatctggacacgctgcggcgtcagaccgacgagcgcggcgtgacgggctattttgaccgtctgctgggtctgggcgacatctacgccaagagtaaggtcgaggtcgggctggcctatttaaaggaaaacggctttgacccggcacgcgccgtcatgatcggcgattccgtccacgactatgaggttgcacaggcgctgggcgtgcgctgcgttttgcagtccggcggccaccagccgccggaaaaattgagggaaacgggcgcaccggttgtaaagggattgcgcgaagccgcggcgctgattttggaataagagcttacgggaggttgtaggggcgtcgaggacgccgccccctgcaaacaactgcccgccgttatggtgcggatcgatgcgagcaacgacccctacaacagaggagcaacacaatgtctgaccgcataaaaggctccgccttgacgatgggcggcgcggcgtgctggggcgtttcgggctgcatggggcagtacctgttcacccgcgaggggatggattcgacctggctcgtgcccatccggctgtttctggcggggctgatcctgtgcggattcttttttataaaggaccgcaaaacagaaaaattaaatatattacgaaatacacccgcgcaggtttgacacgaacccctgtgcgggtgtattatagtatcatgtgtaaaactatataaaaccactattagccgcacctctacacgcggcggaaaatacaggggaactgttatgtctttttttgaaaaactgttcggctctttctcggacaaggaactcaagcgcatcaacccgctcaaggacaaggtccttgcccttgagccggagatggccaagctgaccgacgacgagctgaaggccaaaaccaccgagtttaaagagcgcctcgccaaaggcgagaccctcgacgacctgctgcccgaggcgttcgccgtatgccgtgaggctgactggcgcgtgcttggcatgaagccctaccccgtgcagatcatcggcggcatcgtgctgcaccgcgcctgcatcgccgagatgcagaccggtgaaggcaagacgctggtcgctaccatgcccacctacctgaacgccctgaccggcgagggcgtgcatgttgtcaccgtcaacgattacctggcccgccgcgactccgagtggatgggcaaggtctaccgcttcctgggtctgaccgtcggtctggtcgtccacggcgtcgaggccggggaccgcaagaaggcctacgaggccgacgtcacctacggcacgaacaacgagttcggctttgactacctgcgcgacaacatggtcgtctacaaggccaacatggtgcagcgcggccatgcgtttgccatcgtggacgaggtcgactccatcctgatcgacgaggcccgtaccccgctgatcatcagcggcaagggcgaggattccagcgtgatgtacaagcgcgcggacgactttgccaagacgctgaaaaagagtgttatcgtcgagttggacgacaaggtcgaggccgaggagcaggtagacggcgattacgtcgtggacgaaaagcgcaagaccgctaccctgaccgagtccggcgtcaaaaaggccgaggcgttcttccacgtcgagaacctggccgacgccgacaatatgtcgctgcgccattacattgacggtgcgatcaaggcccgcggcgttatgcaccgcgataccgactatatcgtcaaagacggtgaggtcatcatcgtcgacgagttcacgggccgtctgatgtatggccgccgcttcaacgacggcctgcatcaggccatcgaggccaaagaaggcgtgaccgttgccgccgagagcaagacgctggccaccgtcaccttccagaactacttccgcatgtacaaaaagctgtccggcatgaccggtacagcctccaccgaggccgacgagttcagcgagatttacggcctgaacatcgtcagcatccccaccaacaagccccgcgcccgcaaggacctgccagacagcgtctacaagaccgtcaacggcaagtacaacgccgtcattgagcaggtcgccgagtgccacgccaagggtcagcctgtcctggtcggcaccgtcagcgtcgaaaagagcgaggcgctgtccaagctgctgaaaaagaaaggcatcgagcacaacgtcctgaacgcgaagcagcatgagcgagaggccgagatcgtcgcgcaggccggcaagcagggcgcggtcaccatcgccaccaacatggcgggccgcggtaccgatattatgctgggcggcaacgtgacctacatggccaaggcggcccttaaaaaggagctgtccaaggagctgactgccaacctggcagagctgaaggatgcctacgagcatgagaaggcccgcgccaaggccagcggcaccgagctgcctaccccgccggaggccggtattgatgccaaactcgagatgctgatgaccgagtgcgacggccacgccgagaccgaggacgccgaaattctccatgcccgcaagcgttttgaggaactgtgcgaggaatttacccccgaggtcaagcgcgaggcggaggttgtccgcaatgcgggcggcctgttcatcatcggcaccgagcgccacgagagccgccgtatcgacaaccagctgcgcggccgtgcaggccgtcagggcgacccgggtgcatcccgcttcttcctgagcctggaggacgatctgatgcgcattttcggcggtgaccgcgtccagagccttatggattccctgggcctcgacgaggatgtgcccatcgagaacaagctcatcaccaacaccatcgagagcgcccagaagaagctcgaagcgtcgaactttgcaatccgtaagcaggtgctgcagtatgacgacgtcatgaaccagcagcgcgagatcatctacaagcagcgccagatggtgctggacggcgaggacatctccggcaagctgcacgagatgatgcgccaggccatcgacgatgcctgcacgaactacctgaacggcgagaccgccgacgactgggatttcgccgggctgcgccgccacttcatgaactggctgtgcctgcccaccgacttcaactacaccaccgagcagctgggcgacctgacgaaggagggcattgccgacgagctgtacaagcgcggcatggacatcctgaccgccaaggaaaagcgctacggtgccaagacgatgcgcgagcttgagcgcatctgcctgctgcgcaatgttgacagcaagtggatggaacacatcgacaacatggaccagctcaagcagggcatgggcctgcgcggctacggccagcatgaccccgtggtcgagtaccgcatcgagggcttcgcgatgttcgatgagatgatcgcgtcgatccgcgaggatgccgtccacatgctgctgacgattgagatccgccagcagaacgccgagccgaagcgtgagcagatcgccaagcccaccggcgataatgcgcccggtgataccggtgccaaggccccggcccccgtccgcgtgacgaagatcggccgcaacgatccctgcccctgcggcagcggcctgaagtggaaaaagtgcacctgcaaagagtaccaccccgacctgtaagcaatacaaaaggcgctgcccgggataaggcggcgcctttgttgtaggggggcgtcttaggcgccccgcagcatggctgctctctccgtaggggcggattccatatccgcccgcggaggggtcaagaccccttccctacaatgcttttttgaatgggtagagttgtaggggccgcacatgtgcggccgcagctttcccgcaaacgaccgcttatttttatgccgcgggccgggcatgcccggcccctacggtggcagcgtctctgtaggggcgaacatggttcgcccgcccgttcaccactttcccttttaacgaggtaacatcatgaaagcccgaatcatccgcgaaccccgctgcgccttactctggcgcattgacgaaagctaccccaactatgccgccatcgcccgcgcggccaggcgctatgacgtcaagctccgccccgtcgcggacggcgacctcggcggcattgtcggggacctctgcgcgggcaggccggccccggcgtttgcgccgcttatcgcggtaccggaccgcccggccatcatcgtcagcggactgcgccatgacaacggcgagttgggcgcgttccttgaccttatcaaaatgggcggcgcgtccattccggtgcgcagcatggtcacgcccaccagcaagggctggacgctggcaaacctgctgctggaattaaacaccgagcacgagaccgtgcagggcggcaacgcatgaagcgccgcctgaccgcgctgctgctggtactgctttgtctgccgctgaccgcctgccaaaagcagcaaaatttgtacagtgccacctggttcgacctgttcgacactgtcgccatcgtgcagggctatgccgacagccaggacagctggaacgcccagacacaggccatgtacagcgatttacagcgctataacgaattgtttgacatctaccaccactatgatggcgtcatcaacctgtatgatgtcaacgcccgggccgccgctgcgccggtgcaggtcagcgacgagctgtacgcatttttgcgctggtgcaaagacaccgcttaccctgccgccaacggcgcgacgaacatcgccgcaggtgcggtgctgcgcctgtggcacgatgcgcgggaaagcgactcccctgccccgccagacgcggacgccatcgcggcggcgctggtgcatatcgacatagaggatctggttctggacgatgcagcacaaaccgtctattttgctgacccggagatggcgctcgacgtcggtgcggtgggcaagggctacgctgtggagcagaccgcccgggccgcacaggcccgcgggctgaccagcgccctgctgaacatcggcggcaacgtgcgcgccatcggcacaaagcccggcggcaagccctggaccgcgggtgtcgagaatccctggggcgatgaccccgcgtacatacaggccgtcgagctggccgacggcgacagcctggtcatcagcggcgactaccagcgctactttgagtacgacggcgtgcggtacgcccacctgatcgatctgacgacgggctaccctgcccgctacgtcagcagcgtggccgtgctggcccgcgccgacaccggaggtctggccgacgcgctttccaccgggctgttctgtctgcctgaggagaccggccaggccctggccgcgcaaaaccactatgccgtcctctggatgcaccctgacgagaccacgagccggagcgcagactggccgcaataaaaacaacccccgattgtctgaaatcgggggttatatatttgctgtaattttatacaaactgtacaattctcaccgctgcggattgatgatcgtgcgccaatcgaggtcgccgtgctccaggccgtggatgaggacctcggcggtggcaatgtttgtggcaacgggaacgttgtgcacgtcacagatgcgcagcaggttcatctcgttcggctcgctgggcttggcgctgatggggtcgcggaagaagagcagcatgtccacttcctcacaggcgatgcgcgccacgatctgctcagcaccgccgtggccgccgggcaggaactttgtgaccttcagcccggcgttttcctccaccaggcggccggtcgtgccggttgccagcagacggtgctgctccaaaatatggcgatacgccatacaaaactgcaccatcaactcctttttggagtcatgggctatcaatgcaatcgtcataggtaaatgccaccatccttcgcagcagagtacaatatattaaaaggtaagcgggacgcgctgcccgcacaaacgctttgccatggcctgtccggccacaacggcgggatccgcagcgggcggtaccgtgccgttagccccggccagctgcagaacgcggctttcggggatgaccgccaaaagctgcacgccgacggtgtcgatgcactcgtccagatcagccacggcagcgtttttgtcgaagctctcgcgccggacgcggttcatcaccaggcgcacggcgctctgcgggcggccacccgccagcagccggtccgccacgatcttgccgtcgcgcagggccacggggtcgggcgtcagcaccagcagggccttgtccgccacggtggaggccgctgtgaacggcgcgcccatgccggcagcggtgtccagcaggataaaatcaaaataggggcgcatagcggtcagcagacgtcccagcggggccgcctccaccgcgccgccctcatacggggcgctgatgacggacagcccggggtacagcgggctgggcacaacggccttggccccctcgcatctgcc

SEQ ID NO: 789 - DNA, 23237 bp, synthetic construct
  misc_feature 1..23237: note = Synthetic
  source 1..23237: mol_type = other DNA
gcggccagggctgcgcggggcttgccgcagttataaggttcacaacaaataggggtaggcatattcaggcagcgtgcccgccgcgcacaacgcacagttgtacggcggggcggctggtgcgggcaggtacggccctgcgcggctccgatgccggggtgcccagcaggatgccgcaggctgcgttgagcatgacaaccgcagcaaaaagtcccagcagtgcagcccacagcggcatggtgccggaggccgcggcgctcaccataacgccgcccagcaggagggacgccgttaccgcgagcctgcaaaatttgtgcttgatgagttcccagttcataccgttacctccaaaggagccggccccgcaatggccgactgccgcaaattcaacaacggataacagcgttccgtttgttgtcttaactataatacatctgtaggttgttgtcaatatgtttttacaacttatttttgaaaataattgcaaaaaactctttacaaaaaccacagacggttgtataatgaagctaaagaaatgggattgtctacaagatgtggttttaccctactttatataaaggagttttcccgatgtttgcagagcgcttgaaagaggcccgcaaggccaaacgatacagccaggccgaggtgtccaggatgctgggggtaacgcagcaggctgttggcaagtgggagaccgggcgttccaccccggatccgcagaccgtggcgcgtctggcggagatactggatacccccaccgacgttctgctgggtctgcgcaaggagtcgggcgcggcgtccgctgtgggccgcaatgccttcagccgctatacggagtcccagatccccgtcgtgggcacggtgcgcgccggatacggggccctcgcgtttgaggaggactacggcaaggagtatgcctgcgtcaaggacccggaaaactacttcttcctcgtcgtaaagggcgacagcatggaaccgcgcatctctgacggtgacctggcgcttgtacaccgccagaacacgctggacaacggcgatctcggcgttctggtctacggggccgacggcgagggcacgctgaaaaagtacatccagcgcggcaactcggtcatcctgcaccctttcaacccggcctatgaagagctggtcatcaagggcgaggaactcgaccacctgtatattgccggcaaggtcgtggagaccaaggccaagtggtaaggctgccttacaagttcaattatagcatacggtaagtcccataatttggactttcaaccctaaaacagaagaaatttacaaaaatgctgcccgcggcacaccttgtagaacaaggatatgcggcgggctgtattttttatacccttttttcaggaggcaggtgcgatggaccttgcggaaaaactggaaatcctggcggacagcgccaaatatgatgtagcctgtacctccagcggggtggatcgccccggacgacacggtgcactgggcagcagtgcggcggcgggcatctgccacgccttcacggcggacgggcggtgcgtctccctcctgaaggtgctctactccaacgtgtgcagctacgattgcagctactgcgtcaaccgccgctccaacgacagaccccgcgcgaccttcaccccgcgtgagctggcggagctgaccatcggcttttaccgccgcaattatattgaagggctgtttctgtccagcgctgtgctgggcacgccggaccgcacgatggagctgatgatcgaggctctgcgcatcctgcgggaggagtaccattttaacggctacatccacgccaagacgatccccggcgcggacccgatgctggtcgaaaagatcgggcggctggcggaccgcctgtcggtcaatatcgagctgcccagcgagacgagcctgaccacgctggcccccgacaaaaagaaaactgcgatcctgcgccccatggggcagatcgcagtgcagagtgcgcagagcaaaaaggagatggtgctctaccgcggggccaagccgtttgcgccggctgggcagagcacccaaatgatcatcggggcgacgccggagacagaccgccatatcatggacctgaccgagggactctacaggaaatactcgctgaagcgcgtgttttactcggcctatctgccagtggtggaggatcgccgcctgcccgcactgcacacggcccctcccctgctgcgggagaaccgtctgtatcaggcggactggctgctgcggtactaccatttttcggcgcgggagctgctgaccgaggacgagccaaattttgacccctacctggaccccaagtgcacctgggccgtgcgccacccggagtttttccccgtggaggtcaacacggccagccgtgccgagctgctgcgggtgccgggcatcggtcccaagagtgcgctgcgcattgtcgaggcgcgccgggtgcaaagcctcggcatggcagagctcaagcgcattggagtcgtgcttaagcgggcacagtattttattacctgcaagggcaaggcagcggcccgcggaagccgcgcggagatcgcgggggcgctgcttgaccccaaggcgttcagcgtggggatgcagcagctttcgctggacgattttgtacccaaggccctgcccgacgctgccccggctgtgcaaaggctggaggcgcgcggcatggcggcggacgtggccgcccggacggtgcggcaggaggcactgcaatgtcttacgaagcgcatgtgaccgacacagcctactgctatgacggcagctttgcgggttttttgtgctgcgtgttcgagagctacgcccggaaggaaatccccgccgaggtctgcccacccgaggagggacagctgaatttcttcggcacgcggcagatttttgccgacgagcagcacgcgcggcgggtcgcggcagggctggaccggcttggccgcgaggtgaaggaccgcgtgacgacgggctttctctgcaccgaccccggcaaggacctgacactgctgcggtttgtgcggctctgctttgcgcaggggccgcgcgccgcgcagatgctgggcgacccggacgccgccgcggcgtttgccctggagcgggctgtcgacaacgaggcctgcaggctgatcgagttcatccgctttgaggagcgggacgggatgctcggcgcggtcatccacccgaagcaccggattttgccgttgctgcgcggacatttttgcagccgcctgcccgatgagagcttcctgatttatgacgcggcccacggcacggccctgctgcaccgggacggccaggtgcgctatctggcgatggagcgctatattcccggcaccgacgagacagagctcgactggcagcggatgtggaaacggttctttaaggcgttgaccatcgagcagcgccgcgacgaaaaggcccagatgagccatgtgcccaagcggttctggcaggatatgtgcgagatgcaggcagatttactatagggcttcccccgagggggaagctgtccgcaaagcggactgaggaggggcgggcttggagctactcatagtcatactccgggttcgcggcctggtactcggtcagccagcggagcagacgctcggtgtcggcataggtcatgcggcctgtgtcggccagggcgcacaccatggcgcggatgtcaccgccgtagagcgtctgcagatgcgcctggctgaccgcgccgcagtaggtcaggcggcggaccagcggcgtgtacagatttttattgccctgcttctcggtgcggacgaagtttttcttctcgagccgcagcaggaaattgagcagcgtcgagtctgcccagcggcattcgggcggcaggtgtgacgcgatctcgcgcctggtggcggcgcggctgcaggcccagagcgcggccatgacctgttcttcactgcgggaaagctgttccatgatggactccttttataatatgtagtgcctgtaggggccgggcgtgcccggcccgcaggtgcaaggcagacggtagtctgtgggaaggctgcgggccgcacatgtgcggcccctacagagcgaggaagaaataagtttgatattttacaaatgtggtaataagaactgaatatattttacaactgtggtagatataaatgcaagacaaaatattgcacaaattttgcgcccggaatttgacaatagcggcaaatatcttttacgaatgtctcataaagtgtttctaatacaaaaacaattagtcacaatacaaaaacacatccccgattttcggcttttttcggtattttgtccgcttgcccgcaggggggcaaagctcctataatattggcataccgcaacggcgcggcagatgcgatccgccgccggcgggtcgcatttgatttactgtaggaggaaataaagatggctagagtttacaatttcagcgccggcccttcgatgctgccggaggctgttctgaaaaccgcacaggcagagctgctggactaccacggctccggcatgagcgtgatggagatgagccatcgcagtaaatggtttgacgagatcatcaccaacaccgaggccgccatgcgccgggtactgaacattcccgacaattataaggtgggctttttccagggcggcgcgacccagcagtttgcgatggtgccgctgaactttatgaccaccggaacggcggattatcttgtgaccggcaacttcagcaagaaggcagccgaggaggccgccaagttcggcacggcccgcattgccgccagcagcaaggacaagaactttacctacatccccgacgtcgcggccatcgactatgacccgaacgccagctatatccacatctgccagaacaacacgattttcggcacaaaatatgtcgatgtaccgcaggtggacggcatcccgctggtggcagatatgagctcgatgatctgctccgagccggtggacgtcagcaagtacggcgccatctacttcggcgtgcagaagaacattgcccctgccggtatggctgtggccatcgtgcgtgacgacctgctgggcaaggccgccaagggcctgacccccgacaagatccccacgatgatgaactacacgaccctgctgaacgccgacagcatgtacaacaccccgccgtgctggtgcatctacatgaccggcctcgtcatgaactaccttgagaacgagatcggcggcctggagaacatgcagaagcgcaatgccgccaaggccaaggtgctgtacgattacctcgacgggcaggacttctacaagaatcccgttgagaaaaagtaccgcagcatgatgaatgtgaccttcaccagccccgacgccgacaccgacaaggcgttctgtgccgcggccaccgaggcaggcttcgtcaacctgaagggtcaccgtctggtgggcggcatgcgtgcgtccatctacaacgccatgcctgccgagggcatcgacaagctggtcgactttatggagaagttccgcagggagcattgagctgctgcacagtaggggtcgggtgtgtccggcccgcggcactgtggcagccacccgtgagagggtcactgcgtaaggctgagggccgggcatgcccggcccctacggcgcaaaataaggggaacagggagtaacgatatatgtataccatcaaaacattgaacgccatttcgccggtgggtctggccaagctgcccgccaaccagtttgagatcgacaacgaggccgctgcaccgcagggcattctggtgcgcagcgccgatatgcacgatgccccgctgcccgacagcctgctggccatcgcccgtgcaggtgccggtacgaacaacattcccgtggaggactgcacgaacaagggcatcgtcgtgttcaacacgccgggcgccaacgccaacgccgtggctgagctcgtcgtcggtgcgctggtcgcgggcagccgcaatctggtggacgccgtgaactgggcgcagaccctcaagggccgcgacacgattgccaaggacgtggagaagggcaaaaaggccttcgtcggtcccgagctgcgcggtaagacgctgggcgtcatcgggttgggtgccatcggtgcgcgcgtggccaacgctgccgtcgcgctgggcatggaggttttgggctatgacccgtatatttccatcgatgctgcgtggagcctgtcccgcagtgtgcagcactgtgtcacgctgggcgatatgctgccccgctgcgactacctgaccatccatgtcccctacctgcctacgacccgccacaccatcaacgcccagacgctggcgatgtgcaaggacggcgtgcgcgtgctgaactttgcccgcggtgagctggtggacaacgccgcactgctcgacgcactgaacagcggcaaggtcgcgcagtatttctgcgacttccccaccgaggagctgctgggcgtcaagggcgtctgctgcacgccgcatctgggtgccagcacgccggaaagcgagacgaactgcgccgtgatggccgccgccgagctgagcgactacctgaaaaacggcaacatcgcccacagcgtcaacctgccggatgtcagccagccgcgtgtgggaggccgccgcatctgcatcatccacaagaacgctccgggcgcgatctcggccatcacgagcattttgaccgaagcgcacctgaacattgaaaacatggtgaacaagggcaaaaaggatgtcgcctataccctgctggatgtgacgggcaatgtcaccgacgacctcgccgtcaagctgggtgcgattgaacccgccatccgcgtgcgcgtgctgtaaaagcatcaactttgcgaaatctcccctgctgaaccaatcagcaggggcttttttgtggatgataaccatgaaatagaatgaatcgctcgcggagacgcgggcggtttttgttctctttgcccaaaaaccaaacaaaacggaacaatcgcccgaatacggctttttttgcggtgggttttatggtagaatcaatgagaactcaaaaaatgcagagggagggccgcagcatgaccaacgcgccgaaaaccgtattagccatccatgacctgccgggctttggccgggcggcgctgtcggtcatcgtgccggtgctctcgacgctgggcgtgcagaccgtggcactgcctacggcggtgctgtccacccacacggggggcttaggcaccccggctaagctggccaaccccggctacggctccgcggcactggaacattatcatcggctgggcgtgaaatttgactgcatctactcgggctatctggcggacgccgcgcaggcaaagctcgtagagcaggcgtttgagctgtggccccgcgcgttcaaggtcgtggacccggtgctgggcgacggagggcggctgtacagcggcctgggggccgacatggtgcccgctatgtatagtctgtgcagcaaggcggatctgatcgtccccaatgtgaccgaggccgcgctgctgctgggcgacccgctgcccggtgtgggcagtgccgagcaggccgccgcacaggcggcccggctgacccgtgtggcgccgcaggtcgttgtgaccggcgtgacgggtatcggcggcggacgctacataggctgtgtgggcgcggcccgcggcggcgagggctatgccgtaaaaacgccgctgcagccgcggatgttccacggcacgggcgatatttttgccgccgtgctcgtcgggcgcattttgcggggcaacgtcccccaggctgccgtacaggcagctgccgccttcgtagccgagtgcatcaggcagacgcccgagggagccgacgagcggctgggcgtctggctggagaacgccctgccgaaactgcggcaggagtaagaccatgagactgccgcgagacaaggatgtccttgaaaatgcccgagcgctgcgaaaaagcatgacgcgggaggaacgccatctgtggtatgattttctgcgcggatattcgccgcgctttgtacggcagaaggttgtgggacggtatattctggattttttattgcgatgcagcaggtctggcgatagagctggacggcagccagcattatgaagcggcgggacagctgcacgatgcacagcgcacggaatatctggagggcttcggaatcagagtgctgcggttttccaatctggatgtgatgcagcattttgagggcgtatgccgtgtgattgataacgccgtgaaaagcctcccctagaggggaggtggccgaaggccggaggggtggccgggagccgacccatgaacggtgtgccgcccggcccctcacccggcgctgcggcgccaccctcccccaagggagggctaaagttatagaacgaggacttgtaaatttatgccaaccttaaacattgtactggtcgagccgcagatcccgcagaactccggcaatatcgcgcggacctgcgcggtgacgggagcgcggctgcatatagtcggcccgatgggctttaccatcgacgacaaaaaattaaagcgcgccgggcttgactattggcaccagcttgatataacatattatcaagatcaggcggacttttttgccaaaaacagtggtccgtttttctacttcacgtccaaaggcccgcgccgccatgtggatgtgacctaccccgacggcgcgtatctcgtctttgggcgcgaggatgccggcctgcccgaggagctgctggccgcgcatgaggccgactgcgtgcgtatgccgatgcgcaggggcgagcgatgtctgaacctgtccaacgcggtggcagtgggcgtgtacgaagcattgcgtcaatgggattttgccggtttggagacccacgggcagttgacccgatacgaatggagtgaggatgtaaaatgagcaagataggttttctgacagattcctgttccgacattccgcaggagcttgcggataagtacggcatcgaggtcgtgggcttccccatcaaccttgacggtgtggagtacatggaacgcaaggactttaccaacgaccagttttaccagatgatgcgcgacgcccagggcgtgcccaccaccgccgccatcacccagctgcagttctgcgatatttacgcccgctatgcggacgagggctacaccgacctggtgtacctgagcatcaacgcgggcggctccagcacctacaacaacgccgtcaaggctatggagctgttggaggaggagcgccccggctacacgatgaagattcaggtcatcgacagccacacctactcgatgccctacggctggtatttctgtgagtgcgcccgtaaggtgcgcaacggcggtgagctggccgcctgcgtggccgagctgaagcagaagctggactgcgttgagatctgtctggccgcctacagcctgaagcagatgaagaagtcgggccgcgtcagcgccgccgctgcggtggtcggcgacctgctgggcatccgccccatcatcagcctgaatgcgggcgtctccaaggtcgagagcaaggtccgcggcgacgccgccgtgcccgcagccatgatcaaatgggtggagagccgcgtcgattcgatgaaggacacgccctacatggtggcctacacgtccagcaccgccaggcgtgacgagctggtcaagctgtgcaaaaaggcgtttggccatgcaccgctgatcgtgttccagctcggcggcgttgtcagtgccaacaccggccccgacggcatcgccatcgtctacgagggcaagccccgcaatctcgaggcttatgcgccggagttgccgtaatatttttcggcagcataggtaaggtcttgcactttgcctgacaatgtagtataatacagacagttcttataccataccaagaactattatggttgctatgataaggtcataggaccgtaaagctctgacgccctgctatttggcagggcgtcatcttttttgcctaaatttcgtttaaattgtcagttgccaaataatgccataatgcgctatgatagtagaaaagtgaaaggatgtgcaaaaaaatgaagcatccctatggaattggtctggatattggcattgcgtccgtcggctgggcggtggtggcactgaatgaaaacgcggagccctatggtctggtccgatgcggctcacgcatatttgataaggccgaacagcccaaaacaggcgacagccttgctgccccgcgccgtgaggcccgcagcgctcgccgcaggctgcgccgccgcagcctgcgcaaggcggatctgtacgagctgatggagaaaaacggtctgcccggtaaggcggaaatagagcaggctgtgcaagcgggacatctgccggatgtctatgcgctgcgtgttcaggcgttggatggcccggtgacagcactggattttgcccgtatactgctgcacctgatgcagcgcaggggctttcgcagtaaccgcaaggcagacgatgcacaaaaagacggtaagctgctgcaggcaattgacgcgaacacccgacgtatggaggcaaaccggtaccgtactgtcggtgagatgatgtatcgcgaccctgtgtttgcagagcacaagcgcaacaaagcggaaaattatctttccaccgtcaaacgcgaccaaatcatagacgaggccagactggtttttgcagcacagcgtcaatacggtgcgacatgggcttcgccggagatggaggcagagtacctttgtattctgacacgccagcgctcctttgcggaaggtccgggcaaaggcagcccgtatagcggcagcaacagggtcggcacctgcacgctggagggaaagagcgagcagcgggcagccaaggcggccttctcgtttgaatattttacgctgctgcaaaaaatcaatcatatccgcattgcggaaaacggaaccagccgtacgctaacaccggcagagcgacaggtactgctttccgtgtgcagccagacggacaagctggattttgcccggatccgcaaggcgttggcactgccggaagaagcacggttcaacatggtgcggtatcgcggggagcagacggcagaagcctgcgaaaagaaagaaaaaataacggcactcccctgctaccacaagatgcgtaaggcgctgaataccctgcggaaggatcatatccgcaatatcagccgcgagcagctggatgccgccggaactgcgctgacgaacccggaaaacgaggataagctgcgcgaggcattggaacaggcggagtttgaaccgctggaaatagaagcactgctgacgctgcccagctttgcgggatatggacacatttcggtcaaggcgtgccgcaagctgattccctatctggaacagggcatgaactataacgatgcctgccaggcagccggatatgattttcagggaaggcaaaacggcgaaaaagcgcagttcctgccggcctcaacggaggaaatggaggatattacaagcccggtggtgcgccgtgcagtggcacagacgatcaaggtcgtcaatgcgatcatccgcgagcagggcgaaagtccggtcagtatccatctggagctggcaagagagatgaataagaacttccagcagcgcagcgagttggacaaggcgatgcgggataacagtgcggaaaatgaaaaactgatgcaggaactgcacgcaaagttctccgggcggaaaatcagcgggcaggaccttgtaaaataccgcctgtggaaagagcaaaatgagatatgcgcgtattcactggaaaaactggatttgacgcgggtcattacagaaccgggttatgcggaagttgaccacattgtcccctatagcataagctttgatgaccgccgcacaaataaggtgctggtgctggcgtcggagaaccgtcagaagggaaaccgtctgccgctgcaatacctgcagggaaaacgacgggacgactttattgtgtacaccaaagcaaacgtaaagaatttccgcaagcgccagaacctattgaaggaaaggctgagcgaggaggacggcaagggctttatccagcgcaacctgcaggatacgcagtatattgcggcttttatgctgaactatatccgcaatcatcttgcgtttgcagactgttccggggcaggcaaacggcgggtcgttgcggtaaatggcgccgttacggcgtttttgcgcaagcgctggggtcttagcaaggtgcgtgccgacggcgatctgcaccatgcagtggacgcggcggtgattgcctgtacgacacaggggatgataaagcgggtatctgacttttgcaagcgtgcagagacgacggcggtgcgtaatgagcacttccccgaaccgtggccgcacttccgtgatgagctgacgcagcgattgtcggcctgcccgcaggaaaatttgatgcagatcaacccggtctattatgcgacggtggatatttcgtctattcagcctgtgtttgtatcgcggatgccgcgccataaggtgacaggtgcggcacatgaagagacgattcgaagccaagtgaacgaacaatatacagcagtgcgaaaatcaattacagaattgtcactggataaggatggaaaaatcaaagactattttaatccaagcagcgatacgcttttgtatgaagcactgaagaagcgtctgacagaatttggcggaaacgcaaagaaagcctttgcggaaccgttttataagccacgtgcggacggaacccccggcgcacaggtgcgcaaagtgaaggttgtcgcaaaaatgaacaacacaattcctgtccgcagcggcggaggcgttgcaaaaggcggcaacatgatccgtatagatgtgtattatgtccccggtgatggttattattgggtgccgatttatgtggcggacacggtaaggccggaactgccaaacaaagcggtactgcgggggaaaagcatggaagattggaaagaaatgaaagaagaaaacttcctgttttcactttacgccaatgatctcattctcgtcgaaagagaggaaccaataaatttttcgctcgtcaataatgacagtacacttccgaataagttctcggtaaagaaagtccttgtttattataagagcggaaatatatcgaatgctgcaatcaaagtggaaacgcatgatggggcgtatgtttttgaaggcatgacgtttggaaccgtacgaaaaatccagaaataccaggtcgatattcttggtaattacgttcctgttaaaaaagaaaaacggcaaaccttccctgcccaacggaggtgaattatgtcctactgctgtctgatgatcgtgaaccctgcgcgcatccgctgcaaaaatgagcagctgttgattgaaacggaagaagttcactctgtgcccatcgaagacatcagtgccattgtactggaaagccgccaaagcacgatcacaacagcggctatggcggcgttggcacaaaacggtgtggtgactttctggtgcgatgaaacacatctgccgtgcggcatctcgctgccgtttgcacagcacagccgtcagctgggagtactgcgctggcagatggaattgaccctgccggcaaaaaacggatgtggcagcaggtagtgacagcaaaaattcaaaaccaagcggagtgtcttgcactttgcggcaaaacacaggaggcggcgtttctattcgggcgtgccaaggctgtgacgagcggcgacaaagataacgtagaggcaagcgccgcagcgtactacttcccggctttatttggtgagggctacacccgccgcaatgaagatacgcgaaatgctgcactgaattatgcctacgcgattttgcggggctatatggcgcgctgcctgacggtgtatggttttcagccgtgcctgggtctgcaccatgacagcgagctgaaccagtttaatctggcggatgacctgatggagccgttccggcccgtagcggatttgtacgtggcagcaaatgtggccgaggatgcagcattgacacccatactgaagggaaagcttgtaaacctgttgaatgcggatattctttccggcgggcagcaccacagcgttgcctatgcaatggaacgcctggtgcaaggtctgcgtggacaagccctgctgttacccaaattgcttgaatacaagcagcatagctatgagtaaatttatgcggatgattgtcttttttgacctgcctgtgcaaacaaagactgaaaggcggcatgcgacggcgttccggaattttttgctgaaggacggataccacatgctgcaattctctgtgtacgcgagggtgtgcaacggcaacgacgccgtgcagaaacacgaaagccgtttgagggcatccctgccgccaaacggctccattcgcctgcttgtcgttacagaaaagcagtaccagtctattcagattcttctgggaaattatcagccggaagaagtcccttttgtatgtgaacagttgagttttttctaaaacaaaaagcgcatcggaccgcaatccgatgcgctttttgcatagcctattataccataccaagagctattagggaactatgacgacctgcgcggaggttttggtggaggcttgactataccataccaagagctattagggaactatgacgctggctgacgcttgcccgccccatctgggattataccataccaagagctattagggaactatgactacatttccagccacgcctccagtgcctcgattataccataccaagagctattagggaactatgattttcagataatcgataatacactccgatgcattataccatatcagcacaatatacgcagaatctaccacaaattttccccgcaggtcttgcaacggcctgcgggttttgttataatttaggtttgttgagcaacttaggattttaggctccgctgtcggctgctggtcggcagcgcaaaccccgcaaggctggcggtcttgcgtgtggtcaaaatctatccgccggagtattgtatgaatatgaaaaatctgtccgtccgtcgccttgtgcgctgcgctgtcattgcagctgtctatgtggtcgtctgccttgtgctggccccgttcagctacggcgcggtgcaggtccgtgtggccgaggccctctgcctgctgccggtgttcggcgccgagtatatcgtcggcgtcacgctgggctgctttttggcaaatctgctcggctccaccgtcgttgacgtggtgttcggcacgctggcgaccctgctggcctgccttgtgacctacaagctgcgcgacatccgcgtgaaagggctggccattccggcatccctgccgcccgttgtctttaatatgatcattgtcggcgcgttcgagatcaccttcttcttctcggacggcgcacccacggcaatgctggcggtgttcaatgccgttactgtcggcattggcgagctcatcagctgcacgattctgggtgtggcactcgtcaagctgattgaaagcaacgcgggtctgaacaaaatttttacagaagaataaggcaacaccgcacaattctaagtgccgatacggcgagcgaggcacgtcagatgctaagcaaaaagcgcaggcaatactttgtgtattaccgagcatttttgcgacgcaggtgacgtgccgcagccgccggagcggtgcttaagcccgcggggcgggaattgtgcggtgctgccgtgagaggtaacatctatgtgcccggaactgattttgtgggattggaacggtaccctgctcgatgatgtcgatctctgcgtggacgcgctcaaccgtctgctggcaggattcggctacccgcagcggtatgaccacgagcggtaccgggccatttttggttttcccatcgaggaatattacgtccgcgcggggtttgactttacaaagcacagctttgccgagctggccgaaaaatacatggaggactacgtccccgccagtgcggcctgcccgctggcagacggcgctattgacgcgctggaggcgtttaaggccgcgggggtgcggcaggtcattctgtcggccagcaatctggacacgctgcggcgtcagaccgacgagcgcggcgtgacgggctattttgaccgtctgctgggtctgggcgacatctacgccaagagcaaggtcgaggtcgggctggcctatttagaggaaaacggctttgacccggcacgcgccgtcatgatcggcgattccgtccacgactatgaggttgcacaggcgctgggcgtgcgctgcgttttgcagtccggcggccaccagccgccggaaaaattgagggaaacgggcgcaccggttgtaaagggattgcgcgaagccgcggcgctgattttggaataagagcttaggcaataccgcataattctaagtgccgatacggcgagcgaggtgcggcagctgctaagccaaaagcgcagataatactggatgtcttatcgagcattttggcaacgcaggtgccgtgccgcagccgccggagcggtgcttaagccgtaaggcgggaattatgcggtattgcccttacgggaggctgtaggggcgtcgaggacgctgccccctgcaaacaacggcccgccgttatgatgcgggtcgatgcgagcattgacccctacaacagaggagcaacacaatgtctgaccgcataaaaggctccgccttgacgatgggcggcgcggcgtgctggggcgtttcgggctgcatggggcagtacctgttcacccgcgaggggatggattcgacctggctcgtgcccatccggctgtttctggcggggctgatcctgtgcggattctttttcataaaggaccgcaaaacgctttttgacccgtggaacgtcaggaaaaatccgcgcaacgccattgacctgctggtctacggtctggcgggcgtcagctgctgccagttcacctactttctgacgatccagctgtccagcgcaggcatgggcacgattttgcaggatgtctcccccgtcatcatcctgctggtcgtctgcatccagcaaaagcgcggcccccgcgtgtttgagatattctcgattgtgctggcgctggtcggcgtgttcctcatcacgacccacggcagcctgaccgggctggccgtcagcccggcggcgctggtctccggcattgtcagcgcctgctgcgtcgccatctacacgatgtggccgaaaaaattgcaggagcagtaccccaccccgatgctgcagggctgggcgtttttgatgggcggcatcatgttttcgctcatcttccgcccgtggcagatcgactatgtgccgacggcgatgggcgcgttcggcatcttcacggtggttgtgctgggcaatgtgctggcgttcagtctgtacatgtcgggtgtgccgctcatcggcccccagaaggcgagcctctacagctttgccgaaccggttacggcggccatcatcagcacgctggtgctgggctcgccctttacgctgtgggatgcgctgggtttcggctgtatctttttgatgctggtgctgctgagcctgcccgcaaaacagaaaaattaaatatattacgaaatacacccgcgcaggtttgacacgaacccctgtgcgggtgtattatagtagtatgtgtaaaactatataaaaccactattagccgcacctctacacgcggcggaaaatacaggggaactgttatgtctttttttgaaaaactgttcggctctttctcggacaaggaactcaagcgcatcaacccgctcaaggataaagtccttgctttggagccggagatggcgaagctgaccgacgaggaactgcaggccaagaccaccgagttcaaagagcgccttgccaagggtgagaccctagacgacctgctgccggaggcgttcgccgtctgccgcgaggccgactggcgcgtgctgggcatgaagccctaccccgtgcagatcatcggcggcatcgtgctgcaccgcgcctgcatcgccgagatgcagaccggtgaaggcaagacgctggtcgctaccatgcccacctacctgaacgccctgaccggcgagggcgtgcatgttgtcaccgtcaacgattacctggcccgccgcgactccgagtggatgggcaaggtctaccgcttcctgggtctgaccgtcggtctggtcgtccacggcgtcgaggccggggaccgcaagaaggcctacgaggccgacgtcacctacggcacgaacaacgagttcggctttgactacctgcgcgacaacatggtcgtctacaaggccaacatggtgcagcgcggccatgcgtttgccatcgtggacgaggtcgactccatcctgatcgacgaggcccgtaccccgctgatcatcagcggcaagggcgaggattccagcgtgatgtacaagcgcgcggacgactttgccaagacgctgaaaaagagtgttatcgtcgagctggacgacaaggtcgaggccgaggagcaggtagacggcgattacgtcgtggacgaaaagcgcaagaccgctaccctgaccgagtccggcgtcaagaaggctgaggcgttcttccacgtcgagaacctggctgacgccgacaatatgtcgctgcgccattacattgacggtgcgatcaaggcccgcggcgttatgcaccgcgataccgactatatcgtcaaagacggtgaggtcatcatcgtcgacgagttcacgggccgtctgatgtatggccgccgcttcaacgacggcctgcatcaggccatcgaggccaaagaaggcgtgaccgttgccgccgagagcaagacgctggccaccgtcaccttccagaactacttccgcatgtacaaaaagctgtcaggcatgaccggtacagcctccaccgaggccgacgagttcagcgaaatttacggcctgaacatcgtcagcatccccaccaacaagccccgcgcccgcaaggatctgcccgacagcgtctacaagaccgtcaacggcaagtacaacgccgtcattgagcaggtcgccgagtgccacgccaagggtcagcctgtcctggtcggcaccgtcagcgtcgaaaagagcgaggcgctgtccaagctgctgaaaaagaaaggcatcgagcacaacgtcctgaacgcgaagcagcatgagcgagaggccgagatcgtcgcgcaggccggcaagcagggcgcggtcaccatcgccaccaacatggcgggccgcggtaccgatattatgctgggcggcaacgtgacctacatggccaaggcggcccttaaaaaggagctgtccaaggagctgaccgccaacctggccgagctgaaggatgcctacgagcatgagaaggcccgcgccaaggccagcggcaccgagctgcctaccccgccggaggccggtattgatgccaaacttgagatgctgatgaccgagtgcgacggccacgccgagaccgaggacgccgaaattctccatgcccgcaagcgttttgaggaactgtgcgaggaatttacccccgaggtcaagcgcgaggcggaggttgtccgcaatgcgggcggcctgttcatcatcggcaccgagcgccacgagagccgccgtatcgacaaccagctgcgcggccgtgcaggccgtcagggcgacccgggtgcatcccgcttcttcctgagcctggaggacgatctgatgcgcattttcggcggtgaccgcgtccagaacctcatggattccctgggcctcgacgaggatgtgcccatcgagaacaagctcatcaccaacaccatcgagagcgcccagaagaagctcgaagcgtcgaactttgcaattcgtaagcaggtgctgcagtatgacgacgtcatgaaccagcagcgcgagatcatctacaagcagcgccagatggtgctggacggcgaggacatctccggcaagctgcacgagatgatgcgccaggccatcgacgatgcctgcacaaactacctgaacggcgagaccaccgacgactgggattttgccgggctgcgccgccacttcatgaactggctgtgcctgcccaccgacttcaactacaccaccgagcagctgggcgatctgacgaaggagggcattgccgacgagctgtacaagcgaggcatggacatcctgaccgccaaggaaaagcgctacggtgccaagacgatgcgcgagcttgagcgcatctgcctgctgcgcaatgttgacagcaagtggatggagcacatcgacaacatggaccaactcaagcagggcatgggcctgcgcggctacggccagcatgaccccgtggtcgagtaccgcatcgagggcttcgcgatgttcgatgagatgatcgcgtcgatccgcgaggatgccgtccacatgctgctgacgattgagatccgccagcagaacgccgagccgaagcgtgagcagatcgctaagcccaccggcgataatgcgcccggtgataccggtgccaaggccccggcccccgtccgcgtgacgaagatcggccgcaacgatccctgcccctgcggcagcggcctgaagtggaaaaagtgcacctgcaaggagtaccaccccgacctgtaagcaatacaaaaggcgctgcccgggataaggcggcgcctttgttgtaggggggcgtcttagacgccccgcaaacgtccgcttgcggccatgctgcgggccggccatgcccggcccttacaggaccgctctctccgtaggggcggatcccatatccgcccgcggagaggtcaagacccctcccctacaatgctcttttgaatgggtagagttgtaggggccgcacatgtgcggcccgcagctttcccgcaaacgaccgcttatttttatgccgcgggccgggcatgcccggcccctacggtggtagcgtctctgtaggggcgaacatggttcgcccgcccgttcaccaccttcccttttaacgaggtaacatcatgaaagcccgaatcatccgcgaaccccgctgcgccttactctggcgcattgacgaaagctaccccaactatgccgccatcgcccgcgcggccaggcgctatgacgtcaagctccgccccgtcgcggacggcgacctcggcggcatcgtcggggacctctgcgcgggcaagccggccccagcgtttgcgccgcttatcgcggtaccggaccgcccggccatcatcgtcagcggactgcgccatgacaacggcgagttgggcgcgttccttgaccttatcaaaatgggcggcacgtccattccggtgcgcagcatggtcacgcccaccagcaagggctggacgctggcaaacctgctgctggaattaaacaccgagcacgagaccgtgcagggcggcaacgcatgaagcgccgcctgaccgcgctgctgctggtactgctttgtctgccgctgaccgcctgccaaaagcagcaaaatttgtacagtgccacctggttcgacctgtttgatactgtcgccatcgtgcagggctatgccgacagccagaacagctggaacgcccagacacaggccatgtacagcgatttacagcgctataacgaattgtttgacatctaccaccactatgatggcgtcatcaacctgtatgatgtcaacgcccgggccgccgctgcgccggtgcaggtcagcgacgagctgtacgcatttttgcgctggtgcaaagacaccgcttaccctgccgccaacggcgcgacgaacatcgccgcaggtgcggtgctgcgcctgtggcacgacgcgcgggaaagcgactcccctgccccgcccgacgcggacgccatcgcggcggcgctggcgcatatcgacatagaagatctggttctggacgatgcagcacaaaccgtctattttgctgacccggagatggcgctcgacgtcggtgcggtgggcaagggctacgccgtggagcagaccgcccgggccgcacaggcccgcgggctgaccagtgccctgctgaacatcggcggcaatgtgcgcgccatcggcacaaagcccggcggcaagccctggaccgcgggtgttgagaacccctggggcgatgaccccgcgtacatacaggccgtcgagctggccgacggcgacagcctggtcatcagcggcgactaccagcgctactttgagtacgacggcgtgcggtacgctcacctgatcgatctgacgacgggataccctgcccgctacgtcagcagcgtggccgtgctggcccgcgccgacaccggaggtctggccgacgcgctttccaccgggctgttctgtctgcccgaggagaccggccaggccctggccgcgcaaaaccactatgccgtcctctggatgcaccctgacgagaccacgagccagagcgcagactggccgcaataaaaacaacccccgattgcctgaaatcgggggttatatatttgctgcaaatttatacaaactgtatatgcgcgggcacacgaaaaaatctagaaaggcgcagagaaaatcaagacagcgcataggagctcgctccactccgttccgctcgcaatccgcctaatctccaagccaactccaagaacattccaagtccacaccaagcaaaatcaacgcattatctcatgttttcccgcatgggacagaatgagagaggattggaaacaaaaaagaaagcaggccccggagccggatggcggaggggcctgcgtgtggattcttaacttgtctctttgttcttcggtgaacgccctgtatcaactgtatatgaaagggcactcaaaaaattccaaaggggcacacctaaaatcaagaaaatccaaggaaaaatgcgggagaaaatcggataaacgagtcaattaaggctcgctccactccgttccgctcgccgcccattattcctcaatgcttttccaaaaatcactctaaaacgcgggaatccaagatttttcttatagatttcttcgattcatctcaaaaatggcaaacaaaaaagaccccaaacacccggaggtgctggggtcttacaattatttacctgtgtttgtcctttttgatttcttgttgtgccctacatcatagtaatatatctgccctaatatgtcaatattttacggtaaactgtaacttttataagtgtacatttaaaaatcacgatttaaaataaaagttttttcgcaatctaaccgctccatcatcacagataacgtacaggtcttgctccaagtgcgcaagctctgcgggtctgataattgggcggttatttttgttttcgtcatccccaaatgagggcttgtctcctatcatttttgaaaaatactcctgcgtctcggtgtccttgca

SEQ ID NO: 790 - DNA, 23234 bp, synthetic construct
  source 1..23234: mol_type = other DNA
  misc_feature 1..23234: note = Synthetic
agctgcgcggggcttgccgcagttatatgtgtatcacaacgaataggagtaggcagagttttacgccgcatggccgccgcgcacgacgcgcagttgtaccgcagggtgtttgcgcggcgcggaggcaggcaggccgaccgattcctccgggtgggccagcaggatgccgcagacggcgttgagcatgatgacagccgcaaaaagccccagaatggccgcccaaaacggcatggagccggaggcggcagcactgagcatagcccctcccaacaggatagccgccgtggcgacaagacggcacagcttgtttttgataagttcccagttcataccgatacctccaaatcagtcggccccgcgtggccgactgccgcaattttaacaacggacaacagcgttttgttcgttactcttatcataatacacccagcggttgttgtcaatgcctatttacaacttatttttgaaaatgtttgcaaaaaactctttacaaaaaccacggacagttgtataatgagactaaagaatcagagccgcatacaagatgtggtttaccctactataaaaaggagatttccgatgtttgcagagcgcttgaaagaggcccgcaaggccaaacggtacagccaggccgaggtttccaaaatgctgggtgtgacgcagcaggctgtcggcaagtgggagaccgggcgttccaccccggacccacagaccgtcgcgcgtctggcagaaattttggataccccctccgatgtgctgctgggcctgcgtaaggagccgggcgtttccgccgccgtgggccgcaacgccttcagccgctataccgaatcccagatcccggtggtgggcaccgtccgcgccgggtatggggccctcgcctttgaggaggactacggcaaggagtacgcctgcgtcaaggatccgaagaactacttcttcctcgtggtcaagggcgacagcatggagccgcgcatttccgacggcgacctggccctcgttcaccgtcagaacacgttggacaacggcgacctgggcgtgctggtctatggcgcagacggcgagggtacgctgaaaaagtatatccagcgcggcaactcggtcgtgctgcagcctttcaacccggcctatgacgaaatggtcatcaagggtgaggaattggatcacctctacatcgccggcaaggtcgtggaaaccaaggcaaagtggtaaagccctttcacgattctattgtagcataagcgaagtcctataatttggactttcaatatagaaattgaattatttcacaaaaatgctgcccgcggcacaccttgcaaaacaaggatatgcggcgggctgtattttttatacccttttttaggagacaggtgcgatggaccttgcggaaaaactggaaattctggcggacagcgccaaatatgatgtggcctgcacgtccagtggcgttgaccgtccggggcggcatggcagcctgggcagctgtgcggcggcgggcatctgccacgcctttacgccagacgggcgctgcgtttccctgctgaaggtgctgtactccaacgtatgcagctatgattgcagctactgtgtcaaccgccgtaccaacgaccggccccgagcgactttcaccccgcgggagctggccgatttgactatcgggttttaccgccgtaattatattgaggggctgtttttgtccagcgcggtgctaggtacgcccgaccgcacgatggagctgatgatcgaggcactgcgcatcctgcgggaggaataccacttcaacggctacatccacgccaagacgatccccggcgcggacccgctgctggtggagaagatcgggcggctggcagaccgcctctcggtcaatatcgagctgcccagcgagacgagcttgacggcgctggccccagacaagaaaaagaccgccatcctgcgccccatgggccagatcgcggtgcagagcgcccagagcaaaaaagagatggtgctctaccggggcgcgaagccctttgccccggccgggcagagcacccagatgatcattggcgctacgccggaaactgaccggcatatcatggacctgacagaaggactatacaaaaaatatgcgctgcggcgcgtgttttactcggcctatctgccagtggtagcggacagccgcctgcccgcgccgcacaccgccccgcccctgctgcgggagcacaggctctaccaggcggattggctgctgcggtactaccatttttcggcgcgggaactgctgaccgaggatgagccgaattttgacccctacctcgatcccaaatgtacctgggccgtgcggcacccggcgtttttcccagtggagatcaatactgccgcgaaggaggagctgctgcgggtgcctggcatcggccccaaaagcgccctgcgtatcattcaggcgcggcgcacgcagaatctgggcttggccgaactcaagcgcattggcgtggtggtcaagcgggcgcagtatttcatcacctgcaagggccgggcggcagctcacgcaaaccgtgcggaaattgccaacgccctgctcgaccccaaggcgttcagcgtaggaatgcagcagctttcgctggacgattttgtacccaaggccctgccggatgcagccccggctgtgcaaaaactggccgcccgcggtatggcggctgacgtggccgccaaaaccgtgcggcaggaggcactgcaatgccttacgaagcgaatgtgaccgacgttgcctaccgctatgacggaagttttgcaggctttttgtgctgcgtgttcgagagttatgcccggcacgagataccgtcggaggtttgctcacctgaggaaggccagctgaacctgttcggcacgcgggaaatcctcactgaccggcagcgcgcgaagcgggtggcggtggggttggaccggctcgggccgcaggtcaaggatcgcattgtaacagggttcctcagcactgacccgggcaaagatctgactctgctgcggtttgcgcggcgctgttttgcccaggggccgcaggccgtgcagatgctgggcgacccggatgtggcagcggcgttcgccatcgagcgggccgtcaacaacgaggcaggcaagttcatcgagttcatccggtttgaggagcgggacgggatgctgggcacggtcatccacccgaagcaccaagtcttgccgctgctgcgcgggcatttttgcagccgcctgccggatgaggatttcctgatttttgacgcgacccacggcacagcgctggtgcggcgcggcgggcaggtgcagtatctgacgatggaacactacacccccggcacagacgaggacgaactgaactggcagcagttgtggaaacgttttttcaaggcgctgaccatcgaggaacgccgcaacgagaaagcccagatgaaccacgtgcagaagcggttctggaaagacatggtggagatgcagggcagtgtgtgactactcgtaatcgtactccgggttggcagcttggtactcggtcaggaagcggagcaggcgctcggtgtcagcgtagctcatgcggccggtgtcggccagcgcccgcaccatggcgcgaatgtccccgtcgtagagcgtctgcaaatgcgcctggctgaccgcgccgcagtaggtcaggcggcgcaccagcggtgtgtagaggttcttgttcccctgcttctcggtgcggacgaagtttttcttttcaaggcgaagcagaaaattgagcagcgtcgagtctgcccagtggcactccggcggcaggtgtgacgcgatctcgcgccgggtggcggcgcgattgcaggcccaaagtgcggccatgacctgttcttcactgcgggaaagttgttccatgataggctcctttttcataggcgacgatgtaggggccgggcatgcccggcccggtcgtataagataagtagacgattgcgggaaaatagcgcgggcggagcaaagccccgctcctacgggctgcaattttacaaatgtggaagtaatatctatatttattttacatctgtggtagattgaaatgcaacaggaaatattgcacaaatctcaggggcttattttgacataaacagcaaataacttttacaaacgtcgtgcatagtgtccttgtaaagaaaacaatttgtcactttacagaaacacttgccggattttgggcttttttcgtaactttgcccgcttgccggggcgggggcaaaactcctataatattggcataccgcaacggcgcggcaagatgcaatccgccgtgtgcgggtcgcatttcatttactgccagggaggaaattacgatggctagagtttacaatttcagtgccggcccttcgatgctgccggaggctgttttaaagaccgcacaggctgaactgctggactaccatggttccggcatgagcgtgatggagatgagccaccgcagtaaatggttcgatgaaatcatcaacaataccgaggccgccatgcgccgggtgctgaatatccccgacaattataaggtgggttttttccagggcggtgcgacccagcagtttgccatggtgccgctgaactttatgaccaccggcacggcggattaccttgtgaccggcaacttcagcaaaaaggctgccgaggaagccgccaagttcggcacggcccgcattgccgccagcagcaaggacaaaaactttacctatatccccgacgtgaaggccatcgactatgaccccaacgccagctatatccacatctgccagaacaacacgattttcggtacgaaattcgtcgatgtaccgcaggtggacggcgtgccgctggtcgcggacatgagttcgatgatctgctcggagccggtggatgtcagcaagtacggtgtcatctacttcggtgtgcagaagaacattgcccccgcgggcatggcagtcgccattgtgcgggaggatctgttgggcaaggccgccaagggcctgacgcccgacaagatccccacgatgatgaactacaccaccctgctgaacgccgacagtatgtacaacaccccgccgtgctggtgcatctacatgaccggcctggtcatgaactacctggagaacgagatcggcggcctggaaaatatgcagaagatcaatgccgctaaggcgaaggtgctttacgattacctcgacggccaggacttctacaagaacccggtggagaaaaagtaccgcagcatgatgaatgtgaccttcacaagccccgatgccgacaccgacaaggcgttctgcgccgcagccaccgaggcgggctttgtgaacctgaaaggccaccgcctggtgggtggtatgcgggcgtccatctacaacgccatgccgccggagggcatcgataagctggtcgactttatggagaagttccgcaaggagcattgaacggccgcctcgtaggggccgggcgtgcccggcccgcgacagtacggtggcaacccgttgacgacttgcagcgcaaggctgagggccggacatatccggcccctacaaagcataattaaggggagcagggagtaatctatatgtatacaatcaaaactttgaatgctatttcgccggttgggctggccaaactgccggccaaccagtttgaaatcgacaacgaggccgccgcgccccacggcattttggtgcgcagcgccgatatgcacgacgcgccgctgccggacagcctgctggccatcgcccgcgcgggtgcaggaaccaacaacatcccggtggaggaatgcaccaatgccggcatcgtcgtgttcaacacgccgggtgccaatgccaacgccgtggcagagctggtcatcggcgcgttggtggcgggtagccgcaacatggtggacgccgtgaactgggcgcagaccctcaagggccgcgacaccatcgccaaggatgtggagaagggcaagaaagcctttgtcggccccgaactgcgcggcaagacgctgggcgtcatcggcctgggggccatcggtgcacgcgttgccaacgccgccgtggcgctgggcatggaagtcctgggctacgacccctacatttccatcgatgcagcgtggagcttgtcccgcagtgtgcagcactgcgtcacgctgggcgatatgctgccccgctgcgactacctgaccatccatgtcccctacctgccaacgacccgccacaccatcaacgcgcagacactggccatgtgcaaggacggcgtccgcgtgctgaacttcgcccgcggtgagttggtggacaacgctgccctgctggacgcgctgaacagcggcaaggtcgcgcagtatttctgcgattttcccaccgaggaactgctgggcgtcaagggcgtttactgcacgccgcacctgggcgccagcacgccggagagcgagacgaactgcgccgtgatggcagccgccgagctgagcgactacctgaaaaacggcaacatcacccacagtgtcaacctgccggatgtcagccagccccgcgtcagcggccgccgcatctgcatcatccacaagaacgcaccgggcgcgatctcggccatcaccggcattctgaccgaagcccacctgaacattgagaacatggtgaacaagggcaaaaaggatgtggcctacaccctgctggatgtgaccggaaacgtcaccgacgacctggccgtgaagctgggagctattgagcctgctatccgcgtgcgcgttttgtaaattgtaaaggcaacaccgcacaattcccgccttacggcttaagcaccgctccggcggctgcggcacggcatctgcgttgccaaaatgctcgataatgtcgggttgcggtacccgcatcgtgcttcgggggcaaaagcccctcgcactctgcgaccgctgcccctgcttcggttcgctgtttccgccactggcggcgctcacctttgcagcatccagtattatctgcgcttttggcttagcatctgccgcacctcgctcgccgtatcggcacttagaattatgcggtattgcctaaaatatgtgaaaaacaccctctgccgtcatttcgcggcagagggtgtttttgtgaaattggatgtagggaacataatcgctatgagaggtcagaccttattgcactggactgacgaatcccttataaggtacgggtatgtggagaactgctgcggcatacaaggaaaatcaacctcgactgcgtacaggctcaggccgctgtgcgcggcttttttgtggtctttgcccaaaaaccaaacaaatcgggacaatcgacccaatacggctttttttgcggcgggttttatggtagaatctatgagaactcaaaaaagcggggaacgagtgctgacggaaaagctctctcccccggccgctgcggcggcagccccagagggggccgagaagggaggaacacggcatgaccaacgcaccgaaaaccgtattagccatccacgacctgccgggctttggccgggcggcgctgtcggtcatcgcaccggtgctctcgacgctgggggtgcagactgtggcactgcccacggcggtgctgtccacccataccggcggactgggcgcaccggccaagctggccgaccccagctacggccctgccgcgctggcgcattaccaccggctgggtgtgaaattcgactgcatctactctgggtatctggcggactccgcccaggcccggctggtggaacaggcgttcgagctgtggccgaaagcgctcaaggtcgtggatccggtgctgggcgacggcgggcggctgtacagcgggctgggggccgacatggtcccggctatgtacaatctgtgcagtaaggctgatttgatcgtgcccaatgtgaccgaggctgccctgctgctgggcgacccgctgcccggtgtgggcagtgctgagcaggccgccgcccaggcggcacggctggtgcgcattgcgccgcaggtcgttgtgaccggtgtgaccgggctgaacggcgggcggtacataggctgtgtgggcgcggcccgcggcggcgagggctacaccgtcaaaacgccgctgctgccccggatgttccatggcaccggcgatatctttgctgctgtgctggtagggcgcattttgcagggcaacgtgccccaggctgccgtgcaggcagccgccgcctttgtggccgagtgcatccgccagacccccgaaggtgcggatgagcgcctgggtgtctggctggaaaatgcgctgccgaagctgcggcaggagtgaagcggcagacaggcggggcgtcggggacgccgcccctgcaacagggcggcgatgtggcggccagaggactggccgccctacaaagctgccaccacacaaaattcaaacaaacaggactgtaaacatatgccaaccttaaacattgtattggtcgagccgcagataccgcagaactccggcaatatcgcccggacctgcgcggtgacaggtgcgcggctgcatatggtggggccgatgggctttactatcgacgataaaaaattgaagcgcgccgggcttgactactggcaccagcttgatataacatattataaagacctggcggactttttcgcccgaaacaagggtccgtttttctacttcacatccaaaggcccgcgccgccatgtggatgtacactatcccgacggcgcatacctcgtctttgggcgcgaggacgccggcctgcctgaggaactgctggcggcccacgaggccgactgcgtgcgtatgcccatgcgccggggcgagcgctgcctgaacctgtccaacgctgtggccgtgggcgcgtatgaggccctgcgccaatgggattttgccgacttagagactcgcgggcagctgacccgctacgaatggagtgaggatgtaaaatgagcaagatcggttttctgacggattcctgttccgacattccgcaggagcttgcggacaagtacggcatcgaggtcgtgggcttccccatcaacctggacggcgtggaatacatggagcgcaaggatttcaccaacgaccagttttaccagatgatgcgcgacgcccagggcgtgcccaccaccgccgccatcacccagctgcagtggtgcgagatttacgagcgctatgtggacgaaggctataccgacctggtgcatctgtgcatcaacagcgcgggatccagtacctacaacaacgccgtcaaaggtgcggagatgctggccgaggagcgccccggccataagctgaacatccagctcatcgacagccacacctactcgatgccctacggctggtatctgtgcgagtgtgcccgcaaagtgcgcaacggcggcgagcttgccacctgcgtggaggagatgaagcagagcctggaccgcgtggaaatctgcctggccgcatacagcctgaagcagatgaagaagtccggccgcgtcagcgccgccgctgccgtggtgggtgacctgctgggcatccgccccatcatcagcctgaacgcgggcgtctccaaggtcgaggccaaggtgcgcggcgacgctgccgtgcccgccgctatgatcaaatgggtggagagccgcgtcgattccatgaaggacaccccctatatggtggcttacacgtccagcacctccaagcgcgacgagcttgtcaaggcctgcaaaaaggcattcggccatgcgccggtcattgtgttccagctgggtggcgttgtcagcgccaacaccggccccgacggcattgccatcgtttaccccggccatccccgccatctggaggcctatgccccgcagctgccgtaaaaaagacttgcattttttcaagggctgttgtatactataaacagttcttataccataccaagaactattatggttgctatgataaggtcatgggaccgtaaagctctgacgccctgtcttatgacagggcgtcatcttttttgtcaaattttcgtggaaaatgtcagttgccgtgtgattctttgtgcggtatgataatagtaaaaaagaaaaggtgtggtgaatatgaagcacccctatggaattggcctggatattggcattgcgtctgttggctgggccgtggtagcgctgaacgaaaatgcagagccttatggactgatccgctgcggctcgcgcatatttgacaaggcggagcagcccaaaaccggagaaagccttgctgcgccgcggcgggaagccagaagcacgcgccgcagactgcgccgccgcagcttgcgcaaggcagacttgtatgagctgatggcgcaaaacggcttgccgggcagagcgaaaatagaagaagcggtgcaggcgggccacctgccggatatctatgccctgcgtgtgcaggcgttggatggccctgtaacggcgacggactttgcccgaattttgctgcacttgatgcagcgccgtggtttccgcagcaaccgcaaggcagatgatgcccagaaagacggaaagctgctgcaagcaatcgatgccaacacgcgccgcatggaagaaaaccactaccgcacggttggcgagatgatgtaccgtgacccggtgtttgcagagcataaacgcaacaagtcggaaaactatctttctacggtcagacgggatcaaatcgtggaggaagcggtacagctttttgctgcgcagcgccagtatggtgcggcgtgggcttcgccggaaatggaagcggagtaccttacgattttgacgcgtcagcgttcgtttgatgaaggccccggcggaaacagcccctacggcggcaacatcgttgaaaagatggtgggaacctgcacacttgaaggacaagccgaaccgcgtgcagccaaagcaacttggtcgtttgaatattttacgctgctgcaaaaaatcaatcatatccgcattatagagagcggtgcggcacgtatactgacggcagaagaacggcaagaattactttccgtatgctatcaaacggacaagttggattttgccaggatacgcaaggctcttgccctgtcggaacaggcaagattcaatatggtgcgatatcgggacggacaaacaactgaggattgcgagaaaaaagagaaaattgtatgtctcccctgttaccacaaaatgcgcaaagtgctcaataccttgcggaaagactacatccgcagtgtcagccgcgataggctggatgcagcggcaacggcgctgacaatgtataaaaatgaagctacgctcagagcaaagctggaagaagcgcagtttgaaccgctggaagttgatgctttgatgacgctgcccagctttagcgggttcgggcatatttctgtcaaagcgtgccgaaaactgatcccctatttggaacaaggactgaactataacgacgcttgcaaagaagcgggatatgactttcagggaaattaccgtggtgaaaaatcgcagttcctgcctgcgtccacagaggaaatggaggacatcacaagcccggtggtgcggcgtgcggtggcgcagactatcaaagttgtcaatgcaatcatccgcgagcagggagaaagcccggtcaatatccacttggagctggcgcgggagatgagcaaaaacttccagcagcgcaatgaccttgacaaggccatgaaaggcaataacgccgagaacgagcgtttgatgaaagacctgcatgaactgttcccagggagaaatatcacaggtcaggatcttgtaaaatacaggttgtggaaagaacaggatgggcggtgtgcgtattcgctgcagccgctggaactggaaaaggccattactgtttcaggttatgcggaagttgaccatattgttccgtacagcatcagctttgacgaccgccgtgcgaacaaagtattggtgctggcgtcggaaaaccgccagaaaggcaatcgccttccgctgcaatatctgcaaggaaaacgacgggatgattttattgtctacacaaaagcaagtgtaaaaaattaccgcaagcgtcaaaatctgctaaaggagaagttgagcgaagaagacagcaaaggttttatgcagcgtaatttgcaggacacacagtatattgcaagttttatgctgaactacattcgcagccaccttgcgtttgcagatttccctgcggcaggtaagaagcgtgtggttgctgtaaacggcgcagttacagcgtttttgcgcaaacgctgggggcttggcaaggtgcgtgctgacggcgacctgcaccacgccgtagatgcggcggtcattgcctgcacgacggatgggatgatccaacgggtgtcgcggttctacacgcatatcgaaacctcggacacccggggcgagcgcttcccggagccgtggccgcgattccgggatgagctgatgcagcgtttgtcggcctgcccgcaggaaaatttaatgcagatcaacccggtatattatcaaaatgtggatatagcaagcatccagccggtgtttgtgtcgcgtatgccgcggcataagatgacgggagcggcacataaggagacgataaagggccgcttggatgatgcgcatacggttcagcgccggtcgattacagatttgaagcttgacaaagagggagaaattgcaggatattttaatccgagcagtgataccctgctgtacaatgctttaaaggaacagctgacagcttttggcggcgatgggaaaaaggcatttgcagaaccgttctttaaaccgcgtgccgatggaacgccgggagcacaggtgcgcaaggttaaagtgtatgataaagccaccagcatggttgcagtccatgaaggaaaaggtgtggccgacaatgatacgatggtacgcattgatgtctattttgtgccgggcgacggctattactgggtgccgatctatgtggcagatacggtgaaaccggaattgcccaataaagccgtagtcgcatacaaaaattacgatgagtggaaggaaatggccgaagaaaactttttgttctcactttgtcagaatgacctgattcgtattgaaagtaagcgcacaatgaaattcaaagtgcaaaacagtgacagtacactggaaaaagaaacacagatgaattgcggcttgacctattttgaaggcggaaatatttcgacaggtgccatcacggtaactacgcatgataacgcgtatattgtaggaagtcttggttttaaaaccctgcaaaaggttcaaaagtatcaggtcgatgtcctcggtaactataccctcgtaaaaaaagaaaagcgtcagaacttccctgcacaacggaggtgacctatgtcctaccgctgcctgatgatcgtaaacccggcgcgtatccgctgcaaaaatgagcagcttttgattgaaaccgaagaagttcattctgtaccaatcgaggatatcagcgctattgtgctggaaagccggcaaagtacgataacaacggctgcgctggcggcactggcgcaaaacggcgtggtgacgttttggtgcgatgaaacacacttgccgtgtggtatctcgctgccatttgcacagcatagccgccagttgggcgtgctgcgctggcagatggagctgacactgccgacgaaaaagcggatgtggcagcaaattgtgacggcaaaaatcaaaaaccaggcggaatgcctggccctgtgcggcaaaacacaggaggcggcattcctgtttggacgtgccaaggcggtgacaagcggcgataaggacaatttggaagccagtgcggcggcctactatttccccgccctttttggggcaggctatacccgccgcaatgaggatacccggaatgcggcgctgaattatgcttatgcaattttgcgcgggtacatggcacgctgtttggcggtatacggatttttgccctgtttagggctgcaccatgacagcgaactgaaccagttcaatctggcggatgacctgatggaaccgttccgcccggtagctgatttgtacgtggccgcaaatgttgccgaggatgcagcaatgacaaccgctttgaaggggcagctggtgaacctgctgaatgcagatgttctttccggtaatcagcaccacagcgttgcttatgcgatggaacgaatggtgcaaagcctgcgggggcaaacattgcagctgccaaaactgctggaatataagcagcacagctatgagtaaatttatgaggatgatcgttttcttcgatttgccggtgcagacaaagacggaacggcggtatgcgacgactttccggaactttttgctgaaagacggctaccatatgctgcaattttcagtgtatgcgcgtgtatgcaacggcaatgatgcagtcaagaaacacgaaagccgcctgaaggcatctctgccgccaaacggctcgattcgattgcttgttgtgacggaaaagcaataccaatctattcaaatacttctaggaaattatcagccggaagaagcaccctttgtgtgcgaacagctgagttttttctaaaacaaaaagcgcatcggaccgcaatccgatgcgctttttgcatagcctattataccataccaagagctattagggaactatgacagttaagaaaatgcgttgacaaactacactattataccataccaagagctattagggaactatgacccatgcagcgtgatccggacgagctccggcattataccataccaagagctattagggaactatgactctaaatgttcagcctgttttcttccgttcattataccataccaagagctattagggaactatgacctgctttttgtggggcaggggatacatctgattataccataccaagagctattagggaactatgaccgggccgacaaggccccacagagcgcctgtaattataccataccaagagctattagggaactatgacgtcaatgatcttctgcaattcggcgaccgtattataccataccaagagctattagggaactatgacgccctcgtagtcgaggtttgccgtggcaaaattataccataccaagagctattagggaactatgactgacgagctgtgcagcgttcatggcgtcggattataccataccaagagctattagggaactatgacattagagcctgcaacaaactatttaatcgaattataccataccaagagctattagtaaatcatccccccaataaaatcccgctagccccaaaatttcttccccgcaggccttgaaacggtctgcggggtttgctataatttaaatttgttgagcaacttaggattttaggctccaccgcggcttgctgcggtgcaaaccccgcaagcctggcggtcttgcgcgcggtcaaaatctatccgccggagtattgtatgaatcagaaaaaactgtccgttcacagccttgtgcgctgtgctgtcattgccgcagtgtatgtggtcgtctgcctggtgctggcccccttcagctatggggctatccaggtgcgcgtggccgaggccctgtgcctgctgccggttttcggcgcggagtacatcgtcggcgttacgctgggctgctttttggccaacctgctgggctccaccgtcattgacgtggtgttcggcacgctggctaccctgctggcctgcctgctgacttacaagctgcgtgatatccgcgtaaaagggctggcaattccggcatccctgccgcctgttgtttttaacatgatcattgtgggcgcgttcgagatcaccttcttcttctcggacggcgcacccacggcggccctggcggcgttcaacgccgttacggtgggcatcggagagctgatcagctgcacgattttgggcgtggccctcgtcaagctgattgagagcaacgcggccctgcacaagttctttacagaagaataacgaggtaacttctatgcgcccggaactgattttgtgggattggaacggtaccctgctggatgatgtcgaactctgcgaaaacgcgctcaaccgtcttttgcagcgctacggttacccccagcggtacgaccacgagcagtaccgggcgatttttggcttcccggtcgaggactactacgtccgcgccgggttcgacttcacccgccacagctttgccgagctggcggaaagctacatggaggattacatcccggccagcgccgcctgcccgctgatggcaggggccgttgacgcgctggaagcgttcaaaaatgccgggctgcggcaggtgattctgtcggcaagcccggtcacaacgctgacccgccaggtggaagaacgcggtgtgacgccgtattttgaccgtctgctgggactgggcgatatctatgccaaaagtaaggtggaggtcgggctggcctatttacaagaggaaggcttcgacccggcgaaggccgtgatgataggtgattccgtccatgattttgaggtggcccaggcgctgggtgtgggctgtgtgctgcaatcgagcggccaccagccgcccgagacattgtgccggaccggtgcaccggtggtggcagggctgcgggaagcggcggagttgattttgagaaagtgagccgtgcggcgcggggcgtcaagggcgccgccccctacaaccgtagagaggcattggaaatgataggcagagaggtacaaaaatgtctgaccgtgtaaaaggcgcctgcctgacgatgggcggcgcggcgtgctggggtgtttcgggctgcatggggcagtacctgttcacccgggaagggatggattccacctggctggtgcccatccggctgtttctggcggggctgattttatgtgcgttcttttttgtcaaaaaccgcaaaatgctgtttgacccatggaatttcaagaaaaatccgcgcaacgtcgttgatctgctgatttacggcctggcgggcgtcagctgctgccagttcacctattttctgacgatccagctgtccagtgcgggcatggggacaatcttgcaggacctctcccctgtcattattctgctggtggtctgcattcagcaaaggcgcgggccgcgggtgtttgagattttctccatcctgctggcgctggtgggggtgttccttatcacgacccacggcagcctgaccgaccttgccatcagcccggcggcgctggcgtcgggcgttgtcagcgcctgctgcgtcgccatctatacgatgtggcccaagaaattgcaggagcagtaccccaccccgatgctgcagggctgggcgttcttgatgggcggcacgatgtttgccctgatcttccgcccctggacggtgaattatgtgccgacgccgatgggcgtgttcggtattttcacggtcgtggtgctgggcaatgtgctggcgttcagcctgtatatgtcgggtgtgccgctcatcggcccgcagaagtccagcctgtacagctttgcggagccggtcacggcggctattatcagcaccctggtgttgggctcgccgtttacgctgtgggatgccctgggctttggctgcatctttttgatgctggtgctgttgagtctgccggcgaaaacaaaagcgcaatagattcgagaggctgtccgcaatgggcagccttttttgctgccgtgtaggggccggacatgtccggccctcaacctgcccgcgaacgaccgtccgcctttatgctgcgggccgggcatgcccggcccctacaacaatataataaataaacctatcctaactatgaattgacatatccccctccctgggtgtattatagtatcatgtgtaaaactatatagccgcacctctacacgcggcggaaaatacaggggaactgttatgtctttttttgaaaaactgttcggctctttctcggacaaggaacttaagcgcatcaatcccatcaaggacaaagtccttgccctggagccggaaatggctaagctgaccgacgaggaactgcaggccaagaccaccgaattcaaagagcgcctggccaagggcgagacgctggacgatatcctgccggaggcattcgccgtctgccgtgaggccgactggcgtgtgctgggcatgaagccctatccggtgcagatcatcggcggtattgtgctgcaccgcgcctgcatcgccgagatgcagacaggtgaaggcaagacgctggttgccaccatgcctacctacctgaacgccctgaccggcgaaggcgtccacgttgtcaccgtcaacgattacctggcccgccgcgactctgagtggatgggcaaggtctaccgtttcctgggtctgaccgttggtctggtcgtccacggcgtggagtccatcgaccgcaagaaggcctacgaggccgacgtcacctacggcacgaacaacgagttcggcttcgactacctgcgcgacaacatggtcgtctacaaggcaaacatggtccagcgcggccacgcctttgccatcgtggacgaggtcgactccatcctcatcgacgaggcccgtaccccgctgatcatcagcggcaagggtgaggattccagcgtgatgtacaagcgcgctgacgacttcgccaagacgctgaaaaagagtgtcatcgtcgagctggacgacaaggttgaggccgaggaacaggtcgacggcgattacgttgtggacgaaaagcgcaagaccgcgaccctgaccgagtcgggcgtcaagaaggccgaggcgttcttccacgtggataacctggccgacgccgacaatatgtctctgcgccattatattgacggcgccatcaaggcccgcggcgttatgcaccgcgacaccgactacatcgtcaaggacggcgaggtcatcatcgttgatgagttcaccggccgtctgatgtacggccgccgcttcaatgatggtctgcaccaggctattgaggccaaagagggcgtcaccgttgccgccgagagcaagaccctggcgactgtcaccttccagaactacttccgtatgtacaaaaagctgtccggcatgaccggtacggcctccaccgaggccgatgagttcagcgagatctacggcctgaacatagtcagcatccccaccaataaaccccgtgcccgtaaggatctgcccgacagtgtctacaagaccgtcaacggcaagtacaacgccgtcattgagcaggtcgccgagtgccacgccaagggccagccggttctggtcggcactgtcagcgtcgagaagagcgaggctctgtccaagctgctgaaaaagaagggcatcgagcataacgtgctgaacgccaagcagcacgagcgcgaagctgagatcgttgcccaggccggcaagcagggcgctgtgaccatcgccaccaacatggctggccgtggtaccgatatcatgctgggcggcaatgtcacctacatggccaaggccgcgctgaagaaggaactgtccaaggaactgaccgccgacctggcccagctgaaggacgagtacgagcacgccaaggcccgcgccaaggccaacggaaccgaactgcccaccccgccggaggctggcattgacgcgaaactggaaatgctgatgaccgagtgtgacggccacgccgagaccgaggacgccgaaattctccacgcccgcaagcgctttgaggaactgtgcgaggagtttgcccccgaagtcaagcgcgaggccgaagtcgtccgcgaggcgggcggcctgttcatcatcggtaccgagcgccacgagagccgccgtattgacaaccagctgcgtggccgtgcaggccgtcagggcgaccccggtgcatcccgcttcttcctgagtctggaagatgacctgatgcgtattttcggcggcgagcgcgtgcagaacctgatggactccctgggccttgacgaggatgtccccatcgagaacaagctcatcaccaacacgattgagagtgcccagaaaaagctcgaagcatcgaactttgcaattcgtaaacaggtgctgcagtatgacgacgtcatgaaccagcagcgcgagatcatctacaagcagcgccagatggtgctggacggcgaggatatctccggcaagctgcacgagatgatgcgccagtccattgacgatgcctgcgcgaactacctgaacggcgagaccgccgacgattgggatttcgcgggcctgcgccgccactttatgaactggctgtgcctgcccaccgacttcaactacaccaccgagcagctcggcgacctgaccaaagatggcatcgccgacgaactgtacaagcgcggcatggatattctgaccgcgaaggagaagcgctacggtgccaagacgatgcgcgagttggagcgtatctgcctgctgcgcaatgttgactccaagtggatggagcacattgacaacatggaccagctcaagcagggcatgggcctgcgcggctacggccagcatgacccggtggtcgagtaccgcatcgaaggctttgccatgttcgatgagatgatcgcctccatccgcgaggatgccgtgcatatgctgctgacgatcgaaatccgtcagcagaacgccgagccgaagcgtgagcagatcgccaagcccaccggcgagggtgccccgaaccaggccggtgccaagggtgccgccccggtgcgcgtgacaaagatcggccgcaacgacccctgcccctgcggcagcggcctgaagtggaagaagtgtacctgcaaagagtaccaccccgacctgtaattcatcatcaaggcaccgcctttaactttgggcggtgcctttttaaagtggtagagttgtaggggccgcatatgcgagaccctcaactttcccgaaaatgacctgttcccattatgttgagggtcgggtatgcccggcccctgcgaggtagaaaaccatcatgaaagcccgaatcatccgtgaaccccggtgtgctctgctttggcgcatcgatgaaacctaccccaactacgccgccatcacccgcgcggccaagcggtacgacgtcaaactacgtgccgtggccgacggcgatctcggcggcatcgtgggcgacctctgcgcgggtaagcctgccccggcgtttgccccgcttatcgccgtgccggaccgcccggctatcatcatcagcggcctgcgccatgacaatggcgagctgggtgcgttcctcgaccttgtcaaaatgggcggtgcatccatcccggtgcgcagcatggtcacgcccaccagcaagcaatggacgctggccaacctgttgcttgaattaaacacggaacacgaaactgtgcagggagacaaggcgtgaagcgctgtcttgccgcgttggcgctggccgtgctgctctgcctgccgctgaccgcctgtcaaaaacagcaaaatttgtacagcgcgacctggtttgatctgttcgatacggtcgccatcgtgcaggggtacgccgccggccaggacgagtggaacgctcaggctgccgccgtgcaggaagatttatcgcgctataacgaactgtttgatatctataaccactacgacgacgttgtgaacctgtacgacgtcaacgccggggccgctgccgcgccagtggctgttgatgacgagttgtacgcattcttgcgctggtgtaaggacaccgtttaccccgccaccgacggtgcgacgaacattgcggcgggtgcggtgctgcggctgtggcatgacgcgcgggaaagcgactcccctgccccgcccgatgcagaggccattgcggcggcgctggaacatatcgacatagaaaatctggtgctcgatgatgatgcccagaccgtctatttcgccgaccccgctatgacgttggacgtcggcgcggtgggcaagggttacgccgtggagcagaccgcccaagcggcccaggcccgcggcctgacaagcgctctgctgaacatcggcggcaacgtccgcgccatcggcaccaagcccggcggcaagctgtggacggcgggcgttgaaaacccatggggtgacgacccggcgtacatccaggctgtggaactggcagacggcgacagcctggtcatcagcggcgactaccagcgctattttgagtacggcggtgtgcggtacgcgcatttgatcgatctgaccaccggctggcccgcccgctatgtcagcagcgtggccgtgctggcccacgctgacaccggcggtctggcggacgctctgtccaccggcttgttctgcctgccagaatccaccggccagacccttgctgcccagaaccactacgccgtcctctggatgcactccgacgaaaccaccaaaaaaagcaacgactggccgcaataaaacaagagccaccgacctttttaagccggtggctcttgtgatatcatgatataatacaaaactatgtgcggatacacgaaaaaatccagaaaggcgcagagaaaatcaagacagcgcataggagctcgctccactccgttccgctcgccccctcgtgcatctccaagccaactccaagaacattccaagtccacaccaagcaaaatcaacgcattatctcatgttttcccggatgggacagaatgagagaggattggaaacaaaaaagaaagcaggccccggagccggatggcggaggggcctgcgtgtggattcttaacttgtctctttagtcttcggtgaacgccctgtatcatagtaatatagaaaagaatataagtcaatatgcgacgacaaactgtaatttttataaatgtacttttaaattaaagtgtaggcattacaatgatgtgtgacaagagataaaaaggattgcgaacaggacaccattctcattttctttgtcatggagataacagcctgtgggatgagaaatcattttacaggctgtttcggttataggggtattgcctctcgcagttcccttttatacttgtaatatgtattccgtgcaatgccaatgagcctgatacaatctgcatcgcacagcgttccgtcaaaatccctactatattttctaatggactccttgcaagcggcagctttcttgactatcagcttgcggccacgttcctgccctatctgcttgccgtttagtttggcggtcagcattccctctctggtgcgttggtgcaggtcgtcaacttccttttgagcttgcgcaaaggcaaggcgtatctgctctttggcgaggtcaacggtgtactgattcagtgcagcaatgaccgaggatacaaaactgtcggtagcggcattgccggttttcagctgggtgctgatttgccgctggatggtttggcggtaagtctccgtgttgatgtgcggctctttgagaaagcaaagcgttacattttgggtgtacaggttttcgtatagttggcaaccctcgtc

SEQ ID NO: 791 - DNA, 23225 bp, synthetic construct
  source 1..23225: mol_type = other DNA
  misc_feature 1..23225: note = Synthetic
gtgcgccgatgacgaaaccgtccgccccggcggcgtgcagcgtcttgatttgatggcagagcaggtcgatctcctcttttgtgtagagaaaatccccggcacgggggcgcatcaggcagcgcaccggcagggacatttcggccttgatctgccgcaaaaggtcggcgtagggcgtcaggccgcccacggccagcgcactgcaaaattccagccggtcggccccgccctgcttggcggcgcgggcggaggccaggctgtcaacacagacttccaacaacttcatgtgtggtcacatcccctttggcgttttcctcattgtagcatgaaattttggatacggcaagccccgcacagccggaaagctgcgcggggcttgccgcagttatatgtgtatcacaacgaataggagtaggcagagttttacgccgcatggccgccgcgcacgacgcgcagttgtaccgcagagtgtttgcgcggcgcgggggcaggctggccggccgattcatccgggtgggccagcaggatgccgcagacggcgttgagcatgatgacagccgcaaaaagccccagaatggccgcccaaagcggcatggagccggaggcggcagcactgagcatagcccctgccaacaggatagccgccgtggcgacaagacggcatagcttgtttttgataagttcccagttcataccgatacctccaaatcaatcggccccgcgtggccgacagccgcaattttaacaacggacaacagcgttttgttcgttgctcttatcataatacaccaagcagttgttgtcaatgcctatttacaacttatttttgaaaatgtttgcaaaaaactctttacaaaaaccacggacagttgtataatgagactaaagaatcagagccgcatacaagatgtggtttaccctactataaaaaggagatttccgatgtttgcagagcgcttgaaagaggcccgcaaggccaaacggtacagccaggccgaggtttccaaaatgctgggtgtgacgcagcaggctgtcggcaagtgggagaccgggcgttccaccccggacccacagaccgtcgcgcgtctggcagaaattttggataccccctccgatgtgctgctgggcctgcgtaaggagccgggcgtttccgccgccgtgggccgcaacgccttcagccgctataccgaatcccagatcccggtggtgggcaccgtccgcgccgggtatggggccctcgcctttgaggaggactacggcaaggagtacgcctgcgtcaaggatccgaagaactacttcttcctcgtggtcaagggcgacagcatggagccgcgcatttccgacggcgacctggccctcgttcaccgtcagaacacgttggacaacggcgacctgggtgtgctggtctatggcgcagacggcgagggtacgctgaaaaagtatatccagcgcggcaactcggtcgtgctgcagcctttcaacccggcttatgacgaaatggtcatcaaaggtgaggaactggatcacctctacatcgccggcaaggtcgtggaaaccaaggcgaagtggtaaatccctttcacgattctattgtagcataagcgaagtcctataatttggactttcaatgtagaaattaaattatttcacaaaaatgctgcccgcggcacaccttgcaaaacaaggatatgcggcaggctgtattttttatacccttttttaggagacaggttcgatggaccttgcggaaaaactggaaattctggcggacagcgccaaatatgatgtggcctgcacgtccagcggcgttgaccgcccggggcggcatggcagcctgggcagctgtgcggcggcgggcatctgccacgcctttacgccagacgggcgctgcgtttccctgctgaaggtgctgtactccaacgtatgcagctatgattgcagctactgtgtcaaccgccgtaccaacgaccggccccgggcgactttcaccccgcgggagctggctgatttgaccatcgggttttaccgccgcaattatattgaggggctgtttttgtccagcgcggtgctaggtacgcccgaccgcacgatggagctgatgatcgaggcactgcacatcctgcgggaggaataccacttcaacggctacatccacgccaagacgatccccggtgcggacccgctgctggtggagaagatcgggcggctggcagaccgcctctcggtcaatatcgagctgcccagcgagacgagcttgacggcgctggccccagacaagaaaaaaaccgctatcctgcgccccatgggacagatcgcggtgcagagcgcccagagcaaaaaagagatggtgctctaccggggcgcgaagccctttgccccggccgggcagagcacccagatgatcattggcgctacgccggaaactgaccggcatatcatggacctgacagaaggactatacaaaaaatatgcgctgcggcgcgtgttttactcggcctatctgccggtggtagcggacagccgcctgccggcgccgcacaccgccccgcctctgctgcgggagcacaggttataccaggcggattggctgctgcggtactaccatttttcggcgcgggaactgctgaccgaggatgagccgaattttgatccctacctcgatcccaaatgtacctgggccgtgcggcacccggcgtttttcccagtggagatcaataccgccgcgaaggaggagctgctgcgggtgcctggcatcggccccaaaagtgctctgcgcatcatccaggcgcggcgcacgcagaatctgggcttggccgaactcaagcgtattggcgtggtggtcaagcgggcgcagtatttcatcacctgcaagggccgggcggcagctcacgcaaaccgtgcggaaattgccaacgccctgcttgaccccaaggcgttcagcgtagggatgcagcagctttcgctggacgattttgtacccaaggccctgccggacgccgccccggctgtgcaaaaactggccgcccgcggtatggcggctgacgtggccgccaaaaccgtgcggcaggaggcactgcaatgccttacgaagcgaatgtgaccgacgttgcctaccgctatgacggaagttttgcaggctttttgtgctgcgtgttcgagagttatgcccggcacgagataccgtcggaggtttgctcacctgaggaaggccagctgaacctgttcggcacgcgggaaatcctcactgaccggcagcgcgcgaagcgggtggcggtggggttggaccggctcgggccgcaggtcaaggatcgcattgtaacagggttcctcagcactgacccgggcaaagatctgactctgctgcggtttgcgcggcgctgttttgcccaggggccgcaggccgtgcagatgctgggcgacccggatgtggcagcggcgttcgccatcgagcgggctgtcaacaacgaggcgggcaagttcatcgagttcatccggtttgaggagcgggacgggatgcttggcacggtcatccacccgaagcaccaagtcttgccgctgctgcgcgggcatttttgcagccgcctgccggatgaggatttcctgatttttgacgcgacccacggcacagcgctggtgcggcgcggcgggcaggtgcagtacctgacgatggaacactatacccccggcacagacgaggacgaactgaactggcagcagttgtggaaacgtttttttaaggcgctgaccatcgaggaacgccgcaacgagaaagcccagatgaaccacgtgcagaagcggttctggaaagacatggtggagatgcagggcagtgtgtgactactcgtaatcgtactccgggttggcagcttggtactcggtcaggaagcggagcaggcgctcggtgtcagcgtagctcatgcggccggtgtcggccagcgcccgcaccatggcgcgaatgtccccgtcgtagagcgtctgcaaatgcgcctggctgaccgcgccgcagtaggtcaggcggcgcaccagtggtgtgtagaggttcttgttcccctgcttctcggtgcggacgaagtttttcttttcaaggcgaagcagaaaattgagcagcgtcgagtctgcccagcggcactccgacggcaggtgcgacgcgatctcgcgccgggtggcggcgcgattgcaggcccaaagtgcggccatgacctgttcttcactgcgggaaagttgttccatgataggctccttttttagttgtaggggcggatgcttgcatccgcctgcggggcgtcgaggacgccgccccctacgagtcatgctattttacaaatgtggaagtaatatctatatttattttacatctgtagtagattgaaatgcaacaggaaatattgaacaaatctcaggggcttattttgacataaacagcaaatgtcttttacaaatgtctcatatagtgttctcaccaagaaaacaatttgtcactttacagaaacacttgccggattttgggcttttttcgtaactttgcccgcttgctggggcgggggcaaaactcctataatattggcataccgcaacggcgcggcaagatgcgatccgccgtgtgcgggtcgcatttcatttactgccagggaggaaattacgatggctagagtttacaatttcagtgccggcccttcgatgctgccggaggctgttttaaagaccgcacaggctgaactgctggactaccatggttccggcatgagcgtgatggagatgagccaccgcagtaaatggttcgatgaaatcatcaacaataccgaggccgccatgcgccgggtgctgaacatccccgacaattataaggtgggctttttccagggcggcgcgacccagcagtttgccatggtgccgctgaactttatgaccaccggcacggcggattaccttgtgaccggcaacttcagcaaaaaggctgccgaggaagccgccaagttcggcacggcccgcattgccgccagcagcaaggacaaaaactttacctatatccccgacgtgaaggccatcgactatgaccccaacgccagctatatccacatctgccagaacaacacgattttcggtacgaaattcgtcgatgtaccgcaggtggacggcgtgccgctggtcgcggacatgagttcgatgatctgctcggagccggtggatgtcagcaagtacggtgtcatctacttcggtgtgcagaagaacattgcccccgcgggcatggcagtcgccattatgcgggaggatctgttgggcaaggccgccaagggcctgacgcccgacaagattcccacgatgatgaactacaccaccctgctgaacgccgacagtatgtacaacaccccgccgtgctggtgcatctacatgaccggcctggtcatgaactacctggagaacgagatcggtggcctggaaaatatgcagaagatcaacaccgccaaggcgaaggtgctttacgattacctcgacggccaggatttctacaagaacccggtggagaaaaagtaccgcagcatgatgaatgtgaccttcacaagccccgatgccgacaccgacaaggcgttctgcgccgcagccaccgaggcgggctttgtgaacctgaaaggccaccgcctggtgggtggtatgcgggcgtccatctacaacgccatgccgccggagggcatcgataagctggtcgactttatggagaagttccgcaaggagcattgaacggcccctacgaggtggcaacccgttgacgacttgcagcgcaaggctgagggccggacatatccggcccctacaaagcataataaggggaacagggagtaatctatatgtatacaatcaaaactttgaatgctatttcgccggttgggctggccaaactgcctgccaaccagtttgaaatcgacaacgaggccgccgagccccacggtattttggtgcgcagcgccgatatgcacgacgtgccgctgccggacagcctgctggccatcgcccgcgcgggtgcaggtaccaacaacatcccggtggaggaatgcaccaatgccggcatcgtcgtgttcaacacgccgggtgccaacgccaacgccgtggcagagctggtcatcggcgcgttggtggcgggcagccgcaacatggtggacgctgtgaactgggcgcagaccctcaagggccgcgacaccattgccaaggatgtggagaagggcaagaaagcctttgtcggccccgaactgcgcggcaagacgctgggtgtcatcggcctgggggccatcggtgcccgcgttgccaatgccgccgtggcgctgggcatggaagttctgggctatgacccctacatttccatcgatgcagcgtggagcttgtcccgcagtgtgcagcactgcgtcacgctgggcgatatgctgccccgctgcgactacctgaccatccatgtcccctacctgcccacgacccgccacaccatcaacgcgcagacgctggccatgtgcaaggacggtgtccgcgtgctgaacttcgcccgcggtgagttggtggacaacgctgccctgctggacgcgctgaacagcggcaaggtcgcgcagtatttctgcgatttccccaccgaggaactgctgggcgtcaagggcgtttactgcacgccgcatctgggcgccagcacaccggagagcgagacgaactgtgccgtgatggccgccgccgagctgagcgactacctgaaaaacggcaacatcacccacagtgtcaacctgccggatgtcagccagccccgcgtcagcggccgccgcatctgcatcatccacaagaacgcaccgggtgcgatctcggccatcaccggcattctgaccgaagcccacctgaacattgagaacatggtgaacaagggcaaaaaggatgtggcctacaccctgctggatgtgaccggcaacgtcaccgacgacctggccgcgaagctgggagctattgagcctgctatccgcgtgcgcattttgtaaactgtaaaatgtgtgaaaaacaccctctgccgtcatttcgcggcagagggtgtttttgtgaaattggatgtagggggcataatcgctatgagaggtcagaccttattgcactggactgacgaatcccttataaggtacgggtatgtggagaactgctgtggcatacaaggaaaatcacccctgactgcgtacaggtttaggccgctgtgcgcggcttttttgtggtctttgcccaaaaaccaaacaaatcgggacaatcgacccaatacggctttttttgcggcgggttttatggtagaatctatgagaactcaaaaaaagcggggaacgagtgctgacggaaaaactctctcccccagccgctgcggcagcagccccagagggggccgagaaggaaggaacacggcatgaccaacgcaccgaaaaccgtattagccatccacgacctgccgggctttggccgggcggcgctgtcggtcatcgtaccggtgctctcaacgctgggggtgcagactgtggcactgcccacggcggtgctgtccacccataccggcgggctgggcgcaccggccaagctggccgaccccagctacggccctgccgcgctggcgcattaccaccggctgggcgtgaaattcgactgcatctactccgggtatctggcggactccgcccaggctcggctggcggaacaggcgttcgagctgtggccgaaagcgctcaaggtcgtggatccggtgttgggcgacggcgggcggctgtacagcgggctgggggctgacatggtcccggctatgtacaatctgtgcagtaaggctgatttgatcgtgcccaatgtgaccgaggctgccctgctgctgggcgacccgctgcccggcgtgggcagtgctgagcaggccgccgcccaggcggcacggctggtgcgcattgcgccgcaggtcgttgtgaccggtgtgaccgggctgaacggcgggcggtacataggctgtgtgggcgcggcccgcggcggcgagggctacaccgtcaaaacgccgctgctgccccggatgttccatggcaccggcgatatctttgctgctgtgctggtagggcgcattttgcagggcaacgtgccccaggctgccgtgcaggcagcagccgcctttgtggccgagtgcatccgccagacccccgaaggtgcggatgagcgcctgggtgtctggctggaaaatgcgctgccgaagctgcggcaggagtgaagcggcagacaggcggggcgtcggggacgccgcccctgcaacagggcgacgatgtggcggccagaggactggccaccctacaaagctgccaccacacaaaattcaaacgaacaggactgtaaacatatgccaatcttaaacattgtattggtcgagccgcagataccgcagaactccggcaatatcgcccggacctgcgcggtgacgggtgcgcggctgcatatggtggggccgatgggctttaccatcgacgataaaaaattaaagcgcgccgggcttgactactggcaccagcttgatataacatattataaagacctggcggactttttcgcccgaaacaagggaccgtttttctacttcacatccaaaggcccgcgccgccatgtggatgtacactatcccgacggcgcatacctcgtctttgggcgcgaggacgccggcctgcctgaggaactgctggcagcccacgaggccgactgcgtgcgtatgcccatgcgccggggcgagcgctgcctgaacctgtccaacgctgtggccgtgggcgcgtatgaggccctgcgccaatgggattttgccgacttagagacccgcgggcagctgacccgctacgaatggagtgaggatgtaaaatgagcaagatcggttttctgacggattcctgttccgacattccgcaggagtttgcggacaagtacggcatcgaggtcgtgggcttccccatcaacctggacggcgtggaatacatggagcgcaaggatttcaccaacgaccagttttaccagatgatgcgcgacgcccagggcgtgcccaccaccgccgccatcacccagctgcagtggtgcgagatttacgagcgctatgtggacgaaggctataccgacctggtgcatctgtgcatcaacagcgcgggatccagtacctacaacaacgccgtcaaaggtgcggagatgctggccgaggagcgccccggccataagctgaacatccagctcatcgacagccacacctactcgatgccctacggctggtatctgtgcgagtgcgcccgcaaagtgcgcaacggcggcgagcttgccacctgcgtggaggagatgaagcagagcctggaccgcgtggagatctgcctggcagcatacagcctgaagcagatgaagaagtccggccgcgtcagcgccgccgctgccgtggtgggtgacctgctgggcatccgccccatcatcagcctgaacgcgggcgtctccaaggtcgaggccaaggtgcgcggcgacgctgccgtgcccgccgccatgatcaaatgggtggagagccgcgtcgattccatgaaggacaccccctacatggtggcttacacgtccagcacctccaagcgcgacgagcttgtcaaggcctgcaaaaaggcattcggccatgcgccggtcattgtgttccagctgggcggcgttgtcagcgccaacaccggccccgacggcattgccatcgtctaccccggccatccccgccacctggaggcctatgccccgcagctgccgtaaaaaaagacttgcattttttcaagggctgttgtatactataaacagttcttataccataccaagaactattatggttgctatgataaggtcataggaccgtaaagctctgacgccctgtcctaggacagggcgtcatcttttttgtcaaattttcgtggaaaatgtcagttgccgtgtgattctttatgcggtatgataatagtaaaaaagaaaaggtgtggtgaatatgaagcacccctatggaattggcctggatattggcattgcgtctgttggctgggccgtggtagcgctgaacgaaaacgcggagccctatggcctgatccgctgcggctcgcgcatatttgatgcggcagagcagcctaataccggcgaaagccttgctgcgccgcggcgggaagccagaagcacgcgccgcagactgcgccgccgcagcttgcgcaaggcagacttgtatgagctgatggcgcaaaacggcttaccgggcagagcggaaatagaagaagcggtgcaggcgggccacctgccggatatctatgccctgcgtgtgcaggcgttggatggccctgtaacggcgatggactttgcccgaattttgctgcacttgatgcagcgccgtggtttccgcagcaaccgcaaggcagatgatgcccagaaagacggaaagctgctgcaagcaatcgatgccaacacgcgccgcatggaagaaaaccactaccgcacggttggcgagatgatgtaccgtgacccggtgtttgcagagcataaacgcaacaagtcggaaaactatctttctacggtcagacgggatcaaatcgtggaggaagcggtacagctttttgctgcgcagcgccagtatggtgcggcgtgggcttcgccgaaaatggaagcggagtaccttacgattttgacgcgtcagcgttcgtttgcggaaggacccggtggagatagtccatatcgtggaatgcagaaggttggtccctgtgccttagaaggaaaaagcgaacggcgtgcgcccaaggcaacatttgcatttgaatattttacgcttctgcaaaaaatcaatcatatccgcattgccgaaaatggtgtaaaccgcatattgacagccgaagagagacaagaactgctttctgcatgctatcggacagacaaacttgactttgctagaatacggaagttgctggccctgccgggagaggcacgattcaacatggtgcgctatcgggaaaaccagacggctgaggaatgtgaaaagaaagaaaaaatcaccgtactcccctgctaccacaaaatgcgtaaagtgttgaacacgttacgaaaagaccatatccgcagtatcagtcgtgaacagttggatgctgctgctaccgcattgacaaatccggaaaatgaagaaaaactgcgggctgcactagaagaagcgcagtttgaaccgctggaagttgatgctttgatggcgctgcccagctttagcgggttcgggcatatttctgtcaaagcgtgccgaaaactgatcccctatttggaacaaggactgaactataacgacgcttgcaaagaagcgggatatgactttcagggaaattaccgtggtgaaaaatcgcagttcctgcctgcgtccacagaggaaatggaggacatcacaagcccggtggtgcggcgtgcggtggcgcagactatcaaagttgtcaatgcaatcatccgcgagcagggagaaagcccggtcaatatccacttggagctggcgcgggaaatgagcaagaattataagcaacggaacgaattggcggatgctatggagaaaaaccaagccgaaaatgcgcggttaatggaaaaacttcatgatttgtttcgagggcgtactattacaggacaaacccttgtgaaataccgcttatggaaagagcaaaaagaggtctgtgcgtattcactgcagatgatgaaactggatagtgttatcacggattcaagttatgctgaggtggatcatatcgtcccatatagcaggagctttgatgaccggcgtaccaataaagtgcttgtgctgacttcagaaaatcgtaaaaaaggagatcgtttgccgctggaatatctgcaaggaaagcggcgagaggattttattgtttataccaaagcaaatgtaaagaactatcgcaaacgacaaaacttattgaaagaaggattgagtaaggaagaaagcagggagtttatacagcgcaatttgcaggatacacagtatagtgcaagctttatgctaaactatattcgaaatcatcttgcgtttgcagactgctcggcggcgggtaaacagcgagtagttgccgtaaacggcgcagtcacggcgttcttacgcaaacggtggggtcttagtaaagtgcgggcggacggcgatttacaccatgcagtggatgcaacggttattgcctgtactacgccgagtatggttaaacgcgttactgaattttgtaagcaagaggaaacaaaccatgtacgtaatgaatatttcccggagccgtggccgcgattccgggatgagctgatgcagcgtttgtcggcttgcccgcaggaaaatttaatgcagatcaacccggtatattatcaaaatgtggatatagcaagtatccggccagtgtttgtgtcgcgtatgccgcggcataagatgacgggagcggcacacaaggagacgataaagggccgcttggatgatgcgcatacggttcagcgccggtcgattacagatttgaagcttgacaaagagggagaaattgcaggatattttaatccgagcagtgacaccctgctgtacaatgctttaaaggaacagctgacagcttttggcggcgatgggaaaaaggcatttgcagaaccgttctttaaaccgcgtgccgatggaacgccgggagcacaggtgcgcaaggttaaagtgtatgataaagccaccagtatggttgcagtccatgaaggaaaaggcgtggccgacaatgatacgatggtacgcattgatgtctattttatgccgggcgacggctattactgggtgccgatttatgtggcagatacggtgaaaccggaattgcccaataaagcggttatcgcacacaaaaattacgcagagtggaaagaaatggacgaaaaggactttttgttctcactttgcccaaatgacctgattcgagttgaaagcaagcgcacaatgaaattcaaagtgcaaaataaagacagtacactggaaaaggaaatgcaaacgaatggtgatatggtctatttcgagggaggaaatatttcgggcggttctataacggtagcaacacatgacggtgcttatatggtagaaagtcttggacttaagacacttcagaaagttcaaaaataccaggtcgatgccctcggcaattatacccttgttaaaaaagaaaaacgtcaatacttccctgcacaacggaggtgacctatgtcctaccgctgcctgatgatcgtaaacccggcgcgtatccgccgcaaaaatgaacagcttttgattgaaacggaagaagttcattctgtgccgatcgaggatatcagcgccattgtgctggaaagtcggcaaagtacgataacaacggctgcgctggcggcactggcgcaaaacggcgtggtgacgttttggtgcgatgaaacacacttgccgtgtggtatctcgctgccatttgcacagcatagccgccagttgggcgtgctgcgctggcagatggagctgacactgccgacgaaaaagcggatgtggcagcaaatcgtgacggcaaaaatcaaaaaccaggcggaatgcctggccctgtgcggcaaaacacaggaggcggcgttcctgtttggccgtgccaaggcggtgacaagcggcgataaggacaatttggaagccagcgcggcggcctactatttccccgccctttttggggcaggctatacccgccgcaatgaggatacccggaatgcggcgctgaattatgcttatgcaattttgcgcgggtacatggcacgctgtttggcggtatacggatttttgccctgtttagggctgcaccatgacagcgaactgaaccagttcaatctggcggatgacctgatggaaccgttccgcccggtagctgatttgtacgtggccgcaaatgttgccgaggatgcagcaatgacaaccgctttgaaagggcagctggtgaacctgctgaatgcagatgttctttccggtaatcagcaccacagcgtagcttatgcgatggaacgaatggtgcaaagcctgcgggggcaaacattgcagctgccaaaactgctggaatataagcagcacagctatgagtaaatttatgaggatgatcgttttcttcgatttgccggtgcagacaaagatggaacggcggtatgcgacgactttccggaactttttgctgaaagacggctaccatatgctgcaattttctgtgtatgcgcgtgtatgcaacggcaatgatgcagtcaagaaacacgaaagccgcctgaaggcatctctgccgccaaacggctcaattcgattgcttgtcgtgacagaaaagcaataccaatccattcaaatcctactgggaaattatcagccggaagaagcaccgtttgtgtgcgaacagctgagttttttctaaaacaaaaagcgcatcggaccgcaatccgatgcgctttttgcatagcctattataccataccaagagctattagggaactatgacaggcgctattaccgtgcgttgaatagtcgttattataccataccaagagctattagggaactatgacagttcgttgtcctgggcattgggcggcaggattataccataccaagagctattagggaactatgaccgtatcgctcacacgcacgtcgccgggcagattataccataccaagagctgttagggaactatgacgattctgtcatagaggaaatggcacggaagattataccataccaagagctattagtaaatcatcccccctaataaaatcccgctagccccaaaatttcttccccgcaggccttgaaacggtctgcggggtttgctataatttaaatttgttgagcaacttaggattttaggctccaccgcggcttgctgcggtgcaaaccccgcaagcctggcggtcttgcgcgcggtcaaaatctatccgccggagtattgtatgaatcagaaaaaactgtccgttcacagccttgtgcgctgtgctgtcattgccgcagtgtatgtggtcgtctgtctggtgctggcccccttcagctatggggctatccaggtgcgcgtggccgaggccctgtgcctgctgccggttttcggcgcggagtacatcgtcggcgttacgctgggctgctttttggccaacctgctgggctccaccgtcattgacgtggtgttcggcacgctggctaccctgctggcctgcctgctgacttacaagctgcgtgatatccgcgtaaaagggctggcaattccggcatccctgccgcctgttgtttttaacatgatcattgtgggcgcgttcgagatcacctttttcttctcggacggtgcacccacggcggccctggcggcgttcaacgccgttacggtgggcatcggagagctgatcagctgcacgattttgggcgtggccctcgtcaagctgattgagagcaacgcggccctgcacaagttctttacagaagaataatgaggtaacttctatgcgcccggaactgattttgtgggattggaacggtaccctgctggatgatgtcgaactctgcgaaaacgcgctcaaccgtcttttgcagcgctacggctacccccagcggtacgaccacgagcagtaccgggcgatttttggcttcccggtcgaggattactacgtccgcgccgggttcgacttcgcccgccacagctttgccgagctggcggaaagctacatggaggattacatcccggccagcgccgcctgtccgctgatggcaggggccgttgacgcgctggaagcgttcgaaaatgccgggctgcggcaggtgattctgtcggcaagcccggtcacaacgctgactcgccaggtggaagaacgcggtgtgacgccatattttgaccgcctgctgggactgggcgatatctatgccaaaagtaaggtggaggtcgggctggcctatttacaagaggaaggcttcgacccggcgaaggccgtgatgataggtgattccgtccatgattttgaggtggcccaggcgctgggtgtgggctgtgtgctgcaatcgagcggccaccagccgcccgagacactgcgccggaccggtgcaccggtggcggcagggctgcgggaagtggcaaagttgattttgagaaagtgagccgtgcggcgcggggcgtcaagggcgccgccccctacaaccgtagagaggcattggaaatgataggcagagaggtacaaaaatgtctgaccgtgtaaaaggcgcctgcctgacgatgggcggcgcggcgtgctggggtgtttcgggctgcatggggcagtacctgttcacccgggaagggatggattccacctggctggtgcccatccggctgtttctggcggggctgattttatctgcgttcttttttgtcaaagaccgcaaaatgctgtttgacccatggaatttcaagaaaaatccgcgcaacgtcgttgatctgctgatttacggcctggcgggcgtcagctgctgccagttcacctattttctgacgatccagctgtccagcgctggcatggggacgatcttgcaggacctctcccctgtcattattctactggtggtctgcatccagcaaaggcgcgggccgcgggtgtttgaaattttctccatcctgctggcgctggtgggggtgttccttatcacgacccacggcagcctgaccgaccttgccatcagcccggcggcgctggcgtcgggcgttgtcagcgcctgctgcgtcgccatctatacgatgtggcccaagaaattgcaggagcagtacccaaccccgatgctgcagggctgggcgttcttgatgggcggcacgatgtttgccctgatcttccgcccctggacgatgaattatgtgccgacgccgatgggcgtgttcggtattttcacggtcgtggtgctgggcaatgtgctggcgttcagcctgtatatgtcgggtgtgccgctcatcggcccgcagaagtccagcctgtacagctttgcggagccggtcacggcggctattatcagcaccttggtgttgggctcgccgtttacgctgtgggatgccctgggctttggctgcatctttttgatgctggtgctgttgagtctgccggcgaaaacaaaagcgtaatagattcgagaggctgtccgcaatgggcagccttttttgctgccatgtgggggccggatatgtccggctttcagctttcccacaaatgcgcttttgcctttatgccgcgggccgggtatgcccggcccctacaatgctataataaaataaacctatcctaactatgaattgacatatccccctccctgggtgtattatagtatcatgtgtaaaactatatagccgcacctctacacgcggcggaaaatacaggggaactgttatgtctttttttgaaaaactgttcggctctttctcggacaaggaacttaagcgcatcaatcccatcaaggacaaagtccttgccctggagccggaaatggctaagctgaccgatgaggaactgcaggccaagaccaccgaattcaaagagcgcctggccaagggcgagacgctggacgatatcctgccggaggcattcgccgtctgccgtgaggccgactggcgtgtgctgggcatgaagccctatccggtgcagatcatcggcggtattgtactgcaccgcgcctgcattgccgagatgcagaccggtgaaggcaagacgctggttgccaccatgcctacctacctgaacgccctgaccggcgaaggcgtccacgtcgtcaccgtcaacgattacctggcccgccgcgactctgagtggatgggcaaggtctaccgtttcctgggtctgaccgttggtctggtcgtccacggcgtggagtccaccgaccgcaagaaggcctacgaggccgacgtcacctacggcacgaacaacgagttcggcttcgactacctgcgcgacaacatggtcgtctacaaggcaaacatggtccagcgcggccacgcctttgccatcgtggacgaggtcgactccatcctcatcgacgaggcccgtaccccgctgatcatcagcggcaagggtgaggattccagcgtgatgtacaagcgcgccgacgacttcgccaagacgctgaaaaagagtgtcatcgtcgagttggacgacaaggttgaggccgaggaacaggtcgacggcgattacgttgtggacgaaaagcgcaagaccgcgaccctgaccgagtcgggcgtcaagaaggccgaggcgttcttccacgtggataacctggccgacgccgacaatatgtcgctgcgccattatattgacggtgccatcaaggcccgcggcgttatgcaccgcgacaccgactacatcgtcaaggacggtgaggtcatcatcgttgatgagttcaccggccgtctgatgtacggccgccgcttcaatgatggtctgcaccaggctattgaggccaaagagggcgtcaccgtcgccgccgagagcaagaccctggcgactgtcaccttccagaactacttccgtatgtacaaaaagctgtccggcatgaccggtacggcctccaccgaggccgatgagttcagcgagatctacggcctgaacatagtcagcatccccaccaataaaccccgtgcccgtaaggatctgcccgacagtgtctacaagaccgtcaacggcaagtacaacgccgtcattgagcaggtcgccgagtgccacgccaagggccagccggttctggtcggcactgtcagcgtcgagaagagcgaggctctgtccaagctgctgaaaaagaagggcatcgagcataacgtgctgaacgccaagcagcacgagcgcgaagctgagatcgttgcccaggccggcaagcagggcgctgtgaccatcgccaccaacatggctggccgtggtaccgatatcatgctgggcggcaacgtcacctatatggccaaggccgcgctgaagaaggaactgtccaaggaactgaccgccgacctggcccagctgaaggacgagtacgaacacgccaaggcccgcgccaaggccaacggaaccgagctgcccaccccgccggaggctggcattgacgcgaaactggaaatgctgatgaccgagtgtgacggccacgccgaaaccgaggacaccgaaattctccacgcccgcaagcgctttgaggaactgtgcgaggagtttgcccccgaagtcaagcgcgaggccgaagttgtccgcgaggcgggcggcctgttcatcatcggtaccgagcgccacgagagccgccgtatcgacaaccagctgcgtggccgtgcaggccgtcagggcgaccccggtgcatcccgcttcttcctgagcctggaagatgacctgatgcgtattttcggcggcgagcgcgtgcagaacctgatggactccctgggccttgacgaggatgtccccatcgagaacaagctcatcaccaacacgattgagagtgcccagaaaaagctcgaagcatcgaactttgcaattcgtaaacaggtgctgcagtatgacgacgtcatgaaccagcagcgcgagatcatctacaagcagcgccagatggtgctggacggcgaggatatctccggcaagctgcacgagatgatgcgccagtccattgacgatgcctgcgcgaactacctgaacggcgagaccgccgacgattgggatttcgcgggcctgcgccgccactttatgaactggctgtgcctgcccaccgacttcaactacaccaccgagcagctcggcgacctgaccaaagatggcatcgccgacgaactgtacaagcgcggcatggatatcctgaccgcgaaggagaagcgctacggtgccaagacgatgcgcgagttggagcgtatctgcctgctacgcaatgttgactccaagtggatggagcacattgacaacatggaccagctcaagcagggcatgggcctgcgcggctacggccagcatgacccggtggtcgagtaccgcatcgaaggctttgccatgttcgatgagatgatcgcctccatccgcgaggatgccgtgcatatgctgctgacgatcgaaatccgccagcagaacgccgagccgaagcgtgagcagattgccaagcccaccggcgagggtgccccgaaccaggccggtgccaagggtgctgccccggtgcgcgtgacaaagatcggccgcaacgacccctgcccctgcggcagcggtctgaagtggaagaagtgtacctgcaaagagtaccaccccgacctgtaattcatcatcaaggcgccgcctttaattttgggcggtgcctttttaaagtggcagagttgtaggggccgcatatgtgcgactctcaactttcccgcaaatgacctgttcccgttatgttgagggtcgggtatgcccggcccctacgaggtagaaacccatcatgaaagcccgaatcatccgtgaaccccggtgtgctctgctttggcgcatcgatgaaacctacccccactacgccgccatcacccgcgcggccaaacggtacgacgtcaaactacgtgccgtggccgacggcgatctcggcggcatcgtgggcgacctctgcgcgggtaagcctgccccggtgtttgccccgcttatcgccgtgccggaccgcccggctatcatcatcagcggcctgcgccacgacaatggcgagctgggtgcgttcctcgaccttgtcaaaatgggcggtgcatccatcccggtgcgcagcatggtcacgcccaccagcaagcaatggacgctggccaacctgttgcttgaattaaacacggaacacgaaactgtgcagggagacaaggcgtgaagcgctgtcttgccgcgttggcgctggccgtgctgctctgcctgccgctgaccgcctgtcaaaaacagcaaaatttgtacagcgcgacctggtttgatctgttcgatacggtcgccatcgtgcaggggtacgccgccggccaggacgagtggaacgcccaggctgccgccatgcgggaagatttatcgcgctataacgaactgtttgatatctataaccactacgacgacgttgtgaacctgtacgacgtcaacgccggggccgctgccgcgccagtggctgttgatgaagagctgtacgcattcttgcgctggtgtaaggacaccgtttaccccgccaccgacggcgcgacgaacattgcggcgggcgcggtgctgcggctgtggcacgacgcgcgggaaagcgactcccctgccccgcccgatgcagaggccattgcggcggcgctggaacatatcgacatagaaaatctggtgctcgatgatgatgcccagaccgtctatttcgccgaccccgctatgacgttggacgtcggcgcggtgggcaagggttacgccgtggagcaggccgcccaagcggcccaggcccgcggcctgacaagcgctctgctgaacatcggcggcaacgtccgcgccatcggcaccaagcccggcggcaagctgtggacggcgggcgttgaaaacccatggggcgacgacccggcgtacatccaggctgtggagctggccgacggcgacagcctggtcatcagcggcgactaccagcgctattttgagtacggcggtgtgcggtacgcgcatttgatcgatctgaccaccggctggcccgcccgctatgtcagcagcgtggccgtgctggcccacgctgacaccggcggtctggcggacgctctgtccaccggcttgttctgcctgccagaatccaccggccagatccttgctgcccagaaccactacgccgtcctctggatgcaccccgacgaaaccaccaaaaaaagcaacgactggccgaaataaaacaagagccaccgacctttttaagccggtggctcttatggtatcatgatataatacaaaacgtataattcaccgctgcggattgatgatttcgcgccaatccaaatcgccgtgctccaggccgtgaatcaggacctcggcggtggcaatgttggtggcgaccgggacgttgtgtacgtcgcagatgcgcagcaggttcatctcgttcggctcactgggtttggcactgatggggtcgcggaagaagagcagcatatccacttcctcgcaggcgatgcgcgccacgatttgctcggcaccgccgtgaccgccgggcagaaactttgtcaccttcagcccagtgttctcctcaatcaagcggccggtcgtgccggtagccagcagacggtgctgctccaaaatatggcggtaggccatacaaaactgcaccatcagctcctttttggagtcgtgggctatcaatgcgatcgtcatagaaaatgccaccatccttcgcagcagaattacaagttaaaaggtaagcggaacgcgctgtccgcacaaacgttttgccatagcctgtccggccgccacggcggggtcgcccgcgggcggcacggtgccgttggccccggccagctgcagtacgcggctttcgggtatcacggccagcaattgggcacccacggtgtcaatgcactcgtccaggtcagccacagcggcgtttttgccaaagctctcgcgcctgacgcggttcatcaccaaccgcacggcgctttgggggcgtgccccggccagcagccggtccgccacaattttgccgtcgcgcagggcgaccgggtcgggggtcagcaccagcagggtcttgtccgccacggcggcggccgccgtgaacggcgcacccatcccggcggcggtgtccaaaatcacaaaatcgaaataggggcgcatggcgaccagaagccgccccaagggcgcagcatccaccgcgccgccctcatagggggcgctgatgaccgacagcccggggtaaagtgggctgggcacaacggccttggccccctcgcatcgaccgcagaggacatcctcaatgtcatagacggtgcggccgtagacgcctgcaataatgtccacactgcgcagacccgaatccagctcaatgagcaggaccttccgccccagccgcgccagacaggcccccagcagcactgaaaccgtgcttttgccggtgccgcccttgccggagcagaccatgatacactgtgcgttcatgtcggctcccttccgcagttgtgcaacactatctcccgtatattctagcacatttccgactgaactgcaactggctttttgtcaaaaaaggacaccttctttttgaagaaaatcacgataaggtata

SEQ ID NO: 792 - DNA, 23225 bp, synthetic construct
  source 1..23225: mol_type = other DNA
  misc_feature 1..23225: note = Synthetic
ccgatgacgaaaccgtccgccccggcggcatgcagcgtcttgatttgatggcagagcaggtcgatctcctcttttgtgtagagaaaatccccggcacgggggcgcatcaggcagcgcactggcaaggacatttcggccttgacctgccgcaaaaggtcggcgtagggcgtcagaccgcccacggccagcgcactgcaaaattccagccggtcggccccgccctgcttggcggcgcgggcggaggccaggctgtcaacacagacttccaacaacttcatgtgtggtcacatcccctttggcgttttcctcattgtagcatgaaattttggatacggcaagccccgcacagccggaaagctgcgcggggcttgccgcagttatatgtgtatcacaacgaataggagtaggcagagttttacgccgcgtggccgccgcgcacgacgcgcagttgtaccgcagggtgtttgcgcggcgcgggggcaggctggccggccgattcctccgggtggggcaggaggatgccgcagacggcgttgagcatgatgaccgccgcaaaaagccccagaatggccgcccaaagcggcatggagccggaggcggcagcactgagcatagcccctcccaacaggatagccgccgtggcgacaagacggcacagcttgtttttgataagttcccagttcataccgatacctccaaatcagtcggccccgcgtggccgactgccgcaattttaacaacggacaacagcgttttgttcgttgctcttatcataatacaccagacggttgttgtcaatgcctatttacaacttatttttgaaaatgtttgcaaaaaactctttacaaaaaccacggacagttgtataatgagactaaagaatcagagccgcatacaagatgtggtttaccctactataaaaaggagatttccgatgtttgcagagcgcttgaaagaggcccgcaaggccaaacggtacagccaggccgaggtttccaaaatgctgggtgtgacgcagcaggctgtcggcaagtgggagaccgggcgttccaccccggacccacagaccgtcgcgcgtctggcagaaattttggataccccctccgatgtgctgctgggcctgcgtaaggagccgggcgtttccgctgccgtgggccgcaacgccttcagccgctataccgaatcccagatcccggtggtgggcaccgtccgcgccgggtatggggccctcgcctttgaggaggactacggcaaggagtacgcctgcgtcaaggatccgaagaactacttcttcctcgtggtcaagggcgacagtatggagccgcgcatttccgacggcgacctggccctcgttcaccgtcagaacacgttggacaacggcgacctgggtgtgctggtctatggcgcagacggcgagggtacgctgaaaaagtatatccagcgcggcaactcggtcgtgctacagcctttcaacccggcctatgacgaaatggtcatcaagggtgaggaattggatcacctctacatcgccggcaaggtcgtggaaaccaaggcaaagtggtaaagccctttcacgattctattgtagcataagcgaagtcctataatttggactttcaatgtagaaattgaattatttcacaaaaatgctgcccgcggcacaccttgcaaaacaaggatatgcggcgggctgtattttttatacccttttttaggagacaggtgcgatggaccttgcggaaaaactggaaattctggcggacagcgccaaatatgatgtggcctgcacgtccagcggcgttgaccgtccggggcggcatggcagcctgggcagctgtgcggcggcgggcatctgccacgcctttacgccagacgggcgctgcgtttccctgctgaaggtgctgtactccaacgtatgcagctatgattgcagctactgtgtcaaccgccgtaccaacgaccggccccgggcaactttcaccccgcgggagctggccgatttgactatcgggttttaccgccgcaattatattgaggggctgtttttgtccagcgcggtgctaggtacgcccgaccgcacgatggagctgatgatcgaggcactgcacatcctgcgggaggaataccacttcaacggctacatccacgccaagacgatccccggcgcggacccgctgctggtggagaagatcgggcggctggcagaccgcctctcggtcaatatcgaactgcctagcgagacgagcttgacggcgctggccccagacaagaaaaagaccgccatcctgcgccccatgggccagatcgcggtgcagagcgcccagagcaaaaaagagatggtgctctaccggggcgcgaagccctttgccccggccgggcagagcacccagatgatcattggcgctacgccggaaactgaccggcatatcatggacctgacagaagggctatacaaaaaatatgcgctgcggcgtgtgttttactcggcctatctgccagtggtagcggacagccgtctgcccgcgccgcacaccgccccgcccctgctgcgggagcacaggctataccaggcggattggctgctgcggtactaccatttttcggcgcgggaactgctgaccgaggatgagccgaattttgacccctacctcgatcccaaatgtacctgggccgtgcggcacccggcgtttttcccagtggagatcaatactgccgcgaaggaggagctgctgcgggtgcctggcatcggccccaaaagcgccctgcgtatcattcaggcgcggcgcacgcagaatctgggcttggccgaactcaagcgcattggcgtggtggtcaagcgggcgcagtatttcatcacctgcaagggccgggcagcagctcacgcaaaccgtgcggaaattgccaacgccctgctcgaccccaaggcgttcagcgtagggatgcagcagctttcgctggacgattttgtacccaaggccctaccggatgcagccccggctgtgcaaaaactggccgcccgcggtatggcggctgacgtggccgccaaaaccgtgcggcaggaggcactgcaatgccttacgaagcgaatgtgaccgacgttgcctaccgctatgacggaagttttgcaggctttttgtgctgcgtgttcgagagttatgcccggcacgagataccgtcggaggtttgcccacctgaagaaggccagctgaacctgttcggcacgcgggaaatcctcactgaccggcagcgcgcgaagcgggtggcggtggggttggaccggctcgggccacaggtcaaggatcgcattgtaacagggttcctcagcactgacccgggcaaagatctgactctgctgcggtttgcgcggcgctgttttgcccaggggccgcaggccgtgcagatgctgggcgacccggatgtggcagcggcgttcgccatcgagcgggccgtcaacaacgaggcgggcaagttcatcgagttcatccggtttgaggagcgggacgggatgctgggcacggtcatccacccgaagcaccaagtcttgccgctgctgcgcgggcatttttgcagccgcctgccggatgaggattttctgatttttgacgcgacccacggcacagcgctggtgcggcgcggcgggcaggtgcagtacctgacgatggaacactacacccccggcacagacgaggacgaactgaactggcagcagttgtggaaacgtttttttaaggcgctgaccatcgaggagcgccgcaacgagaaagcccagatgaaccacgtgcagaagcggttctggaaagacatggtggagatgcaggacagtgtatgactactcgtaatcgtactccgggttggcagcttggtactcggtcaggaagcggagcaggcgctcggtgtcggcgtagctcatgcggccggtgtcagccagcgcccgcaccatggcgcgaatgtccccgtcgtagagcgtctgcaaatgcgcctggctgaccgcgccgcagtaggtcaggcggcgcaccagcggtgtgtagaggttcttgttcccctgcttctcggtgcggacgaagtttttcttttcaaggcgaagcagaaaattgagcagcgtcgagtctgcccagtggcactccggcggcaggtgtgacgcgatctcgcgccgggtggcggcgcgattgcaggcccaaagtgcggccatgacctgttcttcactgcgggaaagttgttccatgataggctcctttttcataggcgacgatgtaggggccgggcatgcccggcccggtcgtataagataagtagacgattgcgggaaaacagcgcgggcggagcaaagccccgctcctacgggctgcaattttacaaatgtggaagtaatatctatatttattttacatctgtggtagattgaaatgcaacaggaaatattgcacaaatctcagggacttattttggcataaacagcaaataacttttacaaatgtcgtgcatagtgtccttgcaaagaaaacaatttgtcactttacagaaacacttgccggattttgggcttttttcgtaactttgcccgcttgctggggcgggggcaaaattcctataatattggcataccgcaacggcgcggcaagatgcgatccgccgtgtgcgggtcgcatttcatttactgccagggaggaaattacgatggctagagtttacaatttcagtgccggcccttcgatgctgccggaggctgttttaaagaccgcacaggctgaactgctggactaccatggttccggcatgagcgtgatggagatgagccaccgcagtaaatggttcgatgaaatcatcaacaataccgaggccgccatgcgccgggtgctgaacatccccgccaattataaggtgggctttttccagggcggcgcgacccagcagtttgccatggtgccgctgaactttatgaccaccggcacggcggattaccttgtgaccggcaacttcagcaaaaaggctgccgaggaagccgccaagttcggcacggcccgcattgccgccagcagcaaggacaaaaactttacttatatccccgacgtgaaggccatcgactatgaccccaacgccagctatatccacatctgccagaacaacacgattttcggtacgaaattcgtcgatgtaccgcaggtggacggcgtgccgctggtcgcggacatgagttcgatgatctgctcggagccggtggatgtcagcaagtacggtgtcatctacttcggtgtgcagaagaacattgcccccgcgggcatggcagtcgccattgtgcgggaggatctgttgggcaaggccgccaagggcctgacgcccgacaagatccccacgatgatgaactacaccaccctgctgaacgccgacagtatgtacaacaccccgccgtgctggtgcatctacatgaccggcctggtcatgaactacctggagaacgagatcggcggcctggaaaatatgcagaagatcaacaccgccaaggcgaaggtgctttacgattacctcgacggccaggacttctacaagaacccggtggagaaaaagtaccgcagcatgatgaatgtgaccttcacaagccccgatgccgacaccgacaaggcgttctgcgccgcagccaccgaggcgggctttgtgaacctgaaaggccaccgcctggtaggtggtatgcgggcgtccatctacaatgccatgccgccggagggcatcgataagctggtcgactttatggagaagttccgcaaggagcattgaacggccgctttgtaggggccggacatatccggcccctacaaagcagaattaaggggaacagggagtaatctatatgtatacaatcaaaactttgaatgctatttcgccggttgggctggccaaactgcctgccaaccagtttgaaatcgacaacgaggccgccgcgccccacggcattttggtgcgcagcgccgatatgcacgacgcgccgctgccggacagcctgctggccatcgcccgcgcgggtgcaggtaccaacaacatcccggtggaggaatgcaccaatgccggcatcgtcgtgttcaacacgccgggtgccaatgccaacgccgtggcagagctggtcatcggcgcgctggtggcgggcagccgcaacatggtggacgctgtgaactgggcgcagaccctcaaaggccgcgacaccatcgccaaggatgtggagaagggcaagaaagcctttgtcggccccgaactgcgcggcaagacgctgggcgtcatcggcctgggggctatcggtgcccgcgttgccaacgccgccgtggcgctgggcatggaagttctgggctatgacccctacatttccatcgatgcagcgtggagcttgtcccgcagtgtgcagcactgcgtcacgctgggcgatatgctgccccgctgcgactacctgaccatccatgtcccctacctgcccacgacccgccacaccatcaacgcgcagacgctggccatgtgcaaggacggtgtccgcgtgctgaacttcgcccgcggtgagttggtggacaacgctgccctgctggacgcgctgaacagcggcaaggtcgcgcagtatttctgcgatttccccaccgaggaactgctgggcgtcaagggcgtttactgcacgccgcacctgggcgccagcacgccggagagcgagacgaactgtgccgtgatggcagccgccgagctgagcgactacctgaaaaacggcaacatcacccacagtgtcaacctgccggatgtcagccagccccgcgtcagcggccgccgcatctgcatcatccacaagaacgcaccgggtgcgatctcggccatcaccggcattctgaccgaagcccacctgaacattgagaacatggtgaacaagggcaaaaaggatgtggcctacaccctgctggatgtgaccggcaacgtcaccgacgacctggccacgaagctgggagctattgagcctgctatccgcgtgcgagttttgtaaactgtaaaatgtgtgaaaaacaccctctgccgtcatttcgcggcagagggtgtttttgtgaaattggaggtagggaacataatcgctatgagaggtcagaccttattgcattggactgacgaatcccttataaggtacgagtatgtggagaactgctgcggcatacaaggaaaatcccccctgactgcgtacaggtttaggccgctgtgcgcggcttttttgtggtctttgccccaaaaccaaacaaatcgggacaatcgacccaatacggctttttttgcggcgggttttatggtagaatctatgagaactcaaaaaagcggggaacgagtgctgacggaaaagctctctcccccagccgctgcggcggcagccccagagggggccgagaagggaggaacacggcatgaccaacgcgccgaaaaccgtattagccatccacgacctgccgggctttggccgggcggcgctgtcggtcatcgcaccggtgctctcaacgctgggggtgcagactgtggcactgcccacggcggtgctgtccacccataccggcgggctgggcgcaccggccaagctggccgaccccagctacggccctgccgcgctggcgcattaccaccggctgggcgtgaaattcgactgcatctactccgggtatctggcggactccgcccaggcccggctggtggaacaggcgttcgagctgtggccgaaagcgctcaaggtcgtggatccggtgctgggcgacggcgggcggctgtacagcgggctgggggccgacatggtcccggctatgtacaatctgtgcagtaaggctgatttgatcgtgcccaatgtgaccgaggctgccctgctgctgggcgacccgctgcccggcgtgggcagtgctgagcaggccgccgcccaggcggcacggctggtgcgcattgcgccgcaggtcgttgtgaccggtgtgaccgggctgaacggcgggcggtacataggctgtgtgggcgcggcccgcggcggcgagggctacaccgtcaaaacgccgctgctgccccggatgttccatggcaccggcgatatctttgctgctgtgctggtagggcgcattttgcagggcaacgtgccccaggccgccgtgcaggcagcagccgcctttgtggccgagtgcatccgccagacccccgaaggtgcggatgagcgcctgggtgtctggctggaaaatgcgctgccgaagctgcggcaggagtgaagcggcagacaggcggggcgtcggggacgccgcccctgcaacagggcggcgatgtggcggccagaggactggccgccctacaaagctgccaccacacaaaattcaaacaaacaggactgtaaacatatgccaaccttaaacattgtattggtcgagccgcagataccgcagaactccggcaatatcgcccggacctgcgcggtgacgggtgcgcggctgcatatggtggggccgatgggctttaccatcgacgataaaaaattgaagcgcgccgggcttgactactggcaccagcttgatataacatattataaagacttggcggactttttcgcccgaaacaaggggccgtttttctacttcacatccaaaggcccgcgccgccatgtggatgtacactatcccgacggcgcatacctcgtctttgggcgcgaggacgccggcctgcctgaggaactgctggcagcccacgaggccgactgtgtgcgtatgcccatgcgccggggcgagcgctgcctgaacctgtccaacgctgtggccgtgggcgcgtatgaggccctgcgccaatgggattttgccgacttagagactcgcgggcagctgacccgctacgaatggagtgaggatgtaaaatgagcaagatcggttttctgacggattcctgttccgacattccgcaggagcttgcggacaagtacggcatcgaggtcgtgggcttccccatcaacctggacggcgtggaatacatggagcgcaaggatttcaccaatgaccagttttaccagatgatgcgcgacgcccagggcgtgcccaccaccgccgccatcacccagctgcagtggtgcgagatttacgagcgctatgtggacgagggctataccgaccttgtgcatctgtgcatcaacagcgcgggatccagtacctacaacaacgccgtcaaaggtgcggagatgctggccgaggagcgccccggccataagctgaacatccagctcatcgacagccacacctactcgatgccctacggctggtatctgtgcgagtgcgcccgcaaggtgcgcaacggcggcgagcttgccacctgcgtggaggagatgaagcagagcctggaccgcgtggagatctgcctggccgcatacagcctgaagcagatgaagaagtccggccgcgtcagcgccgccgctgccgtggtgggtgacctgctgggcatccgccccatcatcagcctgaacgcgggcgtctccaaggtcgaggccaaggtgcgcggcgacgccgctgtgcccgccgccatgatcaaatgggtggagagccgcgtcgattccatgaaggacaccccctatatggtggcttacacgtccagcacctccaagcgcgacgagcttgtcaaggcctgcaaaaaggcattcggccatgcgccggtcattgtgttccagctgggcggcgttgtcagcgccaacaccggccccgacggcattgccatcgtctaccccggccatccccgccatctggaggcctatgccccgcagctgccgtaaaaaagacttgcattttttcaagggctgttgtatactataaacagttcttataccataccaagaactattatggttgctatgataaggtcataggaccgtaaagctctgacgccctgtcttatgacagggcgtcatcttttttgtcaaattttcgtggaaaatgtcagttgccgtgtgattctttatgcggtatgataatagcaaaaaagaaaaggtgtggtgaatatgaagcacccctatggaattggcctggatattggcattgcgtctgttggctgggccgtggtagcgctgaacgaaaacgcggaaccctatggcctgatccgctgcggttcgcgcatatttgatgcggcagagcagcctaataccggcgaaagccttgctgcgccgcggcgggaagccagaagcacgcgccgcagactgcgccgccgcagcttgcgcaaggcagacttgtatgagctgatggcgcaaaacggcttgccgggcagagcgaaaatagaagaagcggtgcaggcgggccacctgccggatatctatgccctgcgtgtgcaggcgttggatggccctgtaacggcgatggactttgcccgaattttgctgcacttgatgcagcgccgtggtttccgcagcaaccgcaaggcagatgatgcccagaaagacggaaaattgctgcaagcaatcgatgccaacacgcgccgcatggaagaaaaccactaccgcacggttggcgagatgatgtaccgtgacccggtgtttgcagagcataaacgcaacaagtcggaaaactatctttctacggtcagacgggatcaaatcgtggaggaagcggtacagctttttgctgcgcagcgccagtatggtgcggcgtgggcttcgccggaaatggaagcggagtaccttacgattttgacgcgtcagcgttcgtttgcggaaggacccggtggagatagtccatatcgtggaatgcagaaggttggtccctgtgccttagaaggaaaaagcgaacggcgtgcgcccaaggcaacatttgcatttgaatattttacgcttctgcaaaaaatcaatcatatccgcattgccgaaaatggtgtaaaccgcatattgacagccgaagagagacaagaactgctttctgcatgctatcggacagacaaacttgactttgctagaatacggaagttgctggccctgccggtagaggcacgattcaacatggtgcgctatcgggaaaaccagacggctgaggaatgtgaaaagaaagaaaaaatcaccgtactcccctgctaccacaaaatgcgtaaagtgttgaacacgttacgaaaagaccatatccgcagtatcagtcgtgaacagttggatgctgctgctaccgcattgacaaatccggaaaatgaagaaaaactgcgggctgcactagaagaagcgcagtttgaaccgctggaagttgatgctttgatgacgctgcccagctttagcgggttcgggcatatttctgtcaaagcgtgccgaaaactgatcccctatttggaacaaggactgaactatagcgacgcttgcaaagaagcgggatatgactttcagggaaattaccgtggtgaaaaatcgcagttcctgcctgcgtccacagaggaaatggaggacatcacaagcccggtggtgcggcgtgcggtggcgcagactatcaaagttgtcaatgcgatcatccgtgagcagggagaaagcccggtcaatatccacttggaactggcgcgggagatgagcaagaattataagcaacggaacgaattggcggatgctatggagaaaaaccaagccgagaatgcgcggttaatggaagaacttcatgatttgtttcgagggcggactattacaggacaaacccttgtgaaataccgcttatggaaagagcaaaaagaggtctgtgcgtattcactgcagatgatgaaactggatagtgttatcacggattcaagttatgctgaggtggatcatatcgtcccatatagcaggagctttgatgaccggcgtaccaataaagtgcttgtgttgacttcagaaaatcgtaaaaaaggagatcgtttgccgctggaatatctgcaaggaaagcggcgagaggattttattgtttataccaaagcaaatgtaaagaactatcgcaaacgacaaaacttattgaaagaaggattgagtaaggaagaaagcagggagtttatacagcgcaatttgcaggatacacagtatagtgcaagctttatgctaaactatattcgaaatcatcttgcgtttgcagactgctcggcggcgggtaaacagcgagtagttgccgtaaacggcgcagtcacggcgtttttacgcaaacggtggggtcttagtaaagtgcgggcggacggcgatttacaccatgcagtggatgcaacggttattgcctgtactacgccgagtatggttaaacgcgttactgaattttgtaagcaagaggaaacaaaccatgtacgtaatgaatatttcccggagccgtggccgcgattccgggatgagctgatgcagcgtttgtcggcctgtccgcaggaaaatttaatgcagatcaacccggtatattatcagaatgtggatatagcaagcatccggccggtgtttgtgtcgcgtatgccgcggcataaagcgactggaaaggttcatgaagatacaatcaggagttatgtgagtaagggcatcacagccgtacgaacgtccattacagatctaaagctcgatgagaaaggagagattgaaggttactttaataaggaaagcgaccttctgttgtacaatgcactaaaaaggcgtctggaagaatttggtggaaacgccaagaaagcatttgcagaaccattttacaaacctcgtgcggatggaacacccggtgcgcaagtgcggaaggtgaaaattgttgataaaacgagcaatgtgatttgtgtgcgtgatggaggtggcgtttcaaaaagcaacaatatggtacgcatagatgtatactatgtaccaggagagggttactattgggtaccaatttatgtggctgatatagtgaaatcaacattgccgaataaggcggtcttgcgaaataaaggcatggatgattggaaggaaatgaacgagaaagactttcagttttcgctttataacaatgaccttgtttttattgaacgagacagcccaatcagcttttctctaaccaataaaaaaagcaccttaccaagcaaattttccacagaaaaaacattcgcgtattatcaaaaaggggatatatctaatgccgcaattaaggtggaaacgccggatggagcgtacgtttttaaaagtttgacattaaatacagtacggaaaattgaaaagtaccaggtcgatgtcctcggtaactacaccctagtcaaaaaagaaaaacgtcagaacttccctgcacaacggaggtgacctatgtcctaccgctgcctgatgatcgtgaacccggcgcgtatctgctgcaaaaatgagcagcttttgattgaaacggaagaagttcattctgtgccaatcgaggatatcagcgccattgtgctggaaagccggcaaagtacgataacaacggctgcgctagcggcactggcgcaaaacggcgtggtgacgttttggtgcgatgaaacacacttatgcgatggaacgaatggtgcaaagtctgcgtgggcaaacattgcagctgccaaaactgctggaatataagcagcacagctatgagtaaatttatgaggatgatcgttttcttcgatttgccggtgcagacaaagacggaacggcggtatgcgacgactttccggaactttttgctgaaagacggctaccatatgctgcaattttctgtgtatgcgcgtgtatgcaacggcaatgatgcagtcaagaaacacgaaagccgcctgaaggcatctctgccgccaaacggctcaattcgattgcttgttgtgacagaaaagcaataccaatctattcaaatacttctaggaaattatcagccggaagaagcaccgtttgtgtgcgaacagctgagttttttctaaaacaaaaagcgcatcggaccgcaatccgatgcgctttttgcatagcctattataccataccaagagctattagggaactatgaccaaggcttgcgcagctatcaaggcatataaattataccataccaagagctattagggaactatgaccgaacagcagtacgggcactttgaccgcatgattataccataccaagagctattagggaactatgactggttctgggggacaggttggcttgcagcaattataccataccaagagctattagggaactatgacataccacacccaccgcacaaaccagatgtaattataccataccaagagctattagggaactatgaccgcggcgacgctggacatgatccgcgcccgattataccataccaagagctattagtaaatcattcccccaataaaatcccgctagccccaaaatttcttccccgcaggccttgaaacggtctgcggggtttgctataatttaaatttgttgagcaacttaggattttaggctccaccgcggcttgctgcggtgcaaaccccgcaagcctggcggtcttgcgcgcggtcaaaatctatccgccggagtattgtatgaatcagaaaaaactgtccgttcacagccttgtgcgctgtgctgtcattgccgcagtgtatgtggtcgtctgcctggtgctggcccccttcagctatggggctatccaggtgcgcgtggccgaggccctgtgcctgctgccggtcttcggcgcggagtacatcgtcggcgttacgctgggctgctttttggccaacctgctgggctccaccgtcattgacgtggtgttcggcacgctggctaccctgctggcctgcctgctgacttacaagctgcgtgatatccgcgtaaaagggctggcaattccggcatccctgccgcctgttgtttttaacatgatcattgtgggcgcgttcgagatcaccttcttcttctcggacggcgcacccacggcggccctggcggcgttcaacgccgttacggtgggcatcggagagctgatcagctgcacgattttgggcgtggccctcgtcaagctgattgagagcaacgcggccctgcacaagttctttacagaagaataacgaggtaacttctatgcgcccggaactgattttgtgggattggaacggtaccctgctggatgatgtcgaactctgcgaaaacgcgctcaaccgtcttttgcagcgctacggctacccccagcggtacgaccacgagcagtaccgggcgatttttggcttccccgtcgaggattactacgtccgcgccgggttcgacttcacccgccacagctttgccgagttggcggaaagctacatggaggattacatcccggccagcgccgcctgtccgctgatggcaggggccgttgacgcgctggaagcgttcaaaaatgccgggctgcggcaggtgattctgtcggcaagcccggtcacaacgctgacccgccaggtggaagaacgcggtgtgacgccgtattttgaccgcctgctgggactgggcgatatctatgccaaaagtaaggtggaggtcgggctggcctatttacaagaggcaggtttcgacccggcgaaggccgtgatgataggtgattccgtccatgattttgaggtggcccaggcgctgggtgtgggctgtgtgctgcaatcgagcggccaccagccgcccgagacactgcgccggaccggtgcaccggtggtggcagggctgcgggaagcggcagagttgattttgaaaaagtgagccgtgcggcgcggggcgtcaagggcgccgccccctacaaccgtagagaggtattggaaatgataggcagagaggtacaaaaatgtctgaccgtgtaaaaggcgcctacctgacgatgggcggcgcggcgtgctggggtgtttcgggctgcatggggcagtacctgttcacccgggaagggatggattccacctggctggtgcccatccggctgtttctggctgggctgattttatgtgcgttcttttttgtcaaaaaccgcaaaatgctgtttgacccatggaatttcaagaaaaatccgcgcaacgtcgttgatctgctgatttacggcctggcgggcgtcagctgctgccagttcacctattttctgacgatccagctgtccagtgcgggcatggggacgatcttgcaggacctctcccctgtcattattctgctggtggtctgcatccagcaaaggcgcgggccgcgggtgtttgagattttctccatcctgctggcgctggtgggggtgttccttatcacgacccacggcagcctgaccgaccttgccatcagcccggcggcgctggcatcgggcgttgtcagcgcctgctgcgtcgccatctatacgatgtggcccaagaaattgcaggagcagtaccccaccccgatgctgcagggctgggcgttcttgatgggcggcacgatgttttccctgatcttccgcccctggacgataaattatgtgccgacgccgatgggcgtgttcggtattttcacggtcgtggtgctgggcaatgtgctggcgttcagcctgtatatgtcgggtgtgccgctcatcggcccgcagaagtccagcctgtacagctttgcggagccggtcacggcggctattatcagcaccttggtgttgggctcgccgtttacgctgtgggatgccctgggctttggctgcatctttttgatgctggtgctgttgagtctgccggcgaaaacaaaagcgtaatagattcaagaggctgtccgcaatgggcagccttttttgctgccatgtgggggccggacatgtccggccctcaacctgcccgcgaacgaccgtccgcctttatgctgcgggccgggcatgcccggcccctacaacgctataataaataaacctatcctaactatgaattgacatatccccctccctgggtgtattatagtatcatgtgtaaaactatatagccgcacctctacacgcggcggaaaatacaggggaactgttatgtctttttttgaaaaactgttcggctctttctcggacaaggaacttaagcgcatcaatcccatcaaggacaaagtccttgccctggagccggaaatggctaagctgaccgatgaggaactgcaggccaagaccaccgaattcaaagagcgcctggccaagggcgagacgctggacgatatcctgccggaggcgttcgccgtctgccgtgaggccgactggcgtgtgctgggcatgaagccctatccggtgcagatcatcggcggtattgtgctgcaccgcgcctgcatcgccgagatgcagaccggtgaaggcaagacgctggttgccaccatgcctacctacctgaacgccctgaccggcgaaggcgtccacgttgtcaccgtcaacgattacctggcccgccgcgactctgagtggatgggcaaggtctaccgtttcctgggtctgaccgttggtctggtcgtccacggcgtggagtccatcgaccgcaagaaggcctacgaggccgacgtcacctacggcacgaacaacgagttcggcttcgactacctgcgcgacaacatggtcgtctacaaggcaaacatggtccagcgcggccacgcctttgccatcgtggacgaggtcgactccatcctcatcgacgaggcccgtaccccgctgatcatcagcggcaagggtgaggattccagcgtgatgtacaagcgcgccgacgacttcgccaagacgctgaaaaagagtgtcatcgtcgagctggacgacaaggttgaggctgaggaacaggtcgacggcgattacgttgtggacgaaaagcgcaagaccgcgaccctgaccgagtcgggcgtcaagaaggccgaggcgttcttccacgtggataacctggccgacgccgacaatatgtcgctgcgccattatattgacggtgccatcaaggcccgcggcgttatgcaccgcgacaccgactacatcgtcaaggacggcgaggtcatcatcgttgatgagttcaccggccgtctgatgtacggccgccgcttcaatgatggtctgcaccaggctattgaggccaaagagggcgtcaccgtcgccgccgagagcaagaccctggcgactgttaccttccagaactacttccgtatgtacaaaaagctgtccggcatgaccggtacggcctccaccgaggccgatgagttcagcgagatctacggcctgaacatagtcagcatccccaccaataaaccccgtgcccgtaaggatctgcccgacagtgtctacaagaccgtcaacggcaagtacaacgccgtcattgagcaggtcgccgagtgccacgccaagggccagccggttctggtcggcaccgtcagcgtcgagaagagcgaggctttgtccaagctgctgaaaaagaagggcatcgagcataacgtgctgaacgccaagcagcacgagcgcgaagctgagatcgttgcccaggccggcaagcagggcgctgtgaccatcgccaccaacatggctggccgtggtactgatatcatgctgggcggcaatgtcacctacatggctaaggccgcgctgaagaaggaactgtccaaggaactgaccgccgacctggcccagctgaaggacgagtacgagcacgccaaggcccgcgccaaggccaacggaaccgaactgcccatcccgccggaggctggcattgacgcgaaattggaaatgctgatgaccgagtgtgacggccacgccgaaaccgaggacgccgaaattctccacgcccgcaagcgctttgaggaactgtgcgaggagtttgcccccgaagtcaagcgcgaggccgaagtcgtccgcgaggcgggcggcctgttcatcatcggtaccgagcgccacgagagccgccgtatcgacaaccagctgcgtggccgtgcaggccgtcagggcgaccccggtgcatcccgcttcttcctgagcctggaagatgacctgatgcgtattttcggcggcgagcgcgtgcagaacctgatggactccctgggccttgacgaggatgtccccatcgagaacaagctcatcaccaacacgattgagagtgcccagaaaaagctcgaagcatcgaactttgcaattcgtaaacaggtgctgcagtatgacgacgtcatgaatcagcagcgcgagatcatctacaagcagcgccagatggtgctggacggcgaggatatctccggcaagctgcacgagatgatgcgtcagtccattgacgatgcctgcgcgaactacctgaacggcgagaccgccgacgattgggatttcgcgggcctgcgccgccactttatgaactggctgtgcctgcccaccgacttcaactacaccaccgagcagctcggcgacctgaccaaagatggcatcgccgacgaactgtacaagcgcggcatggatatcctgaccgcgaaggagaagcgctacggtgccaagacgatgcgcgagttggagcgtatctgcctgctgcgcaatgttgactccaagtggatggagcacattgacaacatggaccagctcaagcagggcatgggcctgcgcggctacggccagcatgacccggtggtcgagtaccgcatcgaaggctttgccatgttcgatgagatgatcgcctccatccgcgaggatgccgtgcatatgctgctgacgatcgaaatccgccaacagaacgccgagccgaagcgtgagcagatcgccaagcccaccggcgagggtgccccgaaccaggccggtgccaagggtgccgccccggtgcgcgtgacaaagatcggccgcaatgacccctgcccctgcggcagcggcctgaagtggaagaagtgtacctgcaaagagtaccaccccgacctgtaattcatcatcaaggcgccgcccggaacaaggcggcgcctttttgtagggggcggcgtcctcgacgccccgcagctttcccgcaacgaccgttaatgggggaggccgcgggccgggcatgcccggcccctacaccatttcctgtcggtttcttggggctgattccatatccgcctgcccgttcccgtgaccaccccttccctttcaatgaggtgaatttctatgaaagccagaatcatccgtgaaccccggtgcgccctgctgtggcgcattgatgaaagctaccccaactacgccgccattgagcgcgcggccaagcgatatgaggtgaagctgcgccgtgtggcagatggcgacctcggcggcattgtgggtgacctctgcgcgggtaagcctgccccggtgtttgccccgcttatcgccgtgccggaccgcccggctatcatcatcagcggcctgcgccacgacaatggcgagctgggtgcgttcctcgaccttgtcaaaataggcggtgcatccatcccggtgcgcagcatggtcacgcccaccagcaagcaatggacgctggccaacctgttgcttgaattaaacacggaacacgaaactgtgcagggagacaaggcgtgaagcgctgtcttgccgcgttggcgctggccgtgctgctctgcctgccgctgactgcctgtcaaaaacagcaaaatttgtacagcgcgacctggtttgatctgttcgatacggtcgccatcgtgcaggggtacgccgccggccaggacgagtggaacgctcaggctgccgccgtgcaggaagatttgtcgcgctataacgaactgtttgatatctataaccactacgacgacgttgtgaacctgtacgacgtcaacgccggggccgctgccgcgccagtggctgttgatgacgagctgtacgcattcttgcgctggtgtaaggacaccgtttaccccaccaccgacggcgcgacgaacattgcggcgggcgcggtgctgcggctgtggcatgacgcgcgggaaagcgactcccctgccccgcccgatgcagaggccattgcggcggcgctggaacatatcgacatagaaaatctggtgctcgatgatgatgcccagaccgtctatttcgccgaccccgctatgacgttggacgtcggcgcggtgggcaagggttacgccgtggagcaggccgcccaagcggcccaggcccgcggcctgacaagcgctctgctgaacatcggcggcaacgtccgcgccatcggcaccaagcccggcggcaagctgtggacggcgggcgttgaaaacccatggggcgacgacccggcgtacatccaggctgtggagctggccgacggcgacagcctggtcatcagcggcgactaccagcgctattttgagtacggcggcgtgcagtacgcgcatttgatcgatctgaccaccggctggcccgcccgctatgtcagcagcgtggccgtactggcccacgctgacaccggcggtctggcggacgctctgtccaccggcttgttctgcctgccagaatccaccggccagacccttgctgcccagaaccactacgccgtcctctggatgcaccccgacaaaaccacccaaaaaagcaacgattggccgcaataaaacaagagccaccgacctttttaagccggtggctcttatgatatcatgatataatacaaaacgtatgaaagggcacgcgaaaaattcaaaaggggcacagccaaaatcaagaaaattcaagggagaaaaacggagaaacgagtcaattaaggctcgctccactccgttccgctcgccgcccattattcctcaatgcttttccaaaaatcactctaaaacgcgggaatccaagattttttcttatagatttcttcgattcctctcaaaaatggcaaacaaaaaagaccccaaacacccggaggtgctggggtcttacaattatttacctgtggttgtcctttttgatttcttgttgtgccctacatcaaaaacgtataattcaccgctgcggattgatgatttcgcgccaatccaaatcgccgtgctccaggccgtgaatcaggacctcggcggtggcaatgttggtggcgaccgggacgttgtgtacgtcgcagatgcgcagcaggttcatctcgttcggttcgctgggtttggcactgatggggtcgcggaagaagagcagcatgtccacttcctcgcaggcgatgcgcgccacgatctgctcggcaccgccgtgaccgccgggcagaaactttgttaccttcagcccagtgttctcctcaatcaagcggccggtcgtgccggtagccagcagacggtgctgctccaaaatatggcggtaggccatacaaaactgcaccatcagctcctttttggagtcgtgggctatcaatgcgatcgtcatagaaaatgccaccatccttcgcagcagaattacaagttaaaaggtaagcggaacgcgctgtccgcacaaacgttttgccatagcctgtccggccgccacggcggggtcgcccgcgggcggcacggtgccgttggccccggccagctgcagtacgcggctttcgggtatcacggctagcaattgggcacccacggtgtcaatgcactcatccaggtcagccacagcggcgtttttgccaaagctctcgcgcctgacgcggttcatcaccaaccgcacggcgctttgggggcgtgccccggccagcagccggtccgccacaattttgccgtcgcgcagggcgactgggtcgggggtcagcaccagaagggccttgtccgccacggcggcggccgccgtgaacggcgcacccatcccggcggcggtgtccaaaatcacaaaatcgaaataggggcgcatggcgaccagaagccgccccaggggtgcagcatccaccgcgccgccctcatagggggcgctgatgaccgacagcccagggtaaagcgggctgggcacaacggccttggccccctcgcatcggccgcagaggacatcctcaatgtcatagacggtgcggccgtagacgcctgcaataatgtccacgctgcgcagacccgaatccagctcaatgagcaggaccttccgccccagccgcgccaaacaggcccccagcagcaccgaaaccgtgcttttgccggtgccgcctttgccggagcagaccatgatacactgtgcgttcatgtcggctcccttccgcagttgtgcaacactatctcccgtatattctagcacatttccggatgaactgcaactggctttttgtcagaaaaggacaccttctttttgaagaaaatcacgataaggtatactttttgatgcacaaatatggataaaatgcacaagaaatagcgatgggctgcgaaaaaatggaaacgtttcatatcccgaacacggcgtccagcaccgcccgcaggatgggcgcggcgttggccccgcccccaccgtattccagcacg

SEQ ID NO: 793 - DNA, 22328 bp, synthetic construct
  misc_feature 1..22328: note = Synthetic
  source 1..22328: mol_type = other DNA
agcgtgcgcatggcgggcagatcaagcgcaccctccggcgtcagtgtgccgatgacgaagccatccgccccggcactgcgcagcgtctcgatctggcggcagagcagctcgagctcgtcgcgggtgtacaggaaatcccccgcccgcgggcgcatcaggcagcgcacgggcaggtccaactcggccttgatctgccgcagcaggtcggcgtagggcgtcaggccgcccacggccagtgcgctgcaaaattccagacggtccgctcccccctgctttgcggcgcgggcggaggcgaggctgtcaacgcagacttccaacagcttcatgtcaggtcacatccttttgctttttccccattgtaacataggctttgggatacggcaagccccgcgcggccagagctgcgcggggcttgccgcagttataaggttcacaacaaataggggtaggcagattcaggcagcgtgcccgctgcgcacaacgcacagttgtacggcggggcggctggtgcgggcaggtacggccctgcgcggctccgctgccggggtgcccagcaggatgccgcaggctgcgttgagcatgacaaccgcagcaaaaagtcccagcagtgcagcccacagcggcatggtgccggaggccgcggcgctcaccataacgccgcccagcaggagggacgccgttaccacgagcctgcaaaatttgtgcttaatgagttcccagttcataccgttacctccaaaggagccggccccgcaatggccgactgccgcaaattcaacaacggataacagcgttccgtttgttgtcttaactataatacatctgtaggttgttgtcaatatgtttttacaacttatttttgaaaataattgcaaaaaactctttacaaaaaccacagacggttgtataatgaagctaaagaaatgggatcgtctacaagatgtggttttaccctactttatataaaggagttttcccgatgtttgcagagcgcttgaaagaggcccgcaaggccaaacgatacagccaggccgaggtatccaggatgctgggagtaacgcagcaggctgttggcaagtgggagaccgggcgttccaccccggatccgcagaccgtggcgcgtctggcggagatactggatacccccaccgacgttctgctgggtctgcgcaaggagccgggcgcggcgtccgctgtgggccgcaacgccttcagccgctatacggagtcccagatccccgtcgtgggcacggtgcgcgccggatacggggccctcgcgtttgaggaggactacggcaaggagtatgcctgcgtcaaggacccggaaaactacttcttcctcgtcgtaaagggcgacagcatggaaccgcgcatctctgacggtgacctggcgcttgtacaccgccagaacacgctggacaacggcgatctcggcgttctggtctacggggcagacggcgagggcacgctgaaaaagtacatccagcgcggcaactcggtcatcctgcaccccttcaacccggcctatgaggagctggtcatcaagggcgaggaactcgaccacctgtatattgccggcaaggtcgtggagaccaaggccaagtggtaaggctgccttacaagttcaattatagcatacggtaagtcccataatttggactttcaaccctaaaacagaagaaatttacaaaaatgctgcccgcggcacaccttgcagaacaaggatatgcggcgggctgtattttttataccttttttcaggaggcgggcgcgatggaccttgcggaaaaactggaaatcctggcggacagcgccaaatatgatgtagcctgtacctccagcggggtggatcgccccggacggcacggtgcactgggcagcagtgcggcggcgggcatctgccacgccttcacggcggacgggcggtgcgtctccctcctgaaggtgctctactccaacgtgtgcagctacgattgcagctactgcgtcaaccgccgctccaacgacagaccccgcgcgaccttcaccccgcgtgagctggcggagctgaccatcggcttttaccgccgcaattatattgaagggctgtttctgtccagcgctgtgctgggcacgccggaccgcacgatggagctgatgatcgaggctctgcgcatcctgcgggaggagtaccattttaacggctacatccacgccaagacgatccccggcgcggacccgatgctggtcgaaaagatcgggcggctggcggaccgcctgtcggtcaatatcgagctgcccagcgagacgagcctgaccacgctggcccccgacaaaaagaaaactgcgatcctgcgccccatggggcagatcgcagtgcagagtgcgcagagcaaaaaggagatggtgctctaccgcggggccaagccgtttgcgccggctgggcagagcacccaaatgatcatcggggcgacgccggagacagaccgccatatcatggacctgactgagggactctacaggaaatactcgctgaagcgcgtattttactcggcctatctgccggtggtggaggatcgccgcctgcccgcactgcacacggcccctcccctgctgcgggagcaccgtctgtatcaggcggactggctgctgcggtactaccatttttcggcccgggagctgctgaccgaggacgagccgaattttgacccctacctggaccccaagtgcacctgggccgtgcgccacccggagtttttccccgtggaggtcaacacggccagccgtgccgagttgctgcgggtgccgggcatcggccccaagagtgcgctgcgcattgtcgaggcgcgccgggtgcaaagcctcggcatggcagagctcaagcgcattggagtcgtgcttaagcgggcacagtatttcattacctgcaagggcaaggcagcggcccgcggcagccgcgcggagatcgcgggggcgctgcttgaccccaaggcgttcagcgtggggatgcagcagctttcgctggatgattttgtacccaaggccctgcccgacgctgccccggctgtgcaaaggctggaggcgcgcggcatggcggcggacgtggccgcccggacggtgcggcaggaggcactgcaatgtcttacgaagcgcatgtgaccgacacagcctactgctatgatggcagctttgcgggctttttgtgctgcgtgttcgagagctacgcccggaaggagattcccgccgaggtctgcccgcccgaggagggacagctgaatttcttcggcacgcggcagatttttaccgacgagcagcacgcgcggcgggtcgcggcagggctggaccggcttggccgcgaggtgaaggaccgcgtgacgacgggctttctctgcaccgaccccggcaaggacctgacactgctgcggtttgtgcggctctgctttgcgcaggggccgcgcgccgcacagatgctgggcgacccggacgccgccgcggcgtttgccttagagcgggctgtcgacaacgaggtttgcaggctgatcgagttcatccgctttgaggagcgggacgggatgctcggtgcggtcatccacccgaagcaccggattttgccgctgctgcgcggacatttttgcagccgcctgcccgatgagagcttcctgatttatgacgcggcccacggcacggctctgctgcaccgggacggccaggtgcgttatctggcgatggagcgctatattcccggcgccgacgagacagagctcgactggcagcggatgtggaaacggttctttaaggcgttgaccatcgagcagcgccgcgacgaaaaggcccagatgagccatgtgcccaagcggttctggcaggatatgtgtgagatgcagcctgatttggcttcctccgcgggggcagctgtccgcaaagcggactgaggaggggcgggcttggagctactcatagtcatactccgggttcgcggcctggtactcggtcagccagcggagcagacgctcggtatcggcataggtcatgcggcctgtgtcggccagggcgcacaccatggcgcggatgtcaccgccgtagagcgtctgcagatgcgcctggctgacagcgccgcagtaggtcaggcggcggaccagcggcgtgtacagatttttattgccctgcttctcggtgcggacgaagtttttcttctcgagccgcagcaggaaattgagcagcgtcgagtctgcccagcggcattcgggcggcaggtgtgacgcgatctcgcgcctggtggcggcgcggctgcaggcccagagcgcggccatgacctgttcttcactgcgggaaagctgttccatgatgaactccttttataatatgtagtgcctgtaggggccgggcatgcccggcccgcaggtgcaaggcagacggtagtctgtgggaaggctgcgggccgcacatgtgcggcccctacagagcgaggaagaaataagtttgatattttacaaatgtggtaataagaactgaatatattttacaactgtggtaaatataaatgcaagacaaaatattgcacaaattttgtgcccggaatttgacaatggcggcaaatatcttttacaaatgtcttataaagcgtttccggtacaaaaacaattagtcacaatacaaaaacacatccccgattttcggcttttttcggtattttgtccgcttgcccgcaggggggcaaagctcctataatattggcataccgcaacggcgtggcagatgcgatccgccgccggcgggtcgcatttgatttactgtaggaggaaataaagatggctagagtttacaatttcagcgccggcccttcgatgctgccggaggctgttctgaaaaccgcacaggcagagctgctggactaccacggctccggcatgagcgtgatggagatgagccaccgcagtaaatggtttgacgagatcatcaccaacaccgaggccgccatgcgccgggtactgaacattcccgacaattataaggtgggctttttccagggcggcgcgacccagcagtttgcgatggtgccgctgaactttatgaccaccggaacggcggattatcttgtgaccggcaacttcagcaagaaggcagccgaggaggccgccaagttcggcacggcccgcattgccgccagcagcaaggacaagaactttacctacatccccgacgtcgcggccatcgactatgacccgaacgccagctatatccacatctgccagaacaacacgattttcggcacaaaatatgtcgatgtaccgcaggtggacggcatcccgctggtggcagatatgagctcgatgatctgctccgagccggtggacgtaagcaagtacggcgtcatctacttcggcgtgcagaagaacattgcccctgccggtatggctgtggccatcgtgcgtgacgacctgctgggcaaggccgccaagggcctgacccccgacaagatccccacgatgatgaactacacgaccctgctgaacgccgacagcatgtacaacaccccgccgtgctggtgcatctacatgaccggcctcgtcatgaactaccttgagaacgagatcggcggcctggagaacatgcagaagcgcaatgccgccaaggccaaggtgctgtacgattacctcgacgggcaggacttctacaagaatcccgttgagaaaaagtaccgcagcatgatgaatgtgaccttcaccagccccgacgccgacaccgacaaggcgttctgtgccgcggccaccgaggcaggcttcgtcaacctgaaggggcaccgtctggtgggcggtatgcgtgcgtccatctacaacgccatgcctgccgagggcatcgacaagctggtcgactttatggagaagttccgcagggagcattgagctgctgcacagtaggggtcgggtgtgtccggcccctacggcgcaaaataaggggaacagggagtaacgatatatgtataccatcaaaacattgaacgccatttcgccggtgggtctggccaagctgcccgccaaccagtttgagatcgacaacgaggccgctgcaccgcagggcattctggtgcgcagcgccgatatgcacgataccccgctgcccgacagcctgctggccattgcccgtgcaggtgccggtacgaacaacattcccgtggaggactgcacgaacaagggcatcgttgtgttcaacacgccgggcgccaacgccaacgccgtggccgagcttgtcgtcggtgcgctggtcgcgggcagccgcaatctggtggatgccgtgaactgggcgcagaccctcaagggccgcgacacgattgccaaggacgtggagaagggcaaaaaggccttcgtcggtcccgagctgcgcggtaagacgctgggcgtcatcgggttgggtgccatcggtgcgcgcgtggccaacgccgccgtcgcgctgggcatggaggttttgggctatgacccgtatatttccatcgatgctgcgtggagcctgtcccgaagcgtgcagcactgtgtcacgctgggcgatatgctgccccgctgcgactacctgaccatccatgttccctacctgcctacgacccgccacaccatcaacgcccagacgctggcgatgtgcaaggacggcgtgcgcgtgctgaactttgcccgcggtgagctggtggacaacgccgcactgctcgacgcactgaacagcggcaaggtcgcgcagtatttctgcgacttccccaccgaggagctgctgggcgtcaagggcgtctgctgcacgccgcatctgggtgccagcacgccggaaagcgagacgaactgcgccgtgatggccgccgccgaactgagcgactacctgaaaaacggcaacatatcccacagcgtcaacctgccggatgtcagccagccgcgcgtgggaggccgccgcatctgcatcatccacaagaacgctccgggcgcgatctcggccatcacgagcattttgaccgaagcacacctgaacattgaaaacatggtgaacaagggcaaaaaggatgtcgcctataccctgctggacgtgacgggcaatgtcaccgatgacctcgccgtcaagctgggtgcgattgagcccgccatccgcgtgcgcgtgctgtaaaagcatcaactttgcgaaatctcccctgctgaaccaatcagcaggggcttttttgtggatgataaccatgaaatagaatgaatcgctcgcggagacgcgggcggtttttgttctctttgcccaaaaaccaaacaaaacggaacaatcgcccgaatacggctttttttgcggtgggttttatggtagaatcaatgagaactcaaaaaaatgcagagggagggccgcagcatgaccaacgcgccgaaaaccgtattagccatccatgacctgccgggctttggccgggcggcgctgtcggtcatcgtgccggtgctctcgacgctgggcgtgcagaccgtggcactgcctacggcggtgctgtccacccacacggggggcttgggcaccccggctaagctggccaaccccggctacggtcccgcagcactggaacattatcatcggctgggcgtgaaatttgactgcatctactcgggctatctggcggatgccgcgcaggcaaagctcgtcgagcaggcgtttgagctgtggccccgcgcgttcaaggtcgtggacccggtgctgggtgacggagggcggctgtacagcggcctgggggccgacatggtgcccgctatgtatagtctgtgcagcaaggcggatctgatcgtccccaatgtgaccgaggccgcgctgctgctgggcgacccgctgcccggtgtgggcagtgccgagcaggccgccgcacaggcggcccggctgacccgtgtggcgccgcaggtcgttgtgaccggcgtgacgggcattggcggcggacgctacataggctgtgtgggcgcggcccgcggcggcgagggctatgccgtaaaaacgccgctgcagccgcggatgttccacggcacgggcgatatttttgccgccgtgctcgtcggacgcattttgcggggcaacgtcccccaggctgccgtacaggcagctgccgccttcgtagccgagtgcatcagacagacgcccgagggagccgacgagcggctgggcgtctggctggagaacgccctgccgaaactgcggcaggagtaaaaagcagagcgctccgcagccgcgaacgggcacggggcgtcggggacgccgccccctacaacgcggcagcggcggtgcggcagccggaggactggccgccctacaccgcaggggcggattccccatccgcccgcccctcccccaagggagggctaaagttatagaacgaggacttgtaaatttatgccaaccttaaacattgtattggtcgagccgcagatcccgcagaactccggcaatatcgcgcggacctgcgcggtgacgggagcgcggctgcatatagtcggcccgatgggctttaccatcgacgacaaaaaattaaagcgcgccgggcttgactattggcaccagcttgatataacatattatcaagatcaggcggacttttttgccaaaaacagtggtccgtttttctacttcacgtccaagggcccgcgccgccatgtggatgtgacctaccccgacggcgcgtatctcgtctttgggcgcgaggatgccggcctgcccgaggagctgctggccgcgcatgaggccgactgcgtgcgtatgccgatgcgcaggggcgagcgctgcctgaacctgtccaacgcggtggcagtgggcgtgtacgaagcattgcgtcaatgggattttgccggtttggagacccacgggcagttgacccgatacgaatggagtgaggatgtaaaatgagcaagataggttttctgacagattcctgttccgacattccgcaggagcttgcggataagtacggcatcgaggtcgtgggcttccccatcaaccttgacggtgtggagtacatggagcgcaaggactttaccaacgaccagttttaccagatgatgcgcgacgcccagggcgtgcccaccaccgccgccatcacccagctgcagttctgcgatatttacgcccgttatgcggacgagggctacaccgacctggtgtacctgagcatcaacgcgggcggctccagcacctacaacaacgccgtcaaggccatggagctgttggaggaggagcgccccggctacacgatgaagattcaggtcatcgacagccacacctactcgatgccctacggctggtatttctgtgagtgcgcccgcaaggtgcgcaacggcggtgagctggcctcctgcgtggccgagctgaagcagaagctggactgcgttgagatctgtctggccgcctacagcctgaagcagatgaagaagtcgggccgcgtcagcgccgccgccgctgtggtcggtgacctgctgggcatccgccccatcatcagcctgaatgcgggcgtctccaaggtcgagagcaaggtccgcggcgacgccgccgtgcccgccgccatgatcaaatgggtggagagccgcgtcgattcgatgaaggacacgccctacatggtggcctacacgtccagcaccgccaagcgtgacgagctggtcaagctgtgcaaaaaggcgtttggccatgcaccgctgatcgtgttccagctcggcggcgttgtcagcgccaacaccggccccgacggcatcgccatcgtctacgagggcaagccccgcaatctcgaggcttatgcgccggagctgccgtaatatttttcggcagcataggtaaggtcttgcactttgtctgacaatgtagtataatacagacagttcttataccataccaagaactattatggttgctatgataaggtcataggaccgtaaagctctgacgccctgctatttggcagggcgtcatcttttttgcctaaatttcgtttaaattgtcagttgcccaataatgccatagtgcgctatgatagtagaaaagtgaaaggatgtgcaaaaaaatgaagcatccctatggaattggtctggatattggcattgcgtccgtcggctgggcggtggtggcactgaatgaaaacgcggagccctatggtctgatccgatgtggctcacgcatatttgataaggccgaagaaccccaaaaaggcgacagccttgctgccccgcgccgtaaggcccgcagcgcccgccgcaggctgcgccgccgcagcctgcgcaaggcggatctgtacgagctgatggagaaaaacggtctgcccggtaaggcggaaattgagcaggctgtgcaagcgggacatctgccggatgtctatgcgctgcgtgttcaggcgttggatggcccggtgacagcactggattttgcccgtatactgctgcacctgatgcagcgcaggggctttcgcagtaaccgcaaggcagacgatgcacaaaaagacggtaagctgctgcaggcaattgacgcgaacacccgacgtatggaggcaaaccggtaccgtactgtcggtgagatgatgtaccgcgaccctgtgtttgcagagcacaagcgcaacaaagcggaaaattatctttccaccgtcaagcgcgaccaaatcatagacgaggccagactggtttttgcagcacagcgtcaatacggtgcgacatgggcttcgccggagatggaggcagagtacctttgtattctgacacgccagcgctcctttgcggaaggtccgggcaaaggcagcccgtatagcggcagcaacagggtcggcacctgcacgctggagggaaagagcgagcagcgggcagccaaggcggccttctcgtttgaatattttacgctgctgcaaaaaatcaatcatatccgcattgcggaaaacggaaccagccgcacgctgacaccggcagagcgacaggtactgctttctgtgtgctgccagacggacaagctggattttgcccgggtccgcaaggcgttggcactgccggaagaagcacggttcaacatggtgcggtatcgcggggagcagacggcagaagcctgcgaaaagaaagaaaaaataacggcactcccctgctaccacaagatgcgtaaggcactgaataccctgcggaaggatcatatccgcaatatcagccgcgagcagctggatgccgccggtgctgcgctgacgaacccggaaaacgaggataagctgcgggaggcattgaaacaggcggagtttgaaccgctggaaatagaagcactgctgacgctgcccagctttgcgggatatggacatatttcggtcaaggcgtgccgcaagctgatcccctatctggaacagggcatgaactataacgatgcctgccaggcagccggatatgattttcagggaagtcaaaacggcgaaaaagcgcagttcctgccggcctcaacggaggaaatggaggatattacaagcccggtggtgcgccgtgcagtggcacagacgatcaaggtcgtcaatgcgatcatccgcgagcagggcgaaagcccggtcagtatccatctggagctggcaagagagatgaataagaacttccagcagcgcagcgagttggacaaggcgatgcgggataacagtgcggaaaatgaacgcctgatgaaagagctgaatgagctttttccgggacacaccgttaccgggcaggaccttgtaaaatatcgtctgtggaaagagcaggacgggcgctgtgcgtattcgatacagccgttggagctggacaaggttattacagtctccggctatgccgaggtagaccacattgtcccctatagcataagctttgatgaccgccgcacaaataaggtgctggtgctggcatcggagaaccgtcagaagggaaaccgtctgccgctgcaatacctgcagggaaaacgacgggacgactttattgtgtacaccaaagcaaacgtaaagaatttccgcaagcgccagaacctattgaaggaaaggctgagcgaggaggacggaaagggctatatccagcgcaacctgcaggatacgcagtatattgcggcttttatgctgaactatatccgcaatcatcttgcgtttgcagactgttccggggcaggcaaacggcgggtcgttgcggtaaatggcgccgttacggcgtttttgcgcaagcgctggggccttggcaaggtgcgtgccgacggcgatctgcaccatgcagcggacgcggcggtcattgcctgtacgacacaggggatgataaagcgggtatctgacttttgcaagcgtgcagagacgacggcggtgcgtaatgagcacttccctgaaccttggccgcacttccgtgatggctgaggcagcgattgtcggcctgcccgcaggaaaatttgatgcagatcaacccggtctattatgcgacggtggatatttcgtctattcagcctgtgtttgtatcgcggatgccgcgccataaggtgacaggtgcggcacacgaagagacgattcgaagccaagtgaacgaaaaatatacagcagtgcgaaaatcaattacagaattgtcactggataaggatggaaaaatcaaagactattttaaaccaagcagcgatacgcttttgtacgaagcactgaagaagcgtctgacagaatttggcggaaacgcaaagaaagcctttgcggaaccgttttataagccacgtgcggacggaacccccggtgcacaggtgcgcaaagtgaaggttgtcgcaaaaatgaacaacacaattcctgtccgcagcggcggaggcgttgcaaaaggcggcgacatgatccgtatagatgtgtattatgtccccggtgatggttattattgggtgccgatttatgtggcggatacggtgaaagaaaccttaccgaataaggcggttgtgcgagacaaaacaatggaagagtggaaagaaatgaaagaagatgacttcctgttctcactttatagcaatgaccttattttagtggaaagagataaaccaatctgcttttcacttatgcatgaagatagcacacttccgaaaaagtatgagacgaagaaggaactggtttattacaaaggcggagatatatcaaacggaggaattaggatagaaacccatgaaggggcatacttccttaaaagtttgacgtttggcatagtacaaaaagttcagaaatatcaggtcgatgtccttggcaattatacccctgttaaaaaagaaaaacggcaaaccttccctgcccaacggaggtgaattatgtcctaccgctgcctgatgatcgtgaaccctgcgcgcatccgctgcaaaaatgagcagctgttgattgaaacggaagaagttcactctgtgcccatcgaggacatcagtgccattgtactggaaagccgccaaagcacgatcacaacagcggctatggcggcgctggcacaaaacggtgtggtgactttctggtgcgatgaaacacatctgccgtgcggcatctcgctgccgtttgcacagcacagccgtcagctgggagtactgcgctggcagatggaattgaccctgccggcaaaaaaacggatgtggcagcaggttgtgacagcaaaaattcaaaaccaagcggagtgccttgcactttgcggcaaaacacaggaggcggcgtttctattcgggcgtgccaaggctgtgacgagcggcgacaaagataacgtagaggcaagcgccgcagcgtactactttccggctttatttggtgagggctacacccgccgcaacgaggatacgcgaaatgcagcactgaattatgcctacgcgattttgcggggctatatggcgcgctgcctgacggtgtatggttttcagccgtgcctgggtctgcaccatgacagtgagctgaaccagtttaatctggcggatgacctgatggagccgttccgacccgtggcggatttgtacgtggcagcaaatgtggccgaggatgcagcattgacacccatactgaagggaaagcttgtaaacctgttgaatgcggatattctttccggcgggcagcaccacagcgttgcctatgcaatggaacgcctggtgcaaggtctgcgtggacaagccctgctgttacccaaattgcttgaatacaagcagcatagctatgagtaaatttatgcggatgattgtcttttttgacctgcctgtgcagacaaagactgaaaggcggcatgcgacggcgttccggaattttttgctgaaggacggataccacatgctgcaattctctgtgtacgcgagggtgtgcaacggcaacgacgccgtgcagaaacacgaaagccgtttgagggcatccttgccgccaaacggctccattcgcctgcttgtcgttacagaaaagcagtaccagtctattcagattcttctgggaaattatcagccggaagaagccccttttgtatgtgaacagttgagttttttctaaaacaaaaagcgcatcggaccgcaatccgatgcgctttttgcatagcctattataccataccaagagctattagggaactatgacgaaagatacagagcggagcggtgtcagtgggattataccataccaagagctattagggaactatgactaaagtggagcagtactatacggttcaagtattataccataccaagagctattagggaactatgactcagcacaaacagggtacagtcgagggtcggattataccataccaagagctattagggaactatgacgaagttcaacgaagatgtcctcattgacagattataccataccaagagctattagggaactatgacttcttccggcggcatattccagatataccggattataccataccaagagctattagggaactatgacaaggtggtcaagttcatcggctatgacgctattataccataccaagagctattagggaactatgactgaaacgccggagcaggcggaagccatcggattataccataccaagagctattagggaactatgacgcgctacacaagctgggacgtcgccattctattataccataccaagagctattagggaactatgacgcgtgaccgccgattccgcagagatgaaatattataccataccaagagctattagggaactatgactgtcgcactcacaggggcgggcggcgtattattataccataccaagagctattagggaactatgatttaccccttactccggcagctcctcctactattataccataccaagagctatcagggaactatgattttcggataatcgataatgcactccgatgtattataccatatcagcacaatatgcgcagaatctaccacaaattttccccgcaggtcttgcaacggcctgcgggttttgttataatttaggtttgttgagcaacttaggattttaggctccgctgccggctgctggtcggcagcgcaaaccccgcaaggctggcggtcttgcgtgtggtcaaaatctatccgccggagtattgtatgaatatgaaaaatctgtccgtccgtcgtcttgtgcgctgcgctgtcattgcggctgtctatgtggtcgtctgccttgtgctggccccgttcagctacggcgcggtgcaggtccgcgtggccgaggccctctgcctgctgccggtgttcggcgccgagtatatcgtcggcgtcacgctgggttgctttttggcaaatctgctcggctccaccgtcgttgacgtggtgttcggcacgctggcgaccctgctggcctgccttgtgacctacaagctgcgcgacatccgcgtgaaagggctggccattccggcatccctgccgcccgttgtctttaatatgatcattgtcggcgcgttcgagatcaccttcttcttctcggacggcgcacccacggcgatgctggcggtgttcaatgccgttactgtcggcattggcgagctcatcagctgcacgattctgggtgtggcgctcgtcaagctgatcgaaagcaacgcgggtctgaacaaaatttttacagaagaataacgaggtaacatctatgtgcccggaactgattttgtgggattggaacggtaccctgctcgatgatgtcgatctctgcgtggacgcgctcaaccgtctgctggcaggattcggctacccgcagcggtatgaccacgagcggtaccgggccatttttggctttcccatcgaggaatattacgtccgcgcggggtttgactttacaaagcacagctttgcagagctggccgaaaaatacatggaggactacgtccccgccagtgcggcctgcccgctggcagacggcgccattgacgcgcttgaggcgtttaaggccgcggggctgcggcaggtcattctgtcggccagcaatctggacacgctgcggcgtcagaccgacgagcgcggcgtgacgggctattttgaccgtctgctgggtctggacgatatctacgccaagagcaaggtcgaggtcgggctggcctatttaaaggaaaacggctttgacccggcacgcgccgtcatgatcggcgattccgtccacgactatgaggttgcacaggcgctgggtgtgcgctgcgttttgcagtccggcggccaccagccgacggaaaaattgagggaaacaggcgcaccggttgtaaagggattgcgcgaagccgcggcgctgattttggaataagagcttacgggaggctgtaggagcggatgcttgcatccgcccgcggggcgtcgaggacgccgcccccccgcaagcaactgcccgccgttatgatgcgggtcgatgcgagcaacgacccctacaacagaggagcaacacaatgtctgaccgcataaaaggctccgccttgacgatgggcggcgcggcgtgctggggcgtttcgggctgcatggggcagtacctgttcacccgcgaggggatggattcgacctggctcgtgcccatccggctgtttctggcggggctgatcctgtgcggattcttttttataaaggaccgcaaaacgctttttgacccgtggaacgtcaggaaaaatccgcgcaacgccattgacctgctggtctacggtctggcgggcgtcagctgctgccagttcacctactttctgaccatccagctgtccagcgcgggcatgggcacgattttgcaggacgtctcccccgtcattattctgctggtggtctgcatccagcaaaggcgcggcccccgcgtgtttgagatattctcgattgtgctggcgctggtcggcgttttcctcatcacgacccacggcagcctgaccgggctggccgtcagcccagcggcgctggtctccggcatcgtcagtgcctgctgcgtcgccatctacacgatgtggccgaaaaaattgcaggagcagtaccccacccccatgctgcagggctgggcgtttttgatgggcggcatcatgtttgcgctcatcttccgcccgtggcagatcgactatgtgccgacggcgatgggcgtgttcggcatcttcacggtcgtggtgctgggcaacgtgctggcgttcagtctgtacatgtcgggtgtgccgctcatcggcccgcagaaggcgagcctctacagctttgccgaaccggtcacggcggccatcatcagcacgctggtgctgggctcgccctttacgctgtgggatgcgctgggcttcggctgtatctttttgatgctggtgctgctgagcctgcccgcaaaacagaaaaattaaatatattacgaaatacacccgcgcaggtttgacacgaacccctgtgcgggtgtattatagtatcatgtgtaaaactatataaaaccactattagccgcacctctacacgcggcggaaaatacaggggaactgttatgtctttttttgaaaaactgttcggctctttctcggacaaggaactcaagcgcatcaacccgctcaaggacaaggtccttgcccttgagccggagatggccaagctgaccgacgacgagctgaaggccaaaaccaccgagtttaaagagcgcctcgccaaaggcgagaccctcgacgacctgctgcccgaggcgttcgccgtatgccgtgaggctgactggcgcgtgcttggcatgaagccctaccccgtgcagatcatcggcggcatcgtgctgcaccgtgcctgcatcgccgagatgcagaccggtgaaggaaagacgctggtcgctaccatgcccacctacctgaacgccctgaccggcgagggcgtgcatgttgtcaccgtcaacgattacctggcccgccgcgactccgagtggatgggcaaggtctaccgcttcctgggtctgaccgtcggtctggtcgtccacggcgtcgaggccggggaccgcaagaaggcctacgaggccgacgtcacctacggcacgaacaacgagttcggctttgactacctgcgcgacaacatggtcgtctacaaggccaacatggtgcagcgcggccatgcgtttgccatcgtggacgaggtcgactccatcctgatcgacgaggcccgaaccccgctgatcatcagcggcaagggcgaggattccagcgtgatgtacaagcgcgcggacgactttgccaagacgctgaaaaagagtgttatcgtcgagctggacgacaaggtcgaggccgaggagcaggtagacggcgattacgtcgtggacgaaaagcgcaagaccgctaccctgaccgagtccggcgtcaaaaaggccgaggcgttcttccacgtcgagaacctggccgacgccgacaatatgtcgctgcgccattacattgacggtgcgatcaaggcccgcggcgttatgcaccgcgataccgactatatcgtcaaagacggtgaggtcatcatcgtcgacgagttcacgggccgtctgatgtatggccgccgcttcaacgacggcctgcatcaggccatcgaggccaaagaaggcgtgaccgttgccgccgagagcaagacgctggccaccgtcaccttccagaactacttccgcatgtacaaaaagctgtccggcatgaccggtacagcctccaccgaggccgacgagttcagcgagatttacggcctgaacatcgtcagcatccccaccaacaagccccgcgcccgcaaggacctgccagacagcgtctacaagaccgtcaacggaaagtacaacgccgtcattgagcaggtcgccgagtgccacgccaagggtcagcctgtcctggtcggcaccgtcagcgtcgaaaagagcgaggcgctgtccaagctgctgaaaaagaaaggcatcgagcacaacgtcctgaacgcgaagcagcatgagcgagaggccgagatcgtcgcgcaggccggcaagcagggcgcggtcaccatcgccaccaacatggcgggccgcggtaccgatattatgctgggcggcaacgtgacctacatggccaaggcggcccttaaaaaggagctgtccaaggagctgactgccaacctggcagagctgaaggatgcctacgagcatgagaaggcccgcgccaaggccagcggcaccgagctgcctaccccgccggaggccggtattgatgccaaactcgagatgctgatgaccgagtgcgacggccacgccgagacagaggacgccgaaattctccatgcccgcaagcgttttgaggaactgtgcgaggaatttgcccccgaggtcaagcgcgaggcggaggttgtccgcaatgcgggcggcctgttcatcatcggcaccgagcgccatgagagccgccgtatcgacaaccagctgcgcggccgtgcaggccgtcagggcgacccgggtgcatcccgcttcttcctgagcctggaggacgatctgatgcgcattttcggcggtgaccgcgtccagagcctcatggattccctgggcctcgacgaggatgtgcccatcgagaacaagctcatcaccaacaccatcgagagcgcccagaagaagctcgaagcgtcgaactttgcaatccgtaagcaggtgctgcagtatgacgacgtcatgaaccagcagcgcgagatcatctacaagcagcgccagatggtgctggacggcgaggacatctccggcaagctgcacgagatgatgcgccaggccatcgacgatgcctgcacgaactacctgaacggcgagaccgccgacgactgggattttgccgggctgcgccgccacttcatgaactggctgtgcctgcccaccgacttcaactacaccaccgagcagctgggcgacctgacgaaggagggcattgccgacgagctgtacaagcgcggcatggacatcctgaccgccaaggaaaagcgctacggtgccaagacgatgcgcgagcttgagcgcatctgcctgctgcgcaatgttgacagcaagtggatggagcacatcgacaacatggaccagctcaagcagggcatgggcctgcgcggctacggccagcatgaccctgtggtcgagtaccgcatcgagggcttcgcgatgttcgatgagatgatcgcgtcgatccgcgaggatgccgtccacatgctgctgacgattgagatccgccagcagaacgccgagccgaagcgtgagcagatcgccaagcccaccggcgataatgcgcccggtgataccggtgccaaggccccggcccccgtccgcgtgacgaagatcggccgcaacgatccctgcccctgcggcagcggcctgaagtggaaaaagtgcacctgcaaggagtaccaccccgacctgtaagcaatacaaaaggcgctgcccgggataaggcggcgcctttgttgtaggggggcgtcttagacgccccgcagcatggccgctctctccgtaggggcggattccatatccgctcgcggaggagtcaaggcccctcccctacaatgcttttttgaatgggtagagttgtaggggccgcacatgtgcggcccgcagctttcccgcaaacgcccgcttatttttatgccgcgggccgggcatgcccggcccctacggtggcagcgtctccgtaggggcgaacatggttcgcccgcccgttcaccactttcccttttaacgaggtaacatcatgaaagcccgaatcatccgcgaaccccgctgcgccctactctggcgcattgacgaaagctaccccaactatgccgccatcgcccgcgcggccaggcgatatgacgtcaagctccgccccgtcgcggacggcgacctcggcggcatcgtcggggacctctgcgcgggcaggcccgccccagtgttcgcgccgcttatcgcggtgccggaccgcccggccatcatcgtcaacggactgcgccatgacaacggcgagttgggcgcgttccttgaccttatcaaaatgggcggcgcgtccattccggtgcgcagcatggtcacgcccaccagcaagggctggacgctggcaaacctgctgctggaattaaacaccgagcatgagaccgtgcagggcggcaacgcatgaagcgccgcctgaccgcgctgctgctggtactgctttgtctgccgctgaccgcctgccaaaagcagcaaaatttgtacagtgccacctggttcgacctgttcgacactgtcgccatcgtgcagggctatgccgacagccaggacagctggaacgcccagacacaggccatgtacagcgatttacagcgctataacgaattgtttgacatctaccaccactatgatggcgtcatcaacctgtatgatgtcaacgcccgggccgccgctgcgccggtgcaggtcagcgacgagctgtacgcatttttgcgctggtgcaaagacaccgcttaccctgccgccaacggcgcgacgaacatcgccgcaggtgcggtgctgcgcctgtggcacgacgcgcgggagagcgactcccctgccccacccgacgcggacgccatcgcggcggcgctggcgcatatcgacatagaagatctggttctggacgatgcagcacaaaccgtctattttgctgacccggagatggcgctcgacgtcggtgcggtgggcaagggctacgccgtggagcagaccgcccgggccgcacaggcccgcgggctgaccagcgccctgctgaacatcggcggcaatgtgcgcgccatcggcacaaagcccggcggcaagccctggaccgcgggtgttgagaacccctggggcgatgatcccgcgtacatacaggccgtcgagctggccgacggcgacagcctggtcatcagcggcgactaccagcgctactttgagtacgacggcgtgcggtacgcccacctgatcgatctgacgacgggctaccctgcccgctacgtcagcagcgtggccgtgctggcccgcgccgacaccggaggtttggccgac

SEQ ID NO: 794 - DNA, 16832 bp, synthetic construct
  source 1..16832: mol_type = other DNA
  misc_feature 1..16832: note = Synthetic
tccgccccggcactgcgcagcgtctcgatctggcggcagagcagctcgagctcgtcgcgggtgtacaggaaatcccccgcccgcgggcgcatcaggcagcgcacgggcaggtccagctcggccttgatctgccgcagcaggtcggcgtagggcgtcaggccgcccacggccagtgcgctgcaaaattccagccggtccgctcccccctgctttgcggcgcgggcggaggcaaggctgtcaacgcagacttccaacagcttcatgtcaggtcacatccttttgctttttccccattgtaacataggctttgggatacggcaagccccgcgcggccagggctgcgcggggcttgccgcagttataaggttcacaacaaataggggtaggcatattcaggcaacgtgcccgccgcgcacaacgagcagttgtacggcggggcggccggtgcgggcaggtacggccctgcgcggctccgctgccggggtgcccagcaggatgccgcaggctgcgttgagcatgacaaccgcagcaaaaagccccagcagtgcagcccacagcggcatggtgccggaggccgcggcgctcaccataacgccgcccagcaggagggacgccgttaccgcgagcctgcaaaatttgtgcttaatgagttcccagttcataccgttacctccaaaggagccgaccccgcaatggccgactgccgcaaattcaacaacggataacagcgttccgtttgttgtcttaactataatacatctgtaggttgttgtcaatatgtttttacaacttatttttgaaaataattgcaaaaaactctttacaaaaaccacagacggttgtataatgaagctaaagaaatgggatcgtctacaagatgtggttttaccctactttatataaaggagttttcccgatgtttgcagagcgcttgaaagaggcccgcaaggccaaacgatacagccaggccgaggtgtccaggatgctgggggtaacgcagcaggctgttggcaagtgggagaccgggcgttccaccccggatccgcagaccgtggcgcgtctggcggagatactggatacccccaccgacgttctgctgggtctgcgcaaggagtcgggcgcggcgtccgctgtgggccgcaacgccttcagccgctatacggagtcccagatccccgtcgtgggtacggtgcgcgccggatacggggccctcgcgtttgaggaggactacggcaaggagtatgcctgcgtcaaggacccggaaaactacttcttcctcgtcgtcaagggcgacagcatggaaccgcgcatctctgacggtgacctggcgcttgtgcaccgccagaacacgctggacaacggtgatctcggcgttctggtctacggggcagacggcgagggcacgctgaaaaagtacatccagcgcggcaactcggtcatcctgcaccccttcaacccggcctatgaggagctggtcatcaagggcgaggaactcgaccatctgtatattgccggcaaggtcgtggagaccaaggccaagtggtaaggctgccttacaagttcaattatagcatacggtaagtcccataatttggactttcaaccctaaaacagaagaaatttacaaaaatgctgcccgcggcacaccttgcagaacaaggatatgcggcgggctgtattttttatacccttttttcaggaggcaggtgcgatggaccttgcggaaaaactggaaatcctggcggacagcgccaaatacgatgtagcctgtacctccagcggggtggatcgccccggacggcacggtgcactgggcagcagtgcggcggcgggcatctgccacgccttcacggcggacgggcggtgcgtctccctcctgaaggtgctctattccaacgtgtgcagctacgattgcagctactgcgtcaaccgccgctccaacgacagaccccgcgcgaccttcaccccgcgtgagctggcggagctgaccatcggcttttaccgccgcaattatattgaagggctgtttctgtccagcgctgtgctgggcacgccggaccgcacgatggagctgatgatcgaggctctgcgcatcctgcgggaggagtaccattttaacggctacatccacgccaagacgatacccggcgcggacccgatgctggtcgaaaagatcgggcggctggcggaccgcctgtcggtcaatatcgagctgcccagcgagacgagcctgaccacgctggcccccgacaaaaagaaaactgcgatcctgcgccccatggggcagatcgcagtgcagagcgcgcagagcaaaaaggagatggtgctctaccgcggggccaagccgtttgcgccggctgggcagagcacccaaatgatcatcggggcgacgccggagacagaccgccatatcatggacctgaccgagggactctacaggaaatactcgctgaagcgcgtgttttactcggcctatctgccggtggtggaggattgccgcctgcccgcactgcacacggcccctcccctgctgcgggagcaccgtctgtatcaggcggactggctgctgcggtactaccatttttcggcgcgggagctgctgaccgaggacgagccgaattttgacccctatctggaccccaagtgcacctgggccgtgcgccacccggagtttttccccgtggaggtcaacacggccagccgtgccgagctgctgcgggtgccgggcattggccccaagagtgcgctgcgcattgtcgaggcgcgccgggtgcaaagcctcggcatggcagagctcaagcgcattggagtcgtgcttaagcgggcacagtatttcattacctgcaagggcaaggcagcggcccgcggcagccgcgcggagatcgcgggggcgctgcttgaccccaaggcgttcagcgtggggatgcagcagctttcgctggacgattttgtgcccaaggccctgcccgacgctgccccggctgtgcaaaggctggaggcgcgcggcatggcggcggacgtggccgcccggacggtgcggcaggaggcactgcaatgtcttacgaagcgcatgtgaccgacacagcctactgctatgacggcagctttgcgggttttttgtgctgcgtgttcgagagctacgcccggaaggagatccccgccgaggtctgcccgcccgaggagggacagctgaatttcttcggcacgcggcagatttttaccgacgagcagcacgcgaggcgggtcgcggcagggctggaccggcttggccgcgaggtgaaggaccgcgtgacgacgggctttctctgcaccgaccccggcaaggacctgacactgctgcggtttgtgcggctctgctttgcgcaggggccgcgcgccgcgcagatgctgggcgacccggacgccgccgcggcgtttgccctggagcgggctgtcgacaacgaggcctgcaggctggtcgagttcatccgctttgaggagcgggacgggatgctcggcgcggtcatccacccgaagcaccggattttgccgctgctgcgcggacatttttgcagccgcctgcccgatgagagcttcctgatttatgacgcggcccacggaacggccctgctgcaccgggacggccaggtgcgctatctggcgatggagcgctatattcccggcaccgacgagacagagctcgactggcagcggatgtggaaacggttctttaaggcgttgaccatcgagcagcgccgcgacgaaaaggcccagatgagccatgtgcccaagcggttctggcaggatatgtgcgagatgcagccggatttggctttccccgcgggggcagctgcccgcaaagcggactgaggaggggcgggcttggagttactcatagtcatactccgggttcgcggcctggtactcggtcagccagcggagcagacgctcggtgtcggcataggtcatgcggcctgtgtcggccagggcgcacaccatggcgcggatgtcaccgccgtagagcgtctgcagatgcgcctgactgaccgcgccgcagtaggtcaggcggcggaccagcggcgtgtacagatttttattgccctgcttctcggtgcggacgaagtttttcttctcgagccgcagcaggaaattgagcagcgtcgagtctgcccagcggcattcgggcggcaggtgtgacgcgatctcgcgcctggtggcggcgcggctgcaggcccagagcgcggccatgacctgttcttcactgcgggaaagctgttccatgatgaactccttttataatatgtagtgcctgtaggggccaggcatgcccggcccgcaggtgcaaggcagacggtagtctgtgggaaggctgcgggccgcacatgtgcggcccctacagagcgaggaagaaataagttcgatgttttacaaatgtggtaataagaactgaatatattttacatctgtggtagatataaatgcaagacaaaatgttgcacaaattttgtgaccggaatttaacaatagtggcaaatatcttttacaaatgtctcataaagcgtttctggtacaaaaacaattagtcacaatacaaaaacacatccccgattttcggcttttttcggtattttgtccgcttgcccgcaggggggcaaagctcctataatattggcataccgcaacggcgcggcagatgcgatccgccgccggcgggtcgcatttgatttactgtaggaggaaataaagatggctagagtttacaatttcagcgccggcccttcgatgctgccggaggctgttctgaaaaccgcacaggcagagctgctggactaccacggctccggcatgagcgtgatggagatgagccaccgcagtaaatggtttgacgagatcatcaccaacaccgaggccgccatgcgccgggtactgaacattcccgacaattataaggtgggctttttccagggcggcgcgacccagcagtttgcgatggtgccgctgaactttatgaccaccggcacggcagattatcttgtgaccggcaacttcagcaagaaggcagccgaggaggccgccaagttcggcacggcccgcattgccgccagcagcaaggacaagaactttacctacatccccgatgtcgcggccaccgactatgacccgaacgccagctatatccacatctgccagaacaacacgattttcggcacaaaatatgtcgatgtaccgcaggtggacggcatcccgctggtggcagatatgagctcgatgatctgctccgagccggtggacgtcagcaagtacggcgtcatctacttcggcgtgcagaagaacattgcccctgccggtatggctgtggccatcgtgcgtgacgacctgctgggcaaagccgccaagggactgacccccgacaagatccccacgatgatgaactacacgaccctgctgaacgccgacagcatgtacaacaccccgccgtgctggtgcatctacatgaccggcctcgtcatgaactaccttgagaacgagatcggcggcctggagaacatgcagaagcgcaacgctgccaaggccaaggtgctgtacgattacctcgacgggcaggacttctacaagaatcccgttgagaaaaagtaccgcagcatgatgaatgtgaccttcaccagccccgacgccgacaccgacaaggcgttctgtgccgcggccaccgaggcaggcttcgtcaacctgaagggtcaccgtctggtgggcggtatgcgtgcgtccatctacaatgccatgcctgccgagggcatcgacaagctggtcgactttatggagaagttccgcagggagcattgagctgctgcacagcaggggccgggtgtgtccggcccgcggcactgtggcagccacccgtgagagggtcactgcgtaaggctgagggccgggcatgcccagcccctacggcgcaaaataaggggaacagggagtaacgatatatgtataccatcaaaacattgaacgccatttcgccggtgggtctggccaagctgcccgccaaccagtttgagatcgacaacgaggccgctgcaccgcagggcattctggtgcgcagcgccgatatgcacgctgccccgctgcccgacagcctgctggccatcgcccgtgcaggtgccggtacgaacaacattcccgtggaggactgcacgaacaagggcatcgtcgtgttcaacacgccgggcgccaacgccaacgccgtggccgagctcgtcgtcggtgcgctggtcgcgggcagccgcaatctggtggacgccgtgaactgggcgcagaccctcaagggccgcgacacgattgccaaggacgtggagaagggcaaaaaggccttcgtcggtcccgagctgcgcggtaagacgctgggcgtcatcgggttgggtgccatcggtgcgcgcgtggccaacgccgccgtcgcgctgggcatggaggttttgggctatgacccatatatttccatcgatgctgcgtggagcctgtcccgcagcgtgcagcactgtgtcacgctgggcgatatgctgccccgctgcgactacctgaccatccatgtcccctacctgcctacgacccgccacaccatcaacgcccagacgctggcgatgtgcaaggacggtgtgcgcgtgctgaactttgcccgcggtgagctggtggacaacgccgcgctgctcgacgcactgaacagcggcaaggtcgcgcagtatttctgcgacttccccaccgaggagctgctgggcgtcaagggcgtctgctgcacgccgcatctgggtgccagcacgccggaaagcgagacgaactgcgccgtgatggccgccgccgagctgagcgactacctgaaaaacggcaacatcgcccacagcgtcaacctgccggatgtcagccagccgcgtgtgggaggccgccgcatctgcatcatccacaagaacgctccgggcgcgatctcggccatcacgagcattttgaccgaagcgcacctgaacattgaaaacatggtgaacaagggcaaaaaggatgtcgcctataccctgctggacgtgacgggcaatgtcaccgatgatctcgccgtcaagctgggtgcgattgaacccgccatccgcgtgcgcgtgctgtaaaagcatcaactttgcgaaatctcccctgctgaaccagcaggggcttttttgtggatgataaccatgaaatagaatgaatcgctcgcggagacgcgggcggtttttgttctctttgcccaaaaaccaaacaaaacggaacaatcgcccgaatacggctttttttgcggtgggttttatggtagaatcaatgagaactcaaaaaatgcagagggagggccgcagcatgaccaacgcgccgaaaaccgtattagccatccatgatttgccgggctttggccgggcggcgctgtcggtcatcgtaccggtgctctcgacgctgggcgtgcagaccgtggcactgcctacggcggtgctgtccacccacacggggggcttaggcaccccggctaagctggccaaccccggctacggccccgcggcactggaacattatcatcggctgggcgtgaaatttgactgcatctactcgggctatctggcggacgccgcgcaggcaaagctcgtagaacaggcgtttgagctgtggccccgcgcgttcaaggtcgtggacccggtgctgggcgacggagggcggctgtacagcggcctgggggccgacatggtgcccgctatgtatagtctgtgcagcaaggcggatctgatcgtccccaatgtgaccgaggctgcgctgctgctgggcgacccgctgcccggtgtgggcagtgccgagcaggccgccgcacaggcggcccggctgacccgtgtggcgccgcaggtcgttgtgaccggcgtgacgggcatcggcggcggacgctacataggctgtgtgggcgcggcccgcggcggcgagggctatgccgtaaaaacgccgctgcagccgcggatgttccacggcacgggcgatatttttgccgccgtgctcgtcgggcgcattttgcggggcaacgtcccccaggctgccgtacaggcagctgccgccttcgtagccgagtgcatcaggcagacgcccgagggagccgacgagcggctgggcgtctggctggagaacgccctgccgaaactgcggcaggagtaaaaagcagagcgctccgcagccgcgaacgggcacggggcgtcggggacgccgccccctacaacgcggcagcggcggtgcggcagccggaggactggccgccctacaccgcaggggcggatcccccatccgcccgaccctcccccaagggagggctaaagttatagaacgaggacttgtaaatttatgccaaccttaaacattgtactggtcgagccgcagatcccgcagaactccggcaatatcgcgcggacctgcgcggtgacgggagcgcggctgcatatagtcggcccgatgggctttaccatcgacgacaaaaaattaaagcgcgccgggcttgactattggcaccagcttgatataacatattatcaagatcagacggatttttttgccaaaaacagtggtccgtttttctacttcacgtccaagggcccgcgccgccatgtggatgtgacctaccccgacggcgcgtatctcgtctttgggcgcgaggatgccggcctgcccgaggagctgctggccgcgcatgaggccgactgcgtgcgtatgccgatgcgcaggggcgagcgatgcctgaacctgtccaacgcggtggcagtgggcgtgtacgaagcattgcgtcaatgggattttgccggtttggagacccacgggcagttgacccgatacgaatggagtgaggatgtaaaatgagcaagataggttttctgacagattcctgttccgacattccgcaggagcttgcggataagtacggcatcgaggtcgtgggcttccccatcaaccttgacggtgtggagtacatggagcgcaaggactttaccaacgaccagttttaccagatgatgcgcgacgcccagggcgtgcccaccaccgccgccatcacccagctgcagttctgcgatatttacgcccgctatgcggacgagggctataccgacttggtgtacctgagcatcaacgcgggcggctccagcacctacaacaacgccgtcaaggccatggagctgttggaggaggagcgccccggttacacgatgaagattcaggtcatcgacagccacacctactcgatgccctacggctggtatttctgtgagtgcgcccgcaaggtgcgcaacggcggtgagctggcctcctgcgtggccgagctgaagcagaagctggactgcgttgagatctgtctggccgcctacagcctgaagcagatgaagaagtcgggccgcgtcagcgccgccgccgctgtggtcggcgacttgctgggcatccgccccatcatcagcctgaatgcgggcgtctccaaggtcgagagcaaggtccgcggcgacgccgccgtgcccgcagccatgatcaaatgggtggagagccgcgtcgattcgatgaaggacacgccctacatggtggcctacacgtccagcaccgccaagcgtgacgagctggtcaagctgtgcaaaaaggcgtttggccatgcaccgctgatcgtgttccagctcggcggcgttgtcagcgccaacaccggccccgacggcatcgccatcgtctacgagggcaagccccgcaatctcgaggcttatgcgccggagctgccgtaatatttttcggcagcataggtaaggtcttgcactttgcctgacaatgtagtataatacagacagttcttataccataccaagaactattatggttgctatgataaggtcataggaccgtaaagctctgacgccctgctgtttggcagggcgtcatcttttttgcctaaatttcgtttaaattgtcagttgcccaataataccataatgcgctatgatagtagaaaagtgaaaggatgtgcaaaaaaatgaagcatccctatggaattggtctggatattggcattgcgtccgtcggctgggcggtggtggcactgaatgaaaacgcggagccctatggtctgatccgatgtggctcacgcatatttgataaggccgaacagcccaaaacaggcgacagccttgctgccccgcgccgtgaggcccgcagcgcccgccgcaggctgcgccgccgcagcctgcgcaaggcggatctgtacgagctgatggagaaaaacggtctgcccggtaaggcggaaatagagcaggctgtgcaagcgggacatctgccggatgtctatgcgctgcgtgttcaggcgttggatggcccggtgacagcactggattttgcccgtatactgctgcacctgatgcagcgcaggggctttcgcagtaaccgcaaggcagacgatgcacaaaaagacggtaagctgctgcaggcaattgacgcgaacacccgacgtatggaggcaaaccggtaccgtactgtcggtgagatgatgtaccgcgaccctgtgtttgcagagcacaagcgcaacaaagcggaaaattatctttccaccgtcaagcgcgaccaaatcatagacgaggccagactggtttttgcagcacagcgtcaatacggtgcgacatgggcttcgccggagatggaggcagagtacctttgtattctgacacgccagcgctcctttgcggaaggtccgggcaaaggcagcccgtatagcggcagcaacagggtcggcacctgcacgctggggggaaagagcgagcagcgggcagccaaggcggccttctcgtttgaatattttacgctgctgcaaaaaatcaatcatatccgcattgcggaaaacggaaccagccgcacgctgacaccggcagagcgacaggtattgctttctgtgtgctgccagacggacaagctggattttgcccgggtccgcaaggcgttggcactgccggaagaagcacggttcaacatggtgcggtatcgcggggagcagacggcagaagcctgcgaaaagaaagaaaaaataacggcgctcccctgctaccacaagatgcgtaaggcgctgaataccctgcggaaggatcatatccgcaatatcagccgcgagcagctggatgccgccggagctgcgctgacgaacccggaaaacgaggataagctgcgcaaggaattgaaacaggcggagtttgaaccgctggaaatagaagcactgctgacgctgcccagctttgcgggatatggacacatttcggtcaaggcatgccgcaagctgatcccctatctggaacagggcatgaactataacgatgcctgccaggcagccggatatgattttcagggaaggcaaaacggcgaaaaagcgcagttcctgccggcctcaacggaggaaatggaggatattacaagcccggtggtgcgccgtgcagtggcacagacgatcaaggtcgtcaatgcgatcatccgcgagcagggcgaaagtccggtcagtatccatctggagctggcaagagagatgaataagaacttccagcagcgcagcgagttggacaaggcgatgcgggataacagtgcggaaaatgaacgcctgatgaaagagctgaatgagctttttccgggacgcaccgttaccgggcaggaccttgtaaaatatcgtctgtggaaagagcaggacgggcactgtgcgtattcgatacagccgttggagctggacaaggttattacagtctccggctatgccgaggtagaccatatcgtcccttatagcataagctttgatgaccgccgcacaaataaggtgctggtgctggcatcggagaaccgccagaagggaaaccgtctgccgctgcaatacctgcagggaaaacgacgggacgactttattgtgtacaccaaagcaaacgtaaagaatttccgcaagcgccagaacctattgaaggaaaggctgagcgaggaggacggcaagggctatatccagcgcaacctgcaggatacgcagtatattgcggcttttatgctgaactatatccgcaatcatcttgcgtttgcagactgttccggggcaggcaaacggcgggtcgttgcggtaaatggcgccgttacggcgtttttgcgcaagcgctggggtcttagcaaggtgcgtgccgacggcgatctgcaccatgcagcggacgcggcggtgattgcctgtacgacacaggggatgataaagcgggtatctgacttttgcaagcgtgcagagacgacggcggtgcgtaatgagcacttccccgaaccttggccgcacttccgtgatgagttgacgcagcgattgtcggcctgcccgcaggaagacctgatgaaaattaacccggcctattatgcgacggtggatatttcgtctattcagcctgtgtttgtatcgcggatgccgcgccataaggtgacaggtgcggcacacaaggaaacaataaaaagccgcctggacgatactcacgttgtacagcgtaggaatatcaccgaactgaaattggataaggacggtgaaattgcgggctactttaaccgcagcagcgatacattgctgtacaatgcactgaaggctagattgcttgcctttggcggggatgggaagaaagcgtttgcagaaccgttttacaagccgcgcgcggatggcacacccggggcacgagttcaaaaagtgaagatttgcgataaagtgaccagtacagttccggttcatgatggaaagggtgtggctgataacgacacgatggtacgcatcgatgtgtactatgtgccgggagacggctattactgggtgccgatctatgtggcagatacggtgaaattggaattgcccaataaagcggttgtacagggaaaaagctatgcagagtggaaggaaatggacgaagaaaacttcttgttctcactttgccagcatgaccttgtacgcattgaaagcaaacgccttatgaaattcaaggtgcaaaacagagatagtacactggagaaggaaatgccggtgaacaaaatactggcatactttgaaggtgggaatattgcaacgggagctgttacgctgactacacatgatgatgcatatattgcagacggtcttggctttaagaccttgcaaaaggttcagaaatatcaggtcgatgtctttggcaattatacccctgtgaaaaaagaaaaacggcaaaccttccctgcccaacggaggtgaattatgtcctaccgctgtctgatgatcgtgaaccctgcgcgcatccgctgcaaaaatgagcagctgttgattgaaacggaagaagttcactctgtgcccatcgaggacatcagtgccattgtactggaaagccgccaaagcacgatcacaacagcggctatggcggcgctggcacaaaacggtgtggtgactttctggtgcgatgaaacacatctgccgtgcggcatctcgctgccgtttgcacagcacagccgtcagctgggagtactgcgctggcagatggaattgaccctgccggcaaaaaagcggatgtggcagcaggtagtgacagcaaaaattcaaaaccaagcggagtgccttgcactttgcggcaaaacacaggaggcggcgtttctattcgggcgtgccaaagctgtgacgagcggcgacaaagataacgtagaggcaagcgccgcagcgtactactttccggctttatttggtgagggctacacccgccgcaacgaggatacgcgaaatgtagcactgaattatgcctacgcgattttgcggggctatatggcgcgctgcctgacggtgtatggttttcagccgtgcctggggctgcaccatgacagcgagctgaaccagtttaatctggcggatgacctgatggagccgttccggcccgtggcggatttgtacgtggcagcaaatgtggccgaggatgcagcattgacacccatactgaagggaaagcttgtaaacctgttgaatgcggatattctttccggcgggcagcaccacagcgttgcctatgcaatggaacgcctggtgcaaggtctgcgtggacaagccctgctgttacccaaattgcttgaatacaagcagcatagctatgagtaaatttatgcggatgattgtcttttttgacctgcctgtgcagacaaagactgaaaggcggcatgcgacggcgttccggaattttttgctgaaggacggataccacatgctgcaattctctgtgtacgcgagggtgtgcaacggcaacgacgccgtgaagaaacacgaaagccgtttgagggcatccctgccgccaaacggctcaattcgcctgcttatcgttacagaaaagcagtaccagtctattcagattcttctgggaaattatcagccggaagaagccccttttgtatgtgaacagttgagttttttctaaaacaaaaagcgcatcggaccgcaatccgatgcgctttttgcatagcctaattataccataccaagagctattagggaactatgactgctgcgggaggccttccgaggtggcgacaattataccataccaagagctattagggaactatgacctatgtggcgatatgcttactgggtctatcattataccataccaagagctattagggaactatgacttgtgtctccttagtaaaccagcaaacaaaattataccataccaagagctattagggaactatgacggaaaagatgttgtagatttgactctagatattataccataccaagagctattagggaactatgacacggggtgcggtacaatgccgaggacggcgattataccataccaagagctattagggaactatgacccggggaaaggggtgcaggggaaaacagagattataccataccaagagctattagggaactatgaccagcgttaacggtttcttcccttgcaattcattataccataccaagagctattagggaactatgacctgtcagtgtcacagtaaacgccatttttgattataccataccaagagctattagggaactatgaccctatttacttctatttcggcggtgcaaaaattataccataccaagagctattagggaactatgacctgtacccgtgtccagtgcctagccagcacattataccataccaagagctattagggaactatgattttcagataatcgataatacactccgatgcattataccttatcagcacaatatgcgcagaatctaccacaaattttccccgcaggtcttgcaacggcctgcgggttttgttataatttaggtttgttgagcaacttaggattttaggctccgctgccggctgctggtcggcagcgcaaaccccgcaaggctggcggtcttgcgtgtggtcaaaatctatccgccggagtattgtatgaatatgaaaaatctgtccgtccgtcgccttgtgcgctgcgctgtcattgcggctgtctatgtggtcgtctgccttgtgctggccccgttcagctacggcgcggtgcaggtccgcgtggccgaggccctctgcctgctgccggtgttcggcgccgagtatatcgtcggcgtcacgctgggctgctttttggcaaatctgctcggctccaccgtcgttgacgtggtgttcggcacgctggcgaccctgctggcctgccttgtgacctacaagctgcgcgacatccgcgtgaaagggctggccattccggcatccctgccgcccgttgtctttaatatgatcattgtcggcgcgttcgagatcaccttcttcttctcggacggcgcacccacggcgatgctggcggtgttcaatgccgttactgtcggcattggcgagctcatcagctgcacgattctgggtgtggcgctcgtcaagctgatcgaaagcaacgcaggtctgaacaaaatttttacagaagaataaggcaacaccgcacaattctaagtgccgatacggcgagcgaggcacgtcagatgctaagcaaaaagcgcaggcaatactttgtgtattaccgagcatttttgcgacgcaggtgacgtgccgcagccgccggagcggtgcttaagcccgtggggcgggaattgtgcggtgctgccgtgagaggtaacatctatgtgcccggaactgattttgtgggattggaacggtaccctgctcgatgatgtcgatctctgcgtggacgcgctcaaccgtctgctggcaggattcggctacccgcagcggtatgaccacgagcggtaccgggccatttttggctttcccatcgaggaatattacgtccgcgcggggtttgactttacaaagcacagctttgcagagctggccgaaaaatacatggaggactacgtccccgccagtgcggcctgcccgctggcagacggcgccattgacgcgctggaggcgtttaaggccgcggggctgcggcaggtcattctgtcggccagcaatctggatacgctgcggcgtcagaccgacgagcgcggcgtgacgggctattttgaccgtctgctgggtctgggcgacatctacgccaagagcaaggtcgaggtcgggctggcctatttaaaggaaaacggctttgacccggcacgcgccgtcatgatcggcgattccgtacacgactatgaggttgcacaggcgctgggcgtgcgctgcgttttgcagtccggcggccaccagccgccggaaaaattgagggaaacgggcgcaccggttgtaaagggattgcgcgaagccgcggcgctgattttggaataagagcttaggcaataccgcataattctaagtgccgatacggcgagcgaggtgcggcagct

SEQ ID NO: 795 - DNA, 13881 bp, synthetic construct
  source 1..13881: mol_type = other DNA
  misc_feature 1..13881: note = Synthetic
tgcatggcagctttgccgccacaggccgcggccacggtaccgaccgtgcgctggtggccgggctgctgggcatgctgccagacgatgaacgcatcccggacagcttttccctggcgcagcaggccgggctggattataccattggcaccgtggtgctgcgcggtgcccaccccaacaccgccctgctgcggctggaaggggtgagcggccgcaagctggaagtaatgggtgcttccatcggcggcgggcgcatcaacatctgccagatcgacggcattaccaccaactttggcggcgaccacaacaccctgatcgttcacaatcaggatacccccggccatgtggccgaagtgaccaccgcattggcgcagcggggcatcaacattgccaccatgcagctgtaccgttccaccgccgggggctatgccgtaatggtgctggaatgtgaccagcccctgccggacgctttaattgccgaactgcgcggcatgcagggcattgtgaaagtgaccggtctgaaccttgcgcagcagaccgaaacaagggagggcgcgtgattatggcatattcttccgttaaagcaatgctgaacgtcagccgccagaacaaccagcccctgtgggacgttattttgcagagcgacctgctggaaagcgggctgacccgcccccagtccctggccgaaatgcaccacctgtggcaggtgatggtgcaaaccagcgataactactgtggcgcggatcgttccgccagcggctttgcgggcggcgatgctgccaaagtggccgaagccgaagcccgcggccagctgttgactggcggctatctggcccaggtgatggccgaagccctgaaaaccgccgaatgcaacgcctgcatgaaacgaattgtcgccgcgcccacggcgggcagctgcggcgttctgcccgcggtgctgctgcccttgtggcgcagcggcagctataacgaggaagcaatctgccgcgcgctgtatgtctccgccgggtttgggcaggttgtggccgcgcgcgccacgctggccggcgccgagggcggctgccaggccgaggtcggcgctgccagcgccatggcagccgccgccctggtggagctgcgcggcggcaccgccgaacaatgcgccgaagcctttgccatggcgctgaccaacctggagggccttgtgtgtgaccccgtggccgggctggtggaaattccctgcatcaagcgcaatgtgatcggggccatgaacgcagtctcctgcgcggacatggcgctggccggcgtggtagggcatatccccgcggacgaggtgatcgacgcgatggccgaagttggcgctgccatgagcaatgacctgcgcgaaaccggcatcggcggccttgccggcaccccgacgggaaaggcgatccgggatattgtgcagatgcagggctgatgcgcagcatcagaatgaataatggcggtgtgcgcgctacgcgcgcacattaaaataaggcgttactttccttcattggcaatttgctgtaggaaagtagcgccctatttttttgagccgtgccaccgcacggcggtccaccaacattattctttatttattatttattattttgctttctcagcgccattttcaccaccagcaccagggccgcatacagaatgccgccgatggcccagatgaaccagctgtattggggctggccgttgcccctggggccaaaggtgtacagcaggaatgccgccgtgaccaccagccagtacaccacgctgatggcggtacgcagctcacgggtggctttgctgtggcgggtgtagtccccttcttccagcagcttttccgttgcgccgtaataggtcccgcccagcacaaaggcaaaaacgccgcaggcaaccaacaccagcagaacacaaaccgccgcatttatcacgattccgctgttcaccatcatggccacaaacagcggaatagcggacagaatgcacagcacggtgccggtcaggttcaatttatcataggtgggacggtacgccgcctggcgttcccgcaccatgccggtcacgccgtattctgtttcaaagggttccttttccaaaaaatcaaagtcccggttcttcgtgccgcacaacataaacagcaccacagccacgcataccattaccagcagaacgcacaggccaataccggtcgccaccttctcgttcaggccaaactgggaatgctggcagatttcgcccaaaagcagcagcataacaggtgaagcaacacagagcgcggttccccacgccatgtagggagcgttgacctttgcctgggccagggcagcgttagcctgctccagcgttacacagcgcagggcggtgggctcactttcggcatattccggttcgcccatctcgtcttttaacaggtaatctgtggtaacgccaaacagcttgctgatctgcaaaatcttttcaatgtccggcaccgactgtgcaccctcccatttggagaccgactgccgggtcacgttcagctgttgggcaagttcttcctgggaatatcctgcctttttgcgcagggcgatcaatttgtctgcaaagatcatggtcaatgtcctttcttgtgttgtggggttttgtttcggtggctttatcgtaccagctggtgccgttgcaaaaaagaacctgactgttggaaatgtgtcaaccgccggttgcgggcagaaaatttatcgtagtatcgtttacagtacaaacatttctttgcagattgttttgcctgtctgcgttttgaaaattttatccagcgcgttctgcgccgctgccttgggtacagaatcctcatacagattgaccaggaaatccgcttccactaaaatctgatagtccattccgttgatattggtatacgtatggtggtgccccaccagataagcaacgcggtcggcctgcgccggggtaaagccgcattccaacatcatggcgcgggccggggcggggccgagctcttcctgatatctgcctgcggaactgccataggtctgctctgccggtttgattccgatatcatgcacataggcagcggcttccagaatttccagcgttgcggcatccatcccctcctgccgggcaatcagcgcagcaaagctgtgcaccttgataaagtgctggatgcgggcaggatccgctgcgtaatatgtaatcatatgcaaagcaaggtcatccaattttgtcatgtcttatttcccctctcattctgttacaagtcatgcatctgtctgtattgtactgcaccactccataaaagcaaggggcagttttcctttttgggggtcaatcgtaatcgtattccgggctttcagccacgcgggtgtccagccagcgggccagacgctccatctcagcattggtgatgcgtccggtatccgataacgccgccaccatgctgcgcaggtccccgctatacagagtttgcaggtgtgccgcactgactgccccgcaataggtcacacggcgcaccagcggggtataaatatttttgttgccctccttttcgggccgtacataacccttggcttccagccgcagcaggaagttgagcagtgtggaatccgcccacacacaatccggcggcagtttggccgcgatctgccgccgagtggccggtttgccgcaggcccacagcgccgccatgacctgctcttcactggttgaaagtgctttcattcttctcttcattccttccttttatgtttgtggttgattttttcactttattttacatctgtggcagatattttagcaatatgcatttttgcacaaaatgcgcacttactttttggctgttttggcggtcagtattttacgtttgtaaaagtatctgttttcgttttgcgcacatctgtacttattggcaggctgcccgcggcaattttccacttttttcggtattttgacaaacgtgttttgcttgcgggcgggcaggcgcagtgcgtataatacaggtgttgtgaaaaacgaatcaacaaagcaaggcgcagcgcgccgctttgagcttgggtgtaagaatgaatttaggaggtaacctcttatgaatcgtgtgtataatttcagcgccggtccttccatgctgccggttcccgttttgcaaaaagctcaggccgacctgctggactaccatggcagcggtatgagcgtgatggagatgagccaccgcagcaagtggttcgatgagatcatccagaacactgaggccggtatccgcaaggtgctgaatgtgcccgacaactacaagatcggtttcttccagggcggcgcaacccagcagttcgccatggtgcccctgaactttatgaccaccggcacggcggattatctggtgaccggcaacttcagcaagaaggcagccgaggaggccgtcaagttcggcacggcccgcattgccgccagcagcaaggacaagaactttacctacatccccgacgtcgcggccatcgactatgacccgaacgccagctatatccacatctgccagaacaacacgattttcggcacaaaatatgtcgatgtaccgcaggtggacggcatcccgctggtggcagatatgagctcgatgatctgctccgagccggtggacatcagcaagtacggcgtcatctacttcggcgtgcagaagaacattgcccctgccggtatggctgtggccatcgtgcgtgacgacctgctgggcaaggccgccaagggactgacccccgacaagatccccacgatgatgaactacacgaccctgctgaacgccgacagcatgtacaacaccccgccgtgctggtgcatctacatgaccggcctcgtcatgaactaccttgagaacgagatcggcggcctggagaacatgcagaagcgcaacgccgccaaggccaaggtgctgtacgattacctcgacgggcaggacttctacaagaatcccgttgagaaaaagtaccgcagcatgatgaatgtgaccttcaccagccccgacgccgacaccgacaaggcgttctgtgccgcggccaccgaggcaggcttcgtcaacctgaaggggcaccgtctggtgggcggtatgcgtgcgtccatctacaacgctatgcctgccgagggcatcgacaagctggtcgactttatggagaagttccgcagggagcattgagctgctgcacagtaggggtcgggtgtgtccggcccgcggcactgtggcagccacccgtgagagggtcactgcgtaaggctgagggccgggtgtgtccggcccctacggcgcaaaataaggggaacagggagtaacgatatatgtataccatcaaaacattgaacgccatttcgccggtgggtctggccaagctgcccgccaaccagtttgagatcgacaacgaggccgctgcaccgcagggcattctggtgcgcagcgccgatatgcacgataccccgctgcccgacagtctgctggccattgcccgtgcaggtgccggtacgaacaacattcccgtggaggactgcacgaacaagggcatcgttgtgttcaacacgccgggcgccaacgccaacgccgtggccgagctcgtcgtcggtgcgctggtcgcgggcagccgcaatctggtggatgccgtgaactgggcgcagaccctcaagggccgcgacacgattgccaaggacgtggagaagggcaaaaaggccttcgtcggtcccgagctgcgcggtaagacgctgggcgtcatcgggttgggtgccatcggtgcgcgcgtggccaacgccgccgtcgcgctgggcatggaggttttgggctatgacccgtatatttccatcgatgctgcgtggagcctgtcccgcagcgtgcagcactgtgtcacgctgggcgatatgctgccccgctgcgactacctgaccatccatgtcccctacctgcctacgacccgccacaccatcaacgcccagacgctggcgatgtgcaaggacggcgtgcgcgtgctgaactttgcccgcggtgagctggtggacaacgccgcactgctcgacgcactgaacagcggcaaggtcgcgcagtatttctgcgacttccccaccgaggagctgctgggcgtcaagggcgtctgctgcacgccgcatctgggtgccagcacgccggaaagcgagacgaactgcgccgtgatggccgccgccgagctgagtgactacctgaaaaacggcaacatatcccacagcgtcaacctgccggatgtcagccagccgcgcgtgggaggccgccgcatctgcatcatccacaagaacgctccgggcgcgatctcggccatcacgggcattttgaccgaagcacacctgaacattgaaaacatggtgaacaagggcaaaaaggatgtcgcttataccctgctggacgtgacgggcaatgtcaccgacgacctcgccgtcaagctgggtgcgattgagcccgccatccgcgtgcgcgtgctgtaaaagcatcaactttgcgaaatctcccctgctgaaccaatcagcaggggcttttttgtggatgataaccatgaaatagaatgaatcgctcgcggagacgcgggcggtttttgttctctttgcccaaaaaccaaacaaaacggaacaatcgcccgaatacggctttttttgcggtgggttttatggtagaatcaatgagaactcaaaaaatgaagagggaggccgcagcatgaccaacgcgccgaaaaccgtattagccatccatgacctgccgggctttggccgggcggcgctgtcggtcatcgtgccggtgctctcgacgctgggcgtgcagaccgtggcactgcctacggcggtgctgtccacccacacggggggcttaggcaccccggctaagctggccaaccccggctacggtcccgcggcactggaacattatcatcgactgggcgtgaaatttgactgcatctactcgggctatctggcggacgccgcgcaggcaaagctcgtcgagcaggcgtttgagctgtggccccgcgcgttcaaggtcgtggacccggtgctgggtgacggagggcggctgtacagcggcctgggggccgacatggtgcccgctatgtatagtctgtgcagcaaggcggatctgatcgtccccaatgtgaccgaggccgcgctgttgctgggcgacccgctgcccggtgtgggcagtgccgagcaggccgccgcacaggcggcccggctgacgcgcgtagcgccgcaggtcgttgtgaccggcgtgacgggcatcggcggcggacgctacataggctgtgtgggcgcggcccgcggcggcgagggctatgccgtaaaaacgccgctgcagccgcggatgttccacggcacaggcgatatttttgctgccgtgctcgtcgggcgcattttgcggggcaacgtcccccaggctgccgtacaggcagctgccgccttcgtagccgagtgcatcaggcagacgcccgagggagccgacgagcggctgggcgtctggttggagaacgccctgccgaaactgcggcaggagtaaaaagcagagcgctccgcagccgcgaacgggcacggggcgtcggggacgccgccccctacaacgcggcagcggcggtgcggcagccggaggactggccgccctacaccgcaggggcggattccccatccgcccgcccctcccccaagggagggctaaagttatagaacgaggacttgtaaatttatgccaaccttaaacattgtactggtcgagccgcagatcccgcagaactccggcaatatcgcgcggacctgcgcggtgacgggagcgcggctgcatatagtcggcccgatgggctttaccatcgacgacaaaaaattaaagcgcgccgggcttgactattggcaccagcttgatataacatattatcaagatcaggcggacttttttgccaaaaacagtggtccgtttttctacttcacgtccaagggcccgcgccgccatgtggatgtgacctaccccgacggcgcgtatctcgtctttgggcgcgaggatgccggcttgcccgaggagctgctggccgcgcatgaggccgactgcgtgcgtatgccgatgcgcaggggcgagcgctgcctgaacctgtccaacgcggtggcagtgggcgtgtatgaagcattgcgtcaatgggattttgccggtttggagacccacgggcagttgacccgatacgaatggagtgaggatgtaaaatgagcaagataggttttctgacagattcctgttccgacattccgcaggagcttgcggataagtacggcatcgaggtcgtgggcttccccatcaaccttgacggtgtggagtacatggagcgcaaggactttaccaacgaccagttttaccagatgatgcgcgacgcccagggcgtgcccaccaccgccgccatcacccagctgcagttctgcgatatttacgcccgctatgcggacgagggctacaccgacctggtgtacctgagcatcaacgcgggcggctccagcacctacaacaacgccgtcaaggccatggagctgttggaggaggagcgccccggctacacgatgaagattcaggtcatcgacagccacacctactcgatgccctacggctggtatttctgtgagtgcgcccgcaaggtgcgcaacggcggtgagctggcctcctgcgtggccgagctgaagcagaagctggactgcgttgagatctgtctggccgcctacagcctgaagcagatgaagaagtctggccgcgtcagcgccgccgccgctgtggtcggcgacctgctgggcatccgccccatcatcagcctgaatgcgggcgtctccaaggtcgagagcaaggtccgcggcgacgccgccgtgcccgccgccatgatcaaatgggtggagagccgcgtcgattcgatgaaggacacgccctacatggtggcctacacgtcaagcaccgccaagcgtgacgagctggtcaagctgtgcaaaaaggcgtttggccatgcaccgctgatcgtgttccagctcggcggcgttgtcagcgccaacaccggccccgacggcatcgccatcgtctacgagggcaagccccgcaatctcgaggcttatgcgccggagctgccgtaatatttttcggcagcataggtaaggtcttgcactttgtctgacaatgtagtataatacagacagttcttataccataccaagaactattatggttgctatgataaggtcataggaccgtaaagctctgacgccctgctgtttggcagggcgtcatcttttttgcctaaatttcgtttaaattgtcagttgccaaataatgccatagtgcgctatgatagtagaaaagtgaaaggatgtgcaaaaaaatgaagcatccctatggaattggtctggatattggcattgcgtccgtcggctgggcggtggtggcactgaatgaaaacgcggagccctatggtctgatccgatgtggctcacgcatatttgataaggccgaagaaccccaaaaaggcgacagccttgctgccccgcgccgtgaggcccgcagcgcccgccgcaggcagcgccgccgcagcctgcgcaaggcggatctgtacgagctgatggagaaaaacggtctgcccggtaaggcggaaatagagcaggctgtgcaagcgggacatctgccggatgtctatgcgctgcgtgttcaggcgttggatggcccggtgacagcactggattttgcccgtatactgctgcacctgatgcagcgcaggggctttcgcagtaaccgcaaggcagacgatgcacaaaaagacggtaagctgctgcaggcaattgacgcgaacacccgacgtatggaggcaaaccggtaccgtactgtcggtgagatgatgtaccgcgaccctgtgtttgcagagcacaagcgcaacaaagcggaaaattatctttccaccgtcaaacgcgaccaaatcatagacgaggccagactggtttttgcagcacagcgtcaatacggtgcgacatgggcttcgccggagatggaggcagagtacctttgtattcacgccagcgctcctttgcggaaggcccgggcaaaggcagcccgtatagcggcagcaacagggtcggcacctgcacgctggagggaaagagcgagcagcgggcagccaaggcggccttctcgtttgaatattttacgctgctgcaaaaaatcaatcatatccgcattgcggaaaacggaaccagccgcacgctgacaccggcagaacgacaggtactgctttctgtgtgctgccagacggacaagctggattttgcccgggtccgcaaggcgttggcactgccggaagaagcacggttcaacatggtgcggtatcgcggggagcagacggcagaagcctgcgaaaagaaagaaaaaataacggcactcccctgctaccacaagatgcgtaaggcgctgaataccctgcggaaggatcatatccgcaatatcagccgcgagcagctggatgccgccggagctgcgctgacgaacccggaaaacgaggataagctgcgcgaggcattgaaacaggcggagtttgaaccgctggaaatagaagcactgctgacgctgcccagctttgcgggatatggacacatttcggtcaaggcgtgccgcaagctgatcccctatctggaacagggcatgaactataacgatgcctgccaggcagccggatatgattttcagggaagtcaaaacggcgaaaaagcgcagttcctgccggcctcaacggaggaaatggaggatattacaagcccggtggtgcgccgtgcagtggcacagacgatcaaggtcgtcaatgcgatcatccgcgagcagggcgaaagtccggtcagtatccatctggagctggcaagagagatgaataagaacttccagcagcgcagcgagttggacaaggcgatgcgggataacagtgcggaaaatgaacgcctgatgaaagagctgaatgagctttttccgggacgcaccgttaccgggcaggaccttgtaaaatatcggctgtggaaagagcaggacgggcgctgtgcgtattcgatacagccgttggagctggacaaggttattacagtctccggctatgccgaggtagaccatatcatcccttatagcataagctttgatgaccgccgcacaaataaggtgctggtgctggcatcggagaaccgtcagaagggaaaccgtctgccgctgcaatacctgcagggaaaacgacgggacgactttattgtgtacaccaaagcaaacgtaaagaatttccgcaagcgccagaacctattgaaggaaaggctgagcgaggaggacggcaagggctttatccagcgcaacctgcaggatacgcagtatattgcggcttttatgctgaactatatccgcaatcatcttgcgtttgcaaactgttccggggcaggcaaacggcgggtcgttgcggtaaatggtgccgttacggcgtttttgcgcaagcgctggggccttggcaaggtgcgtgccgacggcgatctgcaccatgcagcggacgcggcggtgattgcctgtacgacacaggggatgataaagcgggtatctgacttttgcaagcgtgcagagacgacggcggtgcgtaatgagcacttccctgaaccttggccgcgcttccgtgatgagctgacgcagcgattgtcggcctgcccgcaggaaaatttgatgcagatcaacccggtctattatgcgacggtggatatttcgtctattcagcctgtgtttgtatcgcggatgccgcgccataaggtgacaggtgcggcacacaaggaaacaataaaaagtcgcctggatgatactcacgttgtacagcgtaggaatatcaccgaactgaaattggataaggacggtgaaattgcgggctactttaaccgcagcagcgatacattgctgtacaatgcactgaaggccagattgcttgcctttggcggggatgggaagaaagcgtttgaagaaccgttttacaagccgcgcgcggatggcacacccggggcacgagttcaaaaagtgaagatttgcgataaagtgaccagtacagttccggttcatggtggaaagggtgtggctgataacgacacgatggtacgcatggatgtctattttgtgccgggcgacggctattactgggtgccgatctatgtggcagatacggtgaaattggaattgcccaataaagcggttgtacagggaaaaagctatgcagagtggaaggaaatggacgaagaaaacttcttgttctcactttgtcagaatgacctgattcgtattgaaagtaagcgcacaatgaaattcaaagtgcaaaacagtgacagtacactggaaaaagaagtgcagatgaattgcggcctgacctattttgaaggcggaaatatttcgacgggtgccatcacggtaactacgcatgataacgcgtatattgtaggaagtcttggctttaaaaccctgcaaaaggttcaaaagtatcaggtcgatgttcttggtaactacaccctcgtcaaaaaagaaaaacggcaaaccttccctgcccaacggaggtgaattatgtcctaccgctgcctgatgatcgtgaaccctgcgcgcatccgctgcaaaaatgagcagctgttgattgaaacggaagaagttcactctgtgcccatcgaggacatcagtgccattgtactggaaagccgccaaagcacgatcacaacagcggctatggcggcgctggcacaaaacggtgtggtgactttctggtgcgatgaaacacatctgccgtgcggcatctcgctgccgtttgcacagcacagccgtcagctgggagtactgcgctggcagatggaattgaccctgccggcaaaaaagcggatgtggcagcaggtagtgacagcaaaaattcaaaaccaagcggagtgtcttgcactttgcggcaaaacacaggaggcggcgtttctattcgggcgtgccaaggctgtgacgagcggcgacaaagataacgtagaggcaagcgccgcagcgtactactttccggctttatttggtgagggctacacccgccgcaacgaggatacgcgaaatgctgcactgaattatgcctacgcgattttgcggggctatatggcgcgctgcctgacggtgtatggttttcagccatgcctggggctgcaccatgacagtgagctgaaccaatttaatctggcggatgacctgatggaaccgttccggcccgtggcggatttgtacgtggcagcaaatgtggccgaggatgcagcattgacacccatactgaagggaaagcttgtaaacctgttgaatgcggatattctttccggcgggcagcaccacagcgttgcctatgcaatggaacgcctggtgcaaggtctgcgtggacaagccctgctgttacccaaattgcttgaatacaaacagcatagctatgagtaaatttatgcggatgattgtcttttttgacctgcctgtgcagacaaagactgaaaggcggcatgcgacggcgttccggaattttttgctgaaggatggctaccacatgctgcaattctctgtgtacgcgagggtgtgcaacggcaacgacgccgtgaagaaacacgaaagccgtttgagggcatccttgccgccaaacggctccattcgcctgcttgtcgttacagaaaagcagtaccagtctattcagattcttctgggaaattatcagccggaagaagccccttttgtatgtgaacagttgagttttttctaaaacaaaaagcgcatcggaccgcaatccgatgcgctttttgcatagcctattataccataccaagagctattagggaactatgattttcagataatcgataata

SEQ ID NO: 796 - DNA, 11683 bp, synthetic construct
  source 1..11683: mol_type = other DNA
  misc_feature 1..11683: note = Synthetic
ccgggcgtgtccggcccacggcactgtggcagccacccgtgagagggtcactgcgtaaggctgagggccgggcatgcccggcccctacggcgcaaaataaggggaacagggagtaacgatatatgtataccatcaaaacattgaacgccatttcgccggtgggtctggccaagctgcccgccaaccagtttgagatcgacaacgaggccgctgcaccgcagggcattctggtgcgcagcgccgatatgcacgatgccccgctgcccgacagcctgctggccatcgcccgtgcaggtgccggtacgaacaacattcccgtggaggactgcacgaacaagggcatcgtcgtgttcaacacgccgggcgccaacgccaacgccgtggccgagctcgtcgtcggtgcgctggtcgcgggcagccgcaatctggtggacgccgtgaactgggcgcagaccctcaagggccgcgacacgattgccaaggacgtggagaagggcaaaaaggccttcgtcggtcccgagctgcgcggcaagacgctgggcgtcatcgggttgggtgccatcggtgcgcgcgtggccaacgccgccgtcgcgctgggcatggaggttttgggctatgacccgtatatttccatcgatgctgcgtggagcctgtcccgcagcgtgcagcactgtgtcacgctgggcgatatgctgccccgctgcgactacctgaccatccatgtcccctacctgcctacgacccgccacaccatcaacgcccagacgctggcgatgtgcaaggacggcgtgcgcgtgctgaactttgcccgcggtgagctggtggacaacgccgcactgctcgacgcactgaacagcggcaaggtcgcgcagtatttctgcgacttccccaccgaggagctgctgggcgtcaagggcgtctgctgcacgccgcatctgggtgccagcacgccagaaagcgagacgaactgcgccgtgatggccgccgccgagctgagcgactacctgaaaaacggcaacatcgcccacagcgtcaacctgccggatgtcagccagccgcgtgtgggaggccgccgtatctgcatcatccacaagaacgccccgggcgcgatctcggccatcacgagcattttgaccgaagcgcacctgaacattgaaaacatggtgaacaagggcaaaaaggatgtcgcctataccctgctggacgtgacgggcaatgtcaccgatgacctcgccgtcaagctgggtgcgattgaacccgccatccgcgtgcgcgtgctgtaaaagcatcaactttgcgaaatctcccctgcagaaccaatcagcaggggcttttttgtggatgatcaccatgaaatagaatgaatcgctcgcggagacgcgggcggtttttgttctctttgcccaaaaaccaaacaaaacggaacaatcgcccgaatacggctttttttgcggtgggttttatggtagaatcaatgagaactcaaaaaatgcagagggagggccgcagcatgaccaacgcgccgaaaaccgtattagccatccatgacctgccgggctttggccgggcggcgctgtcggtcatcgtgccggtgctctcgacgctgggcgtgcagaccgtggcactgcctacggcggtgctgtccacccacacggggggcttaggcaccccggctaagctggccaaccccggttacggccccgcggcactggagcattatcatcggctgggcgtgaaatttgactgcatctactcgggctatctggcggacgccgcgcaggcaaagctcgtagaacaggcgtttgagctgtggccccgcgcgttcaaggtcgtggacccggtgctgggcgacggagggcggctgtacagcggcctgggggccgacatggtgcccgctatgtatagtctgtgcagcaaggcggatctgatcgtccccaatgtgaccgaggccgcgctgctgctgggcgacccgctgcccggtgtgggcagtgccgagcaggccgccgcacaggcggcccggctgacccgcgtagcgccgcaggtcgttgtgactggcgtgacgggcatcggcggcggacgctacataggctgtgtgggcgcggcccgcggcggcgagggctatgccgtaaaaacgccgctgcagccgcggatgttccacggcacgggcgatatttttgccgccgtgctcgtcgggcgcattttgcggggcaacgtcccccaggctgccgtacaggcagctgccgccttcgtagccgagtgcatcaggcagacgcccgagggagccgacgagcggctgggcgtctggctggagaacgccctgccgaaactgcggcaggagtaagaccatgagactgccgcgagacaaggatgtccttgaaaacgcccgagcgctgcgaaaaagcatgacgcgggaggaacgccatctgtggtatgattttctgcgcggatattcgccgcgctttgtacggcagaaggttgtaggacgttatattctggatttttattgcgatgcggcaggcctggcgatagagctggacggcagccagcattatgaagcggcgggacagctgtacgatgcacagcgcacggaatatctggagggcttcggaatcagagtgctgcggttttccaatctggatgtgatgcagcattttgagggcgtatgccgtgtgattgataacgccgtgaaaagcctcccctagaggggtggtggccgggagccgacccatgaacggtgtgccgcccggcccctcacccggcgctgcggcgccaccctcccccaagggagggctaaagttatagaacgaggacttgtaaatttatgccaaccttaaacattgtactggtcgagccgcagatcccgcagaactccggcaatatcgcgcggacctgcgcggtgacgggagcgcggctgcatatagtcggcccgatgggctttaccatcgacgacaaaaaattaaagcgcgccgggcttgactattggcaccagcttgatataacatattatcaagatcaggcggacttttttgccaaaaacagtggtccgtttttctacttcacgtccaagggcccgcgccgccatgtggatgtgacctaccccgacggcgcgtatctcgtctttgggcgcgaggatgccggtctgcccgaggagctgctggccgcgcatgaggccgactgcgtgcgtatgccgatgcgcaggggcgagcgctgcctgaacctgtccaacgcggtggcagtgggcgtgtacgaagcattgcgtcaatgggattttgccggtttggagacccacgggcagttgacccgatacgaatggagtgaggatgtaaaatgagcaagataggttttctgacagattcctgttccgacattccgcaggagcttgcggataagtacggcatcgaggtcgtgggcttccccatcaaccttgacggtgtggagtacatggagcgcaaggactttaccaacgaccagttttaccagatgatgcgcgacgcccagggcgtgcccaccaccgccgccatcacccagctgcagttctgcgatatttacgcccgctatgcggacgagggctataccgacctggtgtacctgagcatcaatgctggcggctccagcacctacaacaacgccgtcaaggccatggagctgttggaggaggagcgccccggctacacgatgaagattcaggtcatcgacagccacacctactcgatgccctacggctggtatttctgtgagtgcgcccgcaaggtgcgcaacggcggtgagctggcctcctgcgtggccgagctgaagaagaaactggactgcgttgagatctgtctggccgcctacagcctgaagcagatgaagaagtcgggccgcgtcagcgccgccgccgctgtggtcggcgacctgctgggtatccgccccatcatcagcctgaatgcgggcgtttccaaggtcgagagcaaggtccgcggcgacgccgccgtgcccgctgccatgatcaaatgggtggagagccgcgtcgattcgatgaaggacacgccctacatggtggcctacacgtccagcaccgccaagcgtgacgagctggtcaagctgtgcaaaaaggcgtttggccatgcaccgctgatcgtgttccagctcggcggcgtcgtcagcgccaacaccggccccgacggcatcgccatcgtctacgagggcaagccccgcaatctcgaggcttatgcgccggagctgccgtaatctttttcggcagcataggtaaggtcttgcgctttgcctgacaatgtagtataatgcagacagttcttataccataccaagaactattatggttgctatgataaggtcataggaccgtaaagctctgacgccctgctatttggcagggcgtcatctttttttgcataaatttcgtttaaattgtcagttgcccaataataccataatgcgctatgatggtagaaaagtgaaaggatgtgcaaaaaaatgaagcatccctatggaattggtctggatattggcattgcgtccgtcggctgggcggtggtggcactgaatgaaaacgcggagccctatggtctgatccgatgtggctcacgcatatttgataaggccgaacagcccaaaacaggcgacagccttgctgccccgcgccgtgaggcccgcagcgcccgccgcaggctgcgccgccgcagcctgcgcaaggcggatctgtacgagctgatggagaaaaatggtctgcccggtaaggcggaaatagagcaggctgtgcaagcgggacatctgccggatgtctatgcgctgcgtgttcaggcgttggatggcccggtgacagcactggattttgcccgtatactgctgcacctgatgcagcgcaggggctttcgcagtaaccgcaaggcagacgatgcacaaaaagacggtaagctgctgcaggcaattgacgcgaacacccgacgtatggaggaaaaccggtaccgtactgttggtgagatgatgtaccgtgaccctgtgtttgcagagcacaagcgcaacaaagcggaaaattatctttccaccgtcaagcgcgaccaaatcatagacgaggccagactggtttttgcagcacagcgtcaatacggtgcgacatgggcttcgccggagatggaggcagagtacctttgtattctgacacgccagcgctcctttgcggaaggtccgggcaaaggcagcccgtatagcggcagcaacagggtcggcacctgcacgctgggggggaaagagcgagcagcgggcagccaaggcggccttctcgtttgaatattttacgctgctgcaaaaaatcaatcatatccgcattgcggaaaacggaaccagccgcacgctgacaccggcagaacgacaggtactgctttctgtgtgctgccagacggacaagctggattttgcccggatccgcaaggcgttggcactgccggaagaagcacggttcaacatggtgcggtatcgcggggagcagacggcagaagcctgcgaaaagaaagaaaaaataacggcactcccctgctaccacaagatgcgtaaggcgctgaataccctgcggaaggatcatatccgcaatatcagccgcgagcagctggatgccgccggagctgcgctgacgaacccggaaaacgaggataagctgcgggaggcattgaaacaggcggagtttgaaccgctggaaatagaagcactgctgacgctgcccagctttgcgggatatggacacatttcggtcaaggcgtgccgcaagctgatcccctatctggaacagggcatgaactataacgatgcctgccaggcagccggatatgattttcagggaaggcaaaacggcgaaaaagcgcagttcctgccggcctcaacggaggaaatggaggatattacaagcccggtggtgcgccgtgcagtggcacagacgatcaaggtcgtcaatgcgatcatccgcgagcagggcgaaagtccggtcagtatccatctggagctggcaagagagatgaataagaacttccagcagcgcagcgagttggacaaggcgatgcgggataacagtgcggaaaatgaacgcctgatgaaagagctgaatgagctttttccgggacgcaccgttaccgggcaggaccttgtaaaatatcgtctgtggaaagagcaggacgggcgctgtgcgtattcgatacagccgttggagctggacaaggttattacagtctccggctatgccgaggtagaccatatcgtcccttatagcataagctttgatgaccgccgcacaaataaggtgctggtgctggcttcggagaaccgtcagaagggaaaccgtctgccgctgcaatacctgcagggaaaacgacgggacgactttattgtgtacaccaaagcaaacgtgaaaaatttccgcaagcgccagaacctattgaaggaaaggctgagcgaggaggacggcaagggctatatccagcgcaacctgcaggatacgcagtatattgcggcttttatgctgaactatatccgcaatcatcttgcgtttgcagactgttccggggcaggcaaacggcgggtcgctgcggtaaatggcgccgttacggcgtttttgcgcaagcgctggggtcttagcaaggtgcgtgccgacggcgatctgcaccatgcagtggacgcagcggtgattgcctgtacgacacaggggatgataaagcgggtatctgacttttgcaagcgtgcagagacgacggcggtgcgtaatgagcacttccccgaaccttggccgcgcttccgtgatgagctgacgcagcgattgtcggcctgcccgcaggaaaatttgatgcagatcaacccggtctattatgcgacggtggatatttcgtctattcagcctgtgtttgtatcgcggatgccgcgccataaggtgacaggtgcggcacacaaggaaacaataaaaagtcgcctggacgatattcacgttgtacagcgtaggaatatcaccgaactgaaattggataaggatggtgaaattgcgggctactttaaccgcagcagcgatacattgctgtacaatgcactgaaggccagattgcttgcctttggcggggatgggaagaaagcgtttgcagaaccgttttacaagccgcgcgcggatggcacacccggggcacgagttcaaaaagtgaagatttgcgataaagtgaccagtacagttccggtccacggtggaaagggtgtggctgataacgacacgatggtacgcatcgatgtgtactatgtgccgggagacggctattactggattcccgtctacgtggcggatacggtgaagccggagttgccgagtaaggcagtggttgcatataagagctctgctgaatggaaagagatgaaggatgaagatttccttttttctctttgccagcatgaccttgtacgcattgaaagcaaacgccttatgaaattcaaggtgcaacacagagatagtacactggagaaggaaatgccggtgaacaaaatactggcatactttgaaggtggggatattgcaatgggagctgttacgctgactacacatgatgatgcatatattgcaactggtcttggctttaagaccttgcaaaaggttcagaaatatcaggtcgatgtccttggcaattatacccctgtgaaaaaagaaaaacggcaaaccttccctgcccaacggaggtgaattatgtcctaccgctgtctgatgatcgtgaaccctgcgcgcatccgctgcaaaaatgagcagctgttgattgaaacggaagaagttcactctgtgcccatcgaggacatcagtgccattgtactggaaagccgccaaagcacgatcacaacagcggctatggcggcgttggcacaaaacggtgtggtgactttctggtgcgatgaaacacatctgccgtgcggcatctcgctgccgtttgcacagcacagccgtcagctgggagtactgcgctggcagatggaattgaccctgccggcaaaaaagcggatgtggcagcaggtagtgacagcaaaaattcaaaaccaagcggagtgtcttgcactttgcggcaaaacacaggaggcggcgtttctattcgggcgtgccaaggctgtgacgagcggcgacaaagataacgtagaggcaagcgccgcagcgtactacttcccggctttatttggtgagggctacacccgccgcaacgaggatacgcgaaatgcagcactgaattatgcctacgcgattttgcggggctatatggcgcgctgtctgacggtgtatggttttcagccgtgcctgggtctgcaccatgacagcgagctgaaccaatttaatctggcggatgacctgatggagccgttccggcccgtggcggatttgtatgtggcagcaaatgtggccgaggatgcagcattgacacccatactgaagggaaagcttgtaaacctgttgaatgcggatattctttccggcgggcagcaccacagcgttgcctatgcaatggaacgcctggtgcaaggtctgcgtggacaagccctgctgttacccaaattgcttgaatacaagcagcatagctatgagtaaatttatgcggatgattgtcttttttgacctgcctgtgcagacaaagactgaaaggcggcatgcgacggcgtttcggaattttttgctgaaggacggataccacatgctgcaattctctgtgtacgcgagggtgtgcaacggcaacgacgccgtgcagaaacacgaaagccgtttgagggcatccttgccgccaaacggctccattcgcctgcttgtcgttacagaaaagcagtaccagtctattcagattcttctgggaaattatcagccggaagaagccccttttgtatgtgaacagctgagttttttctaaaacaaaaagcgcatcggaccgcaatccgatgcgctttttgcatagcctattataccataccaagagctattagggaactatgacattacaagtcatctatgatttgcacctcgcattataccataccaagagctattagggaactatgacctgcgtgacgcgctgcatcaagggtattttattataccataccaagagctattagggaactatgacgtgtcgcatttaagactgttgaaacagtgaattataccataccaagagctattagggaactatgacatgacgcgcacctactagaacggcaaatccattataccataccaagagctattagggaactatgacgtacaggtgcaggcgaacaagatcaaaggcattataccataccaagagctattagggaactatgaccgcagcctacatcatggcgcgacagggagaattataccataccaagagctattagggaactatgaccgtaatcgtgtcaacgaactctggtttgttattataccataccaagagctattagggaactatgactaagcatcgcaagcgttgaccgctacatcaattataccataccaagagctattagggaactatgattttcagaaaatcgataatacactccgatgcattataccatatcagcacaatatgcgcagaatctaccacaaattttccccgcaggtcttgcaacggcctgcgggttttgttataatttaggtttgttgagcaacttaggattttaggctccgctgtcggctgctggtcggcagcgcaaaccccgcaaggctggcggtcttgcgtgtggtcaaaatctatccgccggagtattgtatgaatatgaaaaatctgtccgtccgtcgccttgtgcgctgcgctgtcattgcggctgtctatgtggtcgtctgccttgtgctggccccgttcagctacggcgcggtgcaggtccgcgtggccgaggccctctgcctgctgccggtgttcggcgccgagtatatcgtcggcgtcacgctgggctgctttttggcaaatctgctcggctccaccgtcgttgacgtggtgttcggcacgctggcgaccctgctggcctgccttgtgacctacaagctgcgcgacatccgcgtgaaagggctggccattccggcatccctgccgcccgttgtctttaatatgatcattgtcggcgcgttcgagatcaccttcttcttctcggacggcgcacccacggcgatgctggcggtgttcaatgccgttactgtcggcattggcgagctcatcagctgcacgattctgggtgtggcgcttgtcaagctgatcgaaagcaatgcgggtctaaacaaaatttttacagaagaataaggcaacaccgcacaattctaagtgccgatacggcgagcgaggcacgtcggatgctaagcaaaaagcgtaggcaatactttgtgtattaccgagcatttttgcgacgcaggtgacgtgccgcagccgccggagcggtgcttaagcccgtagggcgggaattgtgcggtgctgccgtgagaggtaacatctatgtgcccggaactgattttgtgggattggaacggtaccctgctcgatgatgtcgatctctgcgtggacgcgctcaaccgtctgctggcagacttcggctacccgcagcggtacgatctggcccagtaccgggagctgttccgcttccccattgaggactactaccgccttgccgggtttgacttttcccggcacccctaccccatgctggcagagcactttatggcgcactacaatgccggggtggacgcctgcccggtgatggcccacgccgtggacaccctcaccgagctggcccgccgcggctggaaacaggctgtactttccgcctcccgccgggactacctgatcgagcaggtggccgcgcggggtctgcagggcttttttaccgagttgctcggccttgcagacatctacggcgtgagcaaggtgcagcttggcaccgactatctgcgccgcaccggcatcgacccggcccactgcgtgatgatcggcgacacccagcatgatgccgaagtggccgccgccattggcgccaagtgtgtgctgtacaccggcgggcaccagtcccgcgcgctgctggaagctgcctgcccccatgtcatcgacgacctggccctgctgccggatctgctggagagcttataatgcaaaaccgaccacctgtgatggctgcatcacgggtggtttttgcgtttatgaacgccccggcagcatctttttacagaaagttcatgcaaaaagcggctaaactagccttgcagatttgacgcccctgctgctttggtgtatcatatagattgtatcaatgtgcctttccggacgtgtgtgcgtcctgatcttattgtatgaggtgtaacgaatgtcccttgttgaaaaactctttggcagcttctccgaccgggagctgaaaaaggtcaatcccattgtcaagcaggtgctggcactggagcccaagtatgcggccctttcggacgcagaactgcaggcccagacccctgctttcaagcagcagctggccgacggcaaaacgctggacgacatcctgcccgacgcctttgccgtgtgccgcgaagccgcctggcgtgtgctgggcatgaagcatttcccggtgcagatcaccggcggcattgccctgcaccgcggcgacatcgccgagatgcagaccggcgaaggcaaaacgctggtggccaccctgcccgcctacctcaacgccctgaccg

SEQ ID NO: 797 - DNA, 8450 bp, synthetic construct
  misc_feature 1..8450: note = Synthetic
  source 1..8450: mol_type = other DNA
agtgcatcaggcagacgcccgagggagccgacgagcgtctgggtgtctggctggagaacgccctgccgaaactgcggcaggagtaagaccatgagactgccgcgagacaaggatgtccttgaaaacgcccgagcgctgcgaaaaagcatgacgcgggaggaacgccatctgtggtatgattatctgcgcggatattcgccgcgctttgtacggcagaaggttgtagaacgttatattctggatttttattgcgatgcggcaggtctggtgatagagctggacggcagccagcattatgaagcggcgggacagctgcacgatgcacagcgcacggaatatctggagggcttcggaatcagagtgctgcggttttccaatctggatgtgatgcagcattttgagggcgtatgtcgtgtgattgataacgccgtgaaaagcctcccccagaggggaggtggccgaaggccggaggggtgggcgggagccgacccatgaacggcgtgccgcccggcccctcacccggcgctgcggcgccaccctcccccaagggagggctaaagcttatagaacgaggacttgtaaatttatgccaaccttgaacattgtactggtcgagccgcagatcccgcagaactccggcaatatcgcgcggacctgcgcggtgaccggagcgcggctgcatatagtcggcccgatgggttttaccatcgacgacaaaaaattaaagcgcgccgggcttgactattggcaccagcttgatataacatattatcaagatcaggcggacttttttgccaaaaacagtggtccgtttttctacttcacgtccaagggcccgcgccgccatgtggatgtgacctaccccgacggcgcgtatctcgtctttgggcgcgaggatgccggcctgcccgaggagctgctggccgcgcatgaggccgactgcgtgcgtatgccgatgcgcaggggcgagcgctgcctgaacctgtccaacgcggtggcagtgggcgtgtacgaagcattgcgtcaatgggattttgccggtttggagacccacgggcagttgacccgatacgaatggagtgaggatgtaaaatgagcaagataggttttctgacagattcctgttccgacattccgcaggagcttgcggataagtacggcatcgaggtcgtgggcttccccatcaaccttgacggtgtggagtacatggagcgcaaggactttaccaacgaccagttttaccagatgatgcgcgacgcccagggcgtgcccaccaccgccgccatcacccagctgcagttctgcgatatttacgcccgctatgtggacgagggctacaccgacctggtgtacctgagcatcaacgcgggcggctccagcacctacaacaacgccgtcaaggccatggagctgttggaggaggagcgccccggctacacgatgaagattcaggtcatcgacagccacacctactcgatgccctacggctggtatttctgtgagtgcgcccgcaaggtgcgcaacggcggtgagctggccgcctgcgtggccgagctgaagcagaagctggactgcgttgagatctgtctggccgcctacagcctgaagcagatgaagaagtcgggccgcgtcagcgccgccgccgctgtggtcggcgacctgctgggcatccgccccatcatcagcctgaatgcgggcgtctccaaggtcgagagcaaggtccgcggcgacgccgccgtgcccgccgccatgatcaaatgggtggagagccgcgtcgattcgatgaaggacacgccctacatggtggcctacacgtccagcaccgccaagcgtgacgagctggtcaagctgtgcaaaaaggcgtttggccatgcaccgctgatcgtgttccagctcggcggcgttgtcagcgccaacaccggccccgacggcatcgccatcgtctacgagggcaagccccgcaatctcgaggcttatgcgccggagctgccgtaatatttttcggcagcataggtaaggtcttgcactttgcctgacaatgtagtataatacagacagttcttataccataccaagaactattatggttgctatgataaggtcataggaccgtaaagctctgacgccctgctatttggcagggcgtcatcttttttgcctaaatttcgtttaaattgtcagttgccaaataatgccataatgcgctatgatagtagaaaagtgaaaggatgtgcaaaaaaatgaagcatccctatggaattggtctggatattggcattgcgtccgtcggctgggcggtggtggcactgaatgaaaacgcggagccctatggtctgatccgatgcggctcacgcatatttgataaggccgaacagcccaaaacaggcgacagccttgctgccccgcgccgtgaggcccgcagcgcccgccgcaggctgcgccgccgcagcctgcgcaaggcggatctgtacgagctgatggagaaaaacggtctgcccggtaaggcggaaattgagcaggctgtgcaagcgggacatctgccggatgtctatgcgctgcgtgttcaggcgttggatggcccggtgacagcactggattttgcccgtatactgctgcacctgatgcagcgcaggggctttcgcagtaaccgcaaagcggacgatgcacaaaaagacggtaagctgctgcaggcaattgacgcgaacacccgacgtatggaggcaaaccggtaccgtactgtcggtgagatgatgtaccgcgaccctgtgtttgcagagcacaagcgtaacaaagcggaaaattatctttccaccgtcaagcgcgaccaaatcatagacgaggccagactggtttttgcagcacagcgtcaatacggtgcgacatgggcttcgccggagatggaggcagagtacctttgtattctgacacgccagcgctcctttgcggaaggtccgggcaaaggcagcccgtatagcggcagcaacaggggcggcacccgcccgctggggggagcgagcagcgggcagccaaggcggccttctcgtttgaatattttacgctgctgcaaaaaatcaatcatatccgcattgcggaaaacggaaccagccgcacgctgacaccgacagagcgacaggtactgctttctgtgtgctgccagacggacaagctggattttgcccggatccgcaaggcgttggcactgccggaagaagcacggttcaacatggtgcggtatcgcggggagcagacggcagaagcctgcgaaaagaaagaaaaaataacggcactcccctgctaccacaagatgcgtaaggcgctgaataccctgcggaaggatcatatccgcaatatcagccacgagcagctggatgccgccggagctgcgctgacgaacccggaaaacgaggataagctgcgcgaggcattgaaacaggcggagtttgaaccgctggaaatagaagcactgctgacgctgcccagctttgcgggatatggacacatttcggtcaaggcgtgccgcaagctgatcccctatctggaacagggcatgaactataacgatgcctgtcaggcagccggatatgattttcaaggaaggcaaaacggcgaaaaagcgcagttcctgccggcctcaacggagaaaatggaggatattacaagcccggtggtgcgccgtgcagtggcacagacgatcaaggtcgtcaatgcgatcatccgcgagcagggcgaaagtccggtcagtatccatctggagctggcaagagagatgaataagaacttccagcagcgcagcgagttggacaaggcgatgcgggataacagtgcggaaaatgaacgcctgatgaaagagctgaatgagctttttccgggacgcaccgttaccgggcaggaccttgtaaaatatcgtctgtggaaagagcaggacgggcgctgtgcgtattcgatacagccgttggagctggacaaggttattacagtctccggctatgccgaggtagaccacattgtcccttatagcataagctttgatgaccgccgcacaaataaggtgctggtgctggcatcggagaaccgtcagaagggaaaccgtctgccgctgcaatacctgcagggaaaacgacgggacgactttattgtgtacaccaaagcaaacgtaaagaatttccgcaagcgccagaacctattgaaggaaaggctgagcgaggaggacggcaagggctatatccagcgcaacctgcaggatacgcagtatattgcggcttttatgctgaactatatccgcaatcatcttgcgtttgcagactgttccggggcaggcaaacggcgggtcgttgcggtaaatggcgccgttacggcgtttttgcgcaagcgctggggtcttagcaaggtgcgtgccgacggcgatctgcaccatgcagcggacgcggcggtgattgcctgtacgacacaggggatgataaagcgggtatctgacttttgcaagcgtgccgagacgacggcggtgcgtaatgagcacttccccgaaccttggccgcacttccgtgatgagctgacgcagcgattgtcggcctgcccgcaggaagacctgatgaagattaacccggtctattatgcgggggtggatatttcgtctattcagcctgtgtttgtatcgcggatgccgcgccataaggtgacaggtgcggcacacaaggaaacaataaaaagtcgcctggatgatactcacgttgtacagcgtaggaatatcaccgaactgaaattggataaggacggtgaaattgcgggctactttaaccgcagcagcgatacattgctgtacaatgcactgaaggccagattgcttgcctttggcggggatgggaaggaagcgtttgcagaaccgttttacaagccgcgcgcggatggcacacccggggcacgagttcaaaaagtgaagatttgcgataaagtgaccagtacagttccggttcatggtggaaagggtgtggctgataacgacacgatggtacgcatcgatgtgtactatgtgccgggagacggctattactggattcccgtctacgtggcggatacggtgaagccggagctgccgagtaaggcagtggttgcatataagagctctgctgaatggaaagagatgaaggatgaagatttccttttttctctttgccagcatgaccttgtacgcattgaaagcaaacgccttatgaaattcaaggtgcaacacagagatagtacactggagaaggaaatgccggtgaacaaaatactggcatactttgaaggtggggatattgcaacgggagctgttacgctgactacacatgatgatgcatatattgcaactggtcttggctttaagaccttgcaaaaggttcagaaatatcaggtcgatgtccttggcaattatacccctgtgaaaaaagaaaaacggcaaaccttccctgcccaacggaggtgaattatgtcctaccgctgtctgatgattgtgaaccctgcgcgcatccgctgcaaaaatgagcagctgttgattgaaacggaagaagttcactctgtgcccatcgaggacatcagtgccattgtactggaaagccgccaaagcacgatcacaacagcggctatggcggcgctggcacaaaacggtgtggtgactttctggtgcgatgaaacacatctgccgtgcggcatctcgctgccgtttgcacagcacagccgtcagctgggagtactgcgctggcagatggaattgaccctgccggcaaaaaagcggatgtggcagcaggtagtgacagcaaaaattcaaaaccaagcggagtgccttgcactttgcggcaaaacacaggaggcagcgtttctattcgggcgtgccaaggctgtgacgagcggcgacaaagataacgtagaggcaagcgccgcagcgtactactttccggctttatttggtgagggctacacccgccgcaacgaggatacgcgaaatgcagcactgaattatgcctacgcgattttgcggggctatatggcgcgctgtctgacggtgtatggttttcagccgtgcctgggtctgcaccatgacagcgagctgaaccaatttaatctggcggatgacctgatggagccgttccggcccgtggcggatttgtatgtggcagcaaatgtggccgaggatgcagcattgacacccatactgaagggaaagcttgtaaacctgttgaatgcggatattctttccggcgggcagcaccacagcgttgcctatgcaatggaacgcctggtgcaaggtctgcgtggacaagccctgctgttacccaaattgcttgaatacaagcagcatagctatgagtaaatttatgcggatgattgtcttttttgacctgcctgtgcagacaaagactgaaaggcggcatgcgacggcgtttcggaattttttgctgaaggacggataccacatgctgcaattctctgtgtacgcgagggtgtgcaacggcaacgacgccgtgcagaaacacgaaagccgtttgagggcatccttgccgccaaacggctccattcgcctgcttgtcgttacagaaaagcagtaccagtctattcagattcttctgggaaattatcagccggaagaagccccttttgtatgtgaacagctgagttttttctaaaacaaaaagcgcatcggaccgcaatccgatgcgctttttgcatagcctattataccataccaagagctattagggaactatgactgccgctgtcagcgctggcaaccaaactgcattataccataccaagagctattagggaactatgaccttgaagctcggctatggcggcacaaaaacattataccataccaagagctattagggaactatgactatccccgaagcaatgaaaaccgcgctggcattataccataccaagagctattaggaaactatgacggagccgacaaccctcctgatatacgccccattataccataccaagagctattagggaactatgacaacctgcccggcccactactccatgctcacattataccataccaagagctattagggaactatgacggacttttccatatcggcaacggtttcatcattataccataccaagagctattagggaactatgacacaacgatacaacgtacaaacaagcacaacattataccataccaagagctattagggaactatgacccgcagcgttccagcgttgtgtccgcccttattataccataccaagagctattagggaactatgaccttagattctgagtccccctgccgccttgcattataccataccaagagctattagggaactatgacagttgacctcaccttgctgccactttacaaattataccataccaagagctattagggaactatgactgcataagcgtctatggctttttgcatggcattataccataccaagagctattagggaactatgacgctgtgcagcggcaaggcaaagacactcagattataccataccaagagctattagggaactatgacattcaagcgtcctattggcgagtggaactgattataccataccaagagctattagggaactatgattttcagaaaatcgataatacactccgatgcactataccatatcagcacaatatgcgcagaatctaccacaaattttccccgcaggtcttgcaacggcctgcgggttttgttataatttaggtttgttgagcaacttaggattttaggctccgctgccggctgctggtcggcagcgcaaaccccgcaaggctggcggtcttgcgtgtggtcaaaatctatccgccggagtattgtatgaatatgaaaaatctgtccgtccgtcgccttgtgcgctgcgctgtcattgcggctgtctatgtggtcgtctgccttgtgctggccccgttcagctacggcgcggtgcaggtccgcgtggccgaggccctctgcctgctgccggtgttcggcgccgagtatatcgtcggcgtcacgctgggctgctttttggcaaatctgctcggctccaccgtcgttgacgtggtgttcggcacgctggcgaccctgctggcctgccttgtgacctacaagctgcgcgacatccgcgtgaaagggctggccattccggcatccctgccgcccgttgtctttaatatgatcattgtcggcgcgttcgagatcaccttcttcttctcggacggcgaacccacggcaatgctggcggtgttcaatgccgttactgtcggcattggcgagctcatcagctgcacgattctgggtgtggcgctcgtcaagctgatcgaaagcaacgcgggtctgaacaaaatttttacagaagaataaggcaacaccgcacaattctaagtgccgatacggcgagcgaggcacgtcagatgctaagcaaaaagcgcaggcaatactttgtgtattacc

SEQ ID NO: 798 - DNA, 7503 bp, synthetic construct
  source 1..7503: mol_type = other DNA
  misc_feature 1..7503: note = Synthetic
ccatgacctgccgggctttggccgggcggcgctgtcggtcatcgtgccggtgctctcgacgctgggcgtgcagaccgtggcactgcctacggcggtgctgtccacccacacggggggcttaggcaccccggctaagctggccaaccccggctacggccccgcggcactggaacattatcatcggctgggcgtaaaatttgactgcatctactcgggctatctggcggacgccgcgcaggcaaagctcgtagaacaggcgtttgagctgtggccccgcgcgttcaaggtcgtggacccggtgctgggcgacggagggcggctgtacagcggtctgggggccgacatggtgcccgccatgtatagtttgtgcagcaaggcggatctgatcgtccccaatgtgaccgaggccgcgctgctgctgggcgacccgctgcccggtgtgggcagtgccgagcaggccgccgcacaggcggcccggctgacccgcgtagcgccgcaggtcgttgtgaccggcgtgacgggcatcggcggcggacgctacataggctgtgtgggcgcggcccgcggcggcgagggctatgccgtaaaaacgccgctgcagccgcggatgttccacggcacgggcgatatttttgccgccgtgctcgtcgggcgcattttgcggggcaacgtcccccaggctgccgtacaggcagctgccgccttcgtagccgagtgcatcaggcagacgcctgagggagccgacgagcggctgggcgtctggctggagaacgccctgccgaaactgcggcaggagtaagaccatgagactgccgcgagacaaggatgtccttgaaaacgcccgagcgctgcgaaaaagtatgacgcgggaggaacgccatctgtggtatgattttctgcgcggatattcggcgcgctttgtacggcagaaggttgtaggacgttatattctggatttttattgcgatgcggcaggtctggcgatagagctggacggcagccagcattatgaagcggcgggacagctgcacgatgcacagcgcacggaatatctggagggcttcggaatcagggtgctgcggttttccaatctggatgtgatgcagcattttgagggcgtatgccgtgtgattgataacgccgtgaaaagcctcccttagaggggaggtggccgaaggccggaggggtggccgggagccgacccatgaacggcgtgccgcccggcccctcacccggcgctgcggcgccacccgcccccaagggagggctaaagttatagaacgaggacttgtaaatttatgccaaccttaaacattgtactggtcgagccgcagatcccgcagaactccggcaatatcgcgcggacctgcgcggtgacgggagcgcggctgcatatagtcggcccgatgggctttaccatcgacgacaaaaaattaaagcgcgccgggcttgactattggcaccagcttgatataacatattatcaagatcaggcggacttttttgccaaaaacagtggtccgtttttctacttcacgtccaagggcccgcgccgccatgtggatgtgacctaccccgacggcgcgtatctcgtctttgggcgcgaggatgccggcctgcccgaggaactgctggccgcgcatgaggccgactgcgtgcgtatgccgatgcgcaggggcgagcgatgcctgaacctgtccaacgcggtggcagtgggcgtgtacgaagcattgcgtcaatgggattttgccggtttggagacccacgggcagttgacccgatacgaatggagtgaggatgtaaaatgagcaagataggttttctgacagattcctgttccgacattccgcaggagcttgcggataagtacggcatcgaggtcgtaggcttccccatcaaccttgacggtgtggagtatatggagcgcaaggactttaccaacgaccagttttaccagatgatgcgcgacgcccagggcgtgcccaccaccgccgccatcacccagctgcagttctgcgatatttacgcccgctatgcggacgagggctacaccgacctggtgtatctgagcatcaacgcgggcggctccagcacctacaacaacgccgtcaaggccatggagctgctggaggaggagcgccccggctacacgatgaagattcaggtcatcgacagccacacctactcgatgccctacggctggtatttctgcgagtgcgcccgcaaggtgcgcaacggcggtgagctggcctcctgcgtggccgagctaaagaagaagctggactgcgttgagatctgtctggccgcctacagcctgaagcagatgaagaagtcgggccgcgtcagcgccgccgccgctgtggtcggcgacctgctgggcatccgccccatcatcagcctgaatgcgggcgtctccaaggtagagagcaaggtccgcggcgacgccgccgtgcccgtagccatgatcaaatgggtggagagccgcgtcgattcgatgaaggacacgccctacatggtggcctacacgtccagcaccgccaagcgtgacgagctggtcaagctgtgcaaaaaggcgtttggccatgcaccgctgatcgtgttccagctcggcggcgttgtcagcgccaacaccggccccgacggcattgccatcgtctacgagggcaagccccgcaatctcgaggcttatgcgccggagttgccgtaatatttttcggcagcataggtaaggtcttgcactttgcctgacaatgtagtataatacagacagttcttataccataccaagaactattatggttgctatgataaggtcataggaccgtaaagctctgacgccctgctatttggcagggcgtcatcttttttgcctaaatttcgtttaaattgtcagttgccaaataatgccataatgcgctatgatagtagaaaagtgaaaggatgtgcaaaaaaatgaagcatccctatggaattggtctggatattggcattgcgtccgtcggctgggcggtggtggcactgaatgaaaacgcggagccctatggtctgatccgatgtggctctcgcatatttgataaggccgaacagcccaaaacaggcgacagccttgctgccccgcgccgtgaggcccgcagcgcccgccgcaggctgcgccgccgcagcctgcgcaaggcggatctgtacgagctgatggagaaaaacggtctgcccggtaaggcggaaatagaacaggctgtgcaagcgggacatctgccggatgtctatgcgctgcgtgttcaggcgttggatggcccggtgacagcactggattttgcccgtatactgctgcacctgatgcagcgcaggggctttcgcagtaaccgcaaggcagacgatgcacaaaaagacggtaagctgctgcaggcaattgacgcgaacacccgacgtatggaggcaaaccggtaccgtactgtcggtgagatgatgtaccgcgaccctgtgtttgcagagcacaagcgcaacaaagcggaaaattatctttccacagtcaagcacgaccaaatcatagacgaggccagactggtttttgcagcacagcgtcaatacggtgcgacatgggcttcgccggagatggaggcagagtacctttgtattctgacacgccagcgctcctttgcggaaggtccgggcaaaggcagcccgtatagcggcagcaacagggtcggcacctgcacgctggagggaaagagcgagcagcgggcagccaaggcggccttctcgtttgaatattttacgctgctgcaaaaaatcaatcatatccgcattgcgaaaaacggaaccagccgcacgctgacaccggcagagcgacaggtactgctttccgtgtgcagccagacggacaagctggattttgcccggatccgcaaggcgttggcactgccggaagaagcacggttcaacatggtgcggtatcgcggggagcagacggcagaagcctgcgaaaagaaagaaaaaataagcgctgacgaacccggaaaacgaggataagctgcgggaggcattaaaacaggcggagtttgaaccgctggaaatagaagcactgctgacgctgcccagctttgcgggatatggacacatttcggtcaaggcgtgccgcaagctgatcccctatctggaacagggcatgaactataacgatgcctgccaggcagccggatatgattttcagggaaggcaaaacggcgaaaaagcgcagttcctgccggcctcaacggaggaaatggaggatattacaagcccggtggtgcgccgtgcagtggcacagacgatcaaggtcgtcaatgcgatcatccgcgagcagggcgaaagtccggtcagtatccatctggagctggcaagagagatgaataagaacttccagcagcgcagcgagttggacaaggcgatgcgggataacagtgcggaaaatgaacgcctgatgaaagagctgaatgagctttttccgggacgcaccgttaccgggcaggaccttgtaaaatatcgtctgtggaaagagcaggacgggcgctgtgcgtattcgatacagccgttggagctggacaaggttattacagtctccggctatgccgaggtagaccatattgtcccttatagcataagctttgatgaccgccgcacaaataaggtgctggtgctggcgtcggagaaccgtcagaagggaaaccgtctgccgctgcaatacctgcagggaaaacgacgggacgactttattgtgtacaccaaagcaaacgtaaagaatttccgcaagcgccagaacctattgaaggaaaggctgagcgaggaggatggcaagggctatatccagcgcaacctgcaggatacgcagtatattgcggcttttatgctgaactatatccgcaatcatcttgcgtttgcagactgttccggggcaggcaaacggcgggtcgttgcggtaaatggcgccgttacggcgtttttgcgcaagcgctggggtcttagcaaggtgcgtgccgacggcgatctgcaccatgcagcggacgcggcggtgattgcctgtacgacacaggggatgataaagcgggtatctgacttttgcaagcgtgcagagacgacggcggtgcgtaatgagcacttccctgaaccttggccgcacttccgtgatgagctgacgcagcgattgtcagcctgcccgcaggaaaatttgatgcagatcaacccggtctattatgcgacggtggatatttcgtctattcagcctgtgtttgtatcgcggatgccgcgccataaggtgacaggtgcggcacacaaggaaacaataaaaagtcgcctggatgatactcacgttgtacagcgtaggaatatcaccgaactgaaattggataaggacggtgaaattgcgggctactttaaccgcagcagcgatacattgctgtacaatgcactgaaggccagattgcttgcctttggcggggatgggaagaaagcgtttgcagaaccgttttacaagccgcgcgcggatggcacacccggggcacgagttcaaaaagtgaagatttgcgataaagtgaccagtacagttccggttcatggtggaaagggtgtggctgataacgacacgatggtacgcatggatgtctattttgtgccgggcgacggctattactgggtgccgatctatgtggcagatacggtgaaattggaattgcccaataaagcggttgtacagggaaaaagctatgcagagtggaaggaaatggacgaagaaaacttcttgttctcactttgccagcatgaccttgtacgcattgaaagcaaacgccttatgaaattcaaggtgcaaaacagagatagtacactggaaaaggaaatgccggtgaacaaaatactggcatactttgaaggcggaaatatttcgacgggtgccatcacggtaactacgcatgatgatgcatatattgcagacggtcttggctttaagaccttgcaaaaggttcagaaatatcaggtcgatgtccttggcaattatacccctgtgaaaaaagaaaaacggcaaactttccctgcccaacggaggtgaattatgtcctaccgctgtctgatgatcgtgaaccctgcgcgcatccgctgcaaaaatgagcagctgttgattgaaacggaagaagttcactctgtgcccatcgaagacatcagtgccattgtactggaaagccgccaaagcacgatcacaacagcggctatggcggcgttggcacaaaacggtgtggtgactttctggtgcgatgaaacacctgggagtactgcgctggcagatggaattgaccctgccggcaaaaaaacggatgtggcagcaggtagtgacagcaaaaattcaaaaccaagcggagtgtcttgcactttgcggcaaaacacaggaggcggcgtttctattcgggcgtgccaaggctgtgacgagcggcgacaaagataacgtagaggcaagcgccgcagcgtactactttccggctttatttggtgagggctacacccgccgcaatgaagatacgcgaaatgctgcactgaattatgcctacgcgattttgcggggctatatggcgcgctgcctgacggtgtatggttttcagccgtgcctgggtctgcaccatgacagcgagctgaaccaatttaatctggcggatgacctgatggagccgttccggcccgtggcggatttgtacgtggcagcaaatgtggccgaggatgcagcattgacacccatactgaagggaaagcttgtaaacctgttgaatgcggatattctttccggcgggcagcaccacagcgttgcctatgcaatggaacgcctggtgcaaggtctgcgtggacaagccctgctgttacccaaattgcttgaatacaagcagcatagctatgagtaaatttatgcggatgattgtcttttttgacctgcctgtgcagacaaagactgaaaggcggcatgcgacggcgttccggaattttttgctgaaggacggataccacatgctgcaattctctgtgtacgcgagggtgtgcaactgcaacgacgccgtgaagaaacacgaaagccgtttgagggcatccttgccgccaaacggctccattcgcctgcttgtcgttacagaaaagcagtaccagtctattcagattcttctgggaaattatcagccggaagaagccccttttgtatgtgaacagttgagttttttctaaaacaaaaagcgcatcggaccgcaatccgatgcgctttttgcatagcctattataccataccaagagctattagggaactatgacactagttgctgttttgtcatggggtcacctattataccataccaagagctattagggaactatgactctcgtagtgggctgtgcaccgtcgctcttattataccataccaagagctattagggaactatgacgccgtggtgagcctagggagcatcaaatttattataccataccaagagctattagggaac

SEQ ID NO: 799 - DNA, 6306 bp, synthetic construct
  misc_feature 1..6306: note = Synthetic
  source 1..6306: mol_type = other DNA
gaccaccgagatctacactctttccctacacgacgctcttccgatctgattttctgcgcggatattcgccgcgctttgtacggcagaaggttgtaggacgttatattctggatttttattgcgatgcggcaggtctggcgatagagctggacggcagccagcattatgaagcggcgggacagctgcacgatgcacagcgcacggaatatctggagggcttcggaatcagagtgctgcggttttccaatctggatgtgatgcagcattttgagggcgtatgccgtgtgattgataacgccgtgaaaagcctcccctagaggggaggtggccgaaggccggaggggtggccgggagccgacccatgaacggcgtgccgcccggcccctcacccggcgctgcggcgccaccctcccccaagggagggctaaagttatagaacgaggacttgtaaatttatgccaaccttaaacattgtactggtcgagccgcagatcccgcagaactccggcaatatcgcgcggacctgcgcggtgacgggagcgcggctgcatatagtcggcccgatgggctttaccatcgacgacaaaaaattaaagcgcgccgggcttgactattggcaccagcttgatataacatattatcaagatcaggcggacttttttgccaaaaacagtggtccgtttttctacttcacgtccaagggcccgcgccgccatgtggatgtgacctaccccgacggcgcgtatctcgtctttgggcgtgaggatgccggcctgcccgaggagctgctggccgcgcatgaggccgactgcgtgcgtatgccgatgcgcaggggcgagcgctgcctgaacctgtccaacgcggtggcagtgggcgtgtacgaagcattgcgtcaatgggattttgccggtttggagactcacgggcagttgacccgatacgaatggagtgaggatgtaaaatgagcaagataggttttctgacagattcctgttccgacattccgcaggagcttgcggataagtacggcatcgaggtcgtgggcttccccatcaaccttgacggtgtggagtatatggagcgcaaggactttaccaacgaccagttttaccagatgatgcgcgacgcccagggcgtgcccaccaccgccgccattacccagctgcagttctgcgatatttacgcccgctatgcggacgagggctacaccgacctggtgtacctgagcatcaacgcgggcggctccagcacctacaacaacgccgtcaaggccatggagctgttggaggaggagcgccccggctacacgatgaagattcaggtcatcgacagccacacctactcgatgccctacggctggtatttctgtgagtgcgcccgcaaggtgcgcaacggcggtgagctggactcctgcgtggccgagctgaagcagaagctggactgcgttgagatctgtctggccgcctacagcctgaagcagatgaagaagtcgggccgcgtcagcgccgccgccgctgtggtcggcgacctgctgggcatccgccccatcatcagcctgaatgcgggcgtctccaaggtcgagagcaaggtccgcggcgacgccgccgtgcccgccgccatgatcaaatgggtggagagccgcgtcgattcgatgaaggacacgccctacatggtggcctacacgtccagcaccgccaaacgtgacgagctggtcaagctgtgcaaaaaggcgtttggacatgcaccgctgatcgtgttccagctcggcggcgttgtcagcgccaacaccggccccgacggcatcgccatcgtctacgagggcaagccccgcaatctcgaggcttatgcgccggagctgccgtaatatttttcggcagcataggtaaggtcttgcactttgcctgacaatgtagtataatacagacagttcttataccataccaagaactattatggttgctatgataaggtcataggaccgtaaagctctgacgccctgctatttggcagggcgtcatcttttttgcctaaatttcgtttaaattgtcagttgcccaataatgccataatgcgctatgatagtagaaaagtgaaaggatgtgcaaaaaaaatgaagcatccctatggaattggtctggatattggcattgcgtccgtcggctgggcggtggtggcactgaatgaaaacgcggagccctatggtctgatccgatgcggctcacgcatatttgataaggccgaacagcccaaaacaggcgacagccttgctgccccgcgccgtgaggcccgcagcgcccgccgcaggctgcgccgccgcagcctgcgcaaggcggatctgtacgagctgatggagaaaaacggtctgcccggtaaggcggaaatagagcaggctgtgcaagcgggacatctgccggatgtctatgcgctgcgtgttcaggcgttggatggcccggtgacagcactggattttgcccgtatactgctgcacctgatgcagcgcaggggctttcgcagtaaccgcaaggcagacgatgcacaaaaagacggtaagctgctgcaggcaattgacgcgaacacccgacgtatggaggcaaaccggtaccgtactgtcggcgagatgatgtaccgcgaccctgtgtttgcagagcacaagcgcaacaaagcggaaaattatctttccaccgtcaaacgcgaccaaatcatagacgaggccagactggtttttgcagcacagcgtcaatacggtgcgacatgggcttcgccggagatggaggcagagtacctttgtattctgacacgccagcgctcctttgcggaaggtccgggcaaaggcagcccgtatagcggcaccaacagggtcggcacctgcacgctggagggaaagagcgagcagcgggcagccaaggcggccttctcgtttgaatattttacgctgctgcaaaaaatcaatcatatccgcattgcggaaaacggaaccagccgcacgctgacaccggcagagcgacaggtactgctttctgcgtgctaccagacggacaagctggattttgcccggatccgcaaggcgttggcactgccggaagaagcacggttcaacatggtgcggtatcgcggggagcagacggcagaagcctgcgaaaagaaagaaaaaataacggcactcccctgctaccacaagatgcgtaaggcgctgaataccctgcggaaggatcatatccgcaatatcagccgcgagcagctggatgccgccggagctgcgctgacgaacccggaaaacgaggataagctgcgggaggcattgcaacaggcggagtttgaaccgctggaaatagaagcactgctgacgctgcccagctttgcgggatatggacacatttcggtcaaggcgtgccgcaagctgatcccctatctggaacagggcatgaactataacgatgcctgccaggcagccggatatgattttcagggaaggcaaaacggcgaaaaagcgcagttcctgccggcctcaacggaggaaatggaggatattacaagcccggtggtgcgccgtgcagtggcacagacgatcaaggtcgtcaatgcgatcatccgcgagcagggcgaaagtccggtcagtatccatctggagctggcaagagagatgaataagaacttccagcagcgcagcgagttggacaaggcgatgcgggataacagtgcggaaaatgaacgcctgatgaaagagctgaatgagctttttccgggacgcaccgttaccgggcaggatcttgtaaaatatcgtctgtggaaagagcaggacgggcgctgtgcgtattcgatacagccgttggagctggacaaggttattacagtctccggctatgccgaggtagaccacattgtcccttatagcataagctttgatgaccgccgtacaaataaggtgctggtgctggcttcggagaaccgtcagaagggaaaccgtctgccgctgcaatacctgcagggaaaacgacgggacgactttattgtgtacaccaaagcgaacgtaaaaaatttccgcaagcgccagaacctattgaaggaaaggctgagcgaggaggacggcaagggctatatccagcgcaacctgcaggatacgcagtatattgcggtttttatgctgaactatatccgcaatcatcttgcgtttgcagactgttccggggcgggcaaacggcgggtcgttgcggtaaatggcgccgttacggcgtttttgcgcaagcgctggggtcttagcaaggtgcgtgccgacggcgatctgcaccatgcagcggacgcggcggtgattgcctgtacgacacaggggatgataaagcgggtatctgacttttgcaagcgtgccgagacgacggcggtgcgtaatgagcacttccccgaaccgtggccgcgcttccgtgatgagctgacgcagcgattgtcggcctgcccgcaggaaaatttgatgcagatcaacccggtctattatgcgacggtggatatttcgtctattcagcctgtgtttgtatcgcggatgccgcgccataaggtgacaggtgcggcacacaaggaaacaataaaaagtcgcctggacgatactcatgttgtacagcgtaggaatatcaccgaactgaaattggataaggacggtgaaattgcgggctactttaaccgcagcagcgatacattgctgtacaatgcactgaaggccagattgcttgcctttggcggggatgggaagaaagcgtttgcagaatcattttacaagccgcgcgcggatggcacacccggggcgcgagttcaaaaagtgaagatttgcgataaagtgaccagtacagttccggttcatggtggaaagggtgtggccgataacgacacgatggtacgcatggatgtctattttgtgccgggcgacggctattactgggtgccgatctatgtggcagatacggtgaaattggaattgcccaataaagcggttgtacagggaaaaagctatgcagagtaccaggcagagaaaacaggtaccagttggaaaggcaagctgaaaattgccgttgatacacttatcccccaagtagcaagttttgaagaattattgcagcggttacaggcggcgggctatgagataaagccggggaaatatgtgtcatgccgcgcccccggacaggaacgcttcacccgtcttaaaaccctcggcgcggattatacagaggaagccataagggaacggatagcgggcagacggacaaaggcggcgaaagctcccaaagagcagcgcggcgtatcgctgcttattgacattgaaaacagtatcaaggcacaagagagccggggctatgaacagtgggcgaaaatccataatctgaaactggctgcaaagactatgaatttcttgacagaacataagattgagcagtacgcagatttagtcagccggattgaggaagtaaatgcggaaaatgaaaagacagcagacgcattaaagagcgtggaaaagcgtcttgcagatatggcggtgctgatgaagcacgttactacctaccaaaagacaaaacctgtctatgaagcataccgcagggcaaaggataaggacgcataccgggcaaagcaggaaagcagtctgatactccatgaagcggcagtaaagacactgaaagcggcgggcgttactaaactccccaatcttgccgccatgcaggaagaatacgggaaactacaagcgcaaaaagaagccctttacgctgattatggcaagctgaaaaaacaggtcaaggaatacgacgttatcaaacagaacatagacaatattttgcggcaaggcaaagagccggaacggaagaaaggaaaggaacgggaataattatgaaaatggttggtattacaccatgttacagaataacattagaaaatggcagttatggcgtagaaacttatattaacgcagacagtaaaatccaaattacttttgaggacggaaatacacttatcggatatatagaatgtgtggaatatggaacttattccgatgaaaatgatactctggttataaggggagagaatggagagctgtatatcctattggaaaaccgaataaaggatatagaagaactgcacgaataaagtaaaagaacagggcgcagacagccaacaaaagactgtccgcgccctgttttatgtaggtgcgtttttggtatctgttacgcaatagaacgtcatttttaggggataaggtataaaacccttgccgcgtcattttcaagcactgaaagccccgtaaatcaaggctttttttgcccttatcgcgta

SEQ ID NO: 800 - DNA, 5751 bp, synthetic construct
  misc_feature 1..5751: note = Synthetic
  source 1..5751: mol_type = other DNA
ggcggcgtctgccgcgcggtctctcttttgcgttgccagaacaacggaagcaaacaccttatgcctcatgtcctattttagtcaggaaatcgctgcccatcacccatttttcgttttccagcgtcacaacggactcgagtttccaggtgacggtctctattttggttttgcggaagaaatggaggaaacgggttcgtcgctcgatcgcagcggtcacgttggtttcgatcttcatctggttggattcgttggttacggttgtggagacgctgctcacggtgatgctggtgattccggtgttggtgtcgctgttcaggtaggcatcgcagagctgctggtactgttctttggcggttttctgtacggcggtgtcggcggaaaattcatttttgatggtgctgaaggattttccggcggctgcggctgtgaataccttgtccagggactcttctgcgcggtcggcgatggttttgccggtggaatcgttgagttttaaatccggcaggaattccatgctgctgttgtcctgcacgaggacgatctcgcggtaccctgcggaaggatcatatccgcaatatcagccgcgagcagctggatgccgccggagctgcgctgacgaacccggaaaacgaggataagctgcgcgaggcattgaaacaggcggagtttgaaccgctggaaatagaagcactgctgacgctgcccagctttgcgggatatgggcacatttcggtcaaggcgtgccgcaagctgatcccttatctggaacagggcatgaactataacgatgcctgccaggcagccggatatgattttcagggaaggcaaaacggcgaaaaagcgcagttcctgccggcctcaacggaggaaatggaggatattacaagcccggtggtgcgccgtgcagtggcacagacgatcaaggtcgttaatgcgatcatccgcgagcagggcgaaagcccggtcagtatccatctggagctggcaagagagatgaataagaacttccagcagcgcagcgagttggacaaggcgatgcgggataacagtgcggaaaatgaacgcctgatgaaagagctgaatgagctttttccgggacgcaccgttaccgggcaggatcttgtaaaatatcgtctgtggaaagagcaggacgggcgctgtgcgtattcgatacagccgttggagctggacaaggttattacagtctccggctatgccgaggtagaccatatcatcccttatagcataagctttgatgaccgccgcacaaataaggtgctggtgctggcatcggagaaccgtcagaagggaaaccgtctgccgctgcaatacctgcagggaaaacgacgggacgactttattgtgtacaccaaagcaaacgtaaagaatttccgcaagcgccagaacctattgaaggaaaggctgagcgaggaggacggcaagggctatatccagcgcaacctgcaggatacgcagtatattgcggcttttatgctgaactatatccgcaatcatcttgcgtttgcagactgttccggggcgggcaaacggcgggttgttgcggtaaatggcgccgttacggcgtttttgcgcaagcgctggggtcttagcaaggtgcgtgccgacggcgatctgcaccatgcagcggacgcggcggtcattgcctgtacgacacaggggatgataaagcgggtatctgacttttgcaagcgtgcagagacgacggcggtgcgtaatgagcacttccctgaaccttggccgcacttccgtgatgagctgacgcagcgattgtcagcctgcccgcaggaagacctgatgaagatcaacccggtctattatgcgacggtagatatttcgtctattcagcctgtgtttgtatcgcggatgccgcgccataaggtgacaggtgcggcacacgaagagatgattcgaagccaagtgaacgaaaaatatacagcagtgcgaaaatcaattacagaattgtcactggataaggatggaaaaatcaaagactattttaatccaagcagcgatacgcttttgtacgaagcactgaagaagcgtctgacagaatttggcggaaacgcaaagaaagcctttgcggaaccgttttataagccacgtgcggacggaacccccggcgcacaggtgcgcaaagtgaaggttgtcgcaaaaatgagcaacacaattcctgtccgcagcggcggaggcgttgcaaaaggcggcgacatgatccgtatagatgtgtattatgtccccggtgatggttattattgggtgccgatttatgtggcggatacggtgaaagaaaccttaccgaataaggcggttgtgcgagacaaaacaatggaagagtggaaagaaatgaaagaagatgacttcctgttctcactttatagcaatgaccttattttagtggaaagagataaaccaatctgcttttcacttatgcatgaagatagcacacttccgaaaaagtatgagacgaagaaggaactggtttattacaaaggcggagatatatcaaacggaggaattaggatagaaacccatgaaggggcatacttccttaaaagtttgacgtttggcatagtacaaaaagttcagaaatatcaggtcgatgtccttggcaattatacccctgttaaaaaagaaaaacggcaaaccttccctgcccaacggaggtgaattatgtcctaccgctgcctgatgatcgtgaaccctgcgcgcatccgctgcaaaaatgagcagctgttgattgaaacggaagaagttcactctgtgcccatcgaggacatcagtgccattgtactggaaagccgccaaagcacgatcacaacagcggctatggcggcgctggcacaaaacggtgtggtgactttctggtgcgatgaaacacatctgccgtgcggcatctcgctgccgtttgcacagcacagccgtcagctgggagtactgcgctggcagatggaattgaccctgccggcaaaaaagcggatgtggcagcaggtcgtgacagcaaaaattcaaaaccaagcggagtgccttgcactttgcggcaaaacacaggaggcggcgtttctattcgggcgtgccaaggctgtgacgagcggcgacaaagataacgtagaggcaagcgccgcagcgtactacttcccggctttatttggtgagggctacacccgccgcaatgaagatacgcgaaatgctgcactgaattatgcctacgcgattttgcggggctatatggcgcgctgcctgacggtgtatggttttcagccgtgcctgggtctgcaccatgacagtgagctgaaccaatttaatctggcggatgacctgatggagccgttccggcccgtggcggatttgtacgtggcagcaaatgtggccgaggatgcagcattgacacccatactgaagggaaagcttgtaaacctgttgaatgcggatattctttccggcgggcagcaccacagcgttgcctatgcaatggaacgcctggtgcaaggtctgcgtggacaagccctgctgttacccaaattgcttgaatacaagcagcatagctatgagtaaatttatgcggattattgtcttttttgacctgcctgtgcagacaaagacggaaaggcggcatgcgacggcgttccggaattttttgctgaaggacggataccacatgctgcaattctctgtgtacgcgagggtgtgcaacggcaacgacgccgtgaagaaacacgaaagccgtttgagggcatccttgccgccaaacggctccattcgcctgcttgtcgttacagaaaagcagtaccagtctattcagattcttctgggaaattatcagccggaagaagccccttttgtatgtgaacagttgagttttttctaaaacaaaaagcgcatcggaccgcaatccgatgcgctttttgcatagcctattataccataccaagagctattagggaactatgaccgttccgagggtgctacggcgcgcgggagtattataccataccaagagctattagggaactatgactgcctgttatgtttggaaagagtaacgcacattataccataccaagagctattagggaactatgaccctcaacggctggcggatcaaaggaaagggattataccataccaagagctattagggaactatgacgtcaggacggcgagagcgcaaaggcctatcattataccataccaagagctattagggaactatgacggcctgcgcggctgttttgtggacgtgccaattataccataccaagagctattagggaactatgaccgcttacccgcgtatgaccgccgtcaagctattataccataccaagagctattagggaactatgacgattggcgggcatggggcgcctagccccataattataccataccaagagctattagggaactatgacctacgagaaaaaagcccagcccgactacgcattataccataccaagagctattagagaactatgattttcagataatcgacaattcactccgatgtattataccatatcagcacaatatgcgcagaatctaccacaaattttccccgcaggtcttgcaacggcctgcgggttttgttataatttaggtttgttgagcaacttaggattttaggctccgctgccggctgctggtcggcagcgcaaaccccgcaaggctggcggtcttgcgcgtggtcaaaatctatccgccggagtattgtatgaatatgaaaaatctgtccgtccgtcgtcttgtgcgctgcgctgtcattgcggctgtctatgtggtcgtctgccttgtgctggccccgttcagctacggcgcggtgcaggtccgcgtggccgaggccctctgcctgctgccggtgttcggcgccgagtatatcgtcggcgtcacgctgggctgctttttggcaaatctgctcggctccaccgtcgttgacgtggtgttcggcacgctggcgaccctgctggcctgccttgtgacctacaagctgcgcgacatccgcgtgaaggggctggccattccggcatccctgccgcccgttgtctttaatatgatcattgttggcgcgttcgagatcaccttcttcttctcggacggcgcacccacggcgatgctggcggtgttcaatgccgttactgtcggcattggcgagctcatcagctgcacgattctgggtgtggcgctcgtcaagctgatcgaaagcaacgcgggtctgaacaaaatttttacagaagaataaggcaacaccgcacaattctaagtgccgatacggcgagcgaggcacgtcagatgctaagcaaaaagcgcaggcaatactttgtgtattaccgagcatttttgcgacgcaggtgacgtgccgaagccgccggagcggtgcttaagcccgtggggcgggaattgtgcggtgctgccgtgagaggtaacatctatgtgcccggaactgattttgtgggattggaacggtaccctgctcgatgatgtcgatctctgcgtggacgcgctcaaccgtctgctggcaggattcggctacccgcagcggtatgaccacgagcggtaccgggccatttttggctttcccatcgaggaatattacgtccgcgcagggtttgactttacaaagcacagctttgcagaactggccgaaaaatacatggaggactacgtccccgccagtgcggcctgcccgctggcagacggcgccattgacgcgctggaggcgtttaaggccgcgg

SEQ ID NO: 801 - DNA, 5264 bp, synthetic construct
  source 1..5264: mol_type = other DNA
  misc_feature 1..5264: note = Synthetic
atacggaattgtaggacgctcattatccaaaccggcgcagatcattgacatatttttatctgcataggatttttcaatcatatttatttccgtgcggccaaagacaggtatctttgccgctgtcgttcggcctctttcttccggcgcatagctgccacttgatttgccctatacttacatcctattattcatatttctggccttgttttagctttccctttcccatataatcaaaacaaagaaaaaatctccgctgtaacattttgcggacatttgactgatatgctaacacaaaaaggaagtgagaatatgaaacaaatcctgattgtcgaggacgacagctttttccttaaaatgctatgctataatcttgcagcagatggttacggaataacttctgctttgaatgcaagaaccgctatcgaggctttacgaacacgggagtttgatttagtgctgcttgacatcaatctgccggacgggaacgggtttgaactgtgtaagctgataaagccggatcaccctgataccattgttatttttctaactgcaaacgatcaggaaagcgaccagatacgcggttacgaagtgggcgcggtagattatattaccaagccttttgtcataggagccttgcagcggaaaatcaaagccatgttttctatgctggaacatcatagacccgcaaaggatatttacgacgacggtatgctgtttctggatttctcggagcagacagcttctttgaatgggaaaccgttgacgctctccccgatggaatataaaatgctgaacctgttccgtaaaaatcctaaacaggtacttacccgtcagcagcttttagaaaagctatgggacgtagacgaaaaatttgttgacgagcatacgttgacaacgacagtaagccgtattcgcagcaaaattgaagcagatggcggcacgccctatatcaagacgatatacggcatgggctatcaatggacgggaggcgaagcaaaatgaaaacccgtcctctctctgttaagcgtctgtttctatggatttgtattgggctgctactctccatgacagcgatcacgcttatcttattttctttaacgcttgaagtcgcggtattgatagtaggagccgcgcttatcggttgcgcccttgtatggctctttgtgttgacgcaggcttttggaaaacggctttccctatttacttctgaactatgcaaaacccttgataatatgatggatggcgacgaggaaccgaaaccggcagacaacagcgaaaccctctttgcccgtatcaatcaccgcctaactcgtctttatcagattatgcaggaaaaccgccgcaaagtagaggaagaacggcaggaattacaaacccttgtgtcggatatttcccaccaagtaaaaacgcccgttagtaatttgaaaatggtaacagatacgttgctaacaaggccggtaacagaagccgagcgtattgattttattaagggcgtccgcagccagacggacaagctggattttgcccggatccgcaaggcgttggcactgccggaagaagcacggttcaacatggtgcggtatcgcggggaacagacggcagaagcctgcgaaaagaaagaaaaaataacggcactcccctgctaccacaagatgcgtaaggcgctgaataccctgcggaaggatcatatccgcaatatcagccgcgagcagctggatgccgccggagctgcgctgacgaacccggaaaacgaggataagctgcgcaaggcattggaacaggcggagtttgaaccgctggaaatagaagcactgctgacgctgcccagctttgcgggatatggacacatttcggtcaaggcgtgccgcaagctgatcccctatctggaacagggcatgaactataacgatgcctgccaggcagccggatatgattttcagggaaggcaaaacggcgaaaaagcgcagttcctgccggcctcaacggaggaaatggaggatattacaagcccggtggtgcgccgtgcagtggcacagacgatcaaggtcgtcaatgcaatcatccgcgagcagggcgaaagcccggtcagtatccatctggagctggcaagagagatgaataagaacttccagcagcgcagcgagttggacaaggcgatgcgggataacagtgcggaaaatgaacgcctgatgaaagagctgaatgagctttttccgggacgcaccgttaccgggcaggaccttgtaaaatatcgtctgtggaaagagcaggacgggcgctgtgcgtattcgatacagccgttggagctggacaaggttattacagtttccggctatgccgaggtagaccatatcgtcccttatagcataagctttgatgaccgccgtacaaataaggtactggtgctggaatcggagaaccgtcagaagggaaaccgtctgccgctgcaatacctgcagggaaaacggcgggacgactttattgtgtacaccaaaacaaacgtaaagaatttccgcaagcgccagaacctattgaaggaaaggctgagcgaggaggacggcaagggctatatccagcgcaacctgcaggatacgcagtatattgcggcttttatgctgaactatatccgcaatcatcttgcgtttgcagactgttccggggcaggcaaacggcgggtcgttgcggtaaatggcgccgttacggcgtttttgcgcaagcgctggggtcttggcaaggtgcgtgccgacggcgatctgcaccatgcagtggacgcggcggtcattgcctgtacgacacaggggatgataaagcgggtatctgacttttgcaagcgtgcagagacgacggcggtgcgtaatgagcatttccccgaaccttggccgcgcttccgtgatgagctgacgcagcgattgtcggcctgcccgcaggaaaatttgatgcaaatcaacccggtctattatgcgacggtggatatttcgtctattcagcctgtgtttgtatcgcggatgccgcgccataaggtgacaggtgcggcacacgaagagacgattcgaagccaagtgaacgaaaaatatacagcagtgcgaaaatcaattacagaattgtcactggataaggatggaaaaatcaaagactattttaatccaagcagcgatacgcttttgtatgaagcactgaagaagcgtctgacagaatttggcggaaacgcaaagaaagcctttgcggaaccgttttataagccacgtgcggacggcacccccggcgcacaggtgcgcaaagtgaaggttgtcgcaaaaatgaacaacacaattcctgtccgcagcggcggaggcgttgcaaaaggcggcaacatgatccgcatagatgtgtattatgttcccggtgatggttattattgggtgccgatttatgtggcggacacggtaaggccggaactgccaaacaaagcggtactgcgggggaaaagcatggaagattggaaagaaatgaaagaagaaaacttcctgttttcactttacgacaatgatctcattctcgtcgaaagagaggaaccgataaatttttcgctcgtcaatagtgacagtacacttccgaataagttctcggtaaagaaagtccttgtttattataagagcggaaatatatcgaatgctgcaatcaaagtggaaacgcatgatggggcgtatgtttttgaaggcatgacgtttggaaccgtacgaaaaatccagaaatatcaggtcgatgtccttggcaattatacccctgtgaaaaaagaaaaacggcaaaccttccctgcccaacggaggtgaattatgtcctaccgctgcctgatgatcgtgaaccctgcgcgtatccgctgcaaaaatgagcagctgttgattgaaacggaagaagttcactctgtgcccatcgaggacatcagtgccattgtactggaaagccgccaaagtatgatcacaacagcggctatggcggcgctggcacaaaacggtgtggtgactttctggtgcgatgaaacacatctgccgtgcggcatctcgctgccgtttgcacagcacagccgtcagctgggagtactgcgctggcagatggaattgaccctgccggcaaaaaagcggatgtggcagcaggtagtgacagcaaaaattcaaaaccaagcggagtgtcttgcactttgcggcaaaacacaggatgcagcgttcctgttcgggcgtgccaaggctgtgacgagcggcgacaaagataacgtagaggcaagcgccgcagcgtactacttcccggctttatttggtgagggctacacccgccgcaacgaggatacgcgaaatgcagcactgaattatgcctacgcgattttgcggggctatatggcgcgctgcctgacggtgtatggttttcagccatgcctggggctgcaccatgacagcgagctgaaccagtttaatctggcggatgacctgatggagccgttccggcccgtagcggatttgtacgtggcagcaaatgtggccgaggatgcagcattgacacccatactgaagggaaagtttgtaaacctgttgaatgcggatattctttccggcgggcagcaccacagcgttgcctatgcaatggaacgcctggtgcaaggtctgcgtggacaagccctgctgttacccaaattgcttgaatacaagcagcatagctatgagtaaatttatgcggatgattgtcttttttgacctacctgtgcagacaaagactgaaaggcggcatgcgacggcgttccggaattttttgctgaaggacggataccacatgctgcaattctctgtgtacgcgagggtgtgcaacggcaacgacgccgtgcagaaacacgaaagccgtttgagggcatccttgccgccaaacggctccattcgcctgcttgtcgttacagaaaagcagtaccagtctattcagattcttctgggaaattatcagccggaagaagccccttttgtatgtgaacagttgagttttttctaaaacaaaaagcgcatcggaccgcaatccgatgcgctttttgcatagcctattataccataccaagagctattagggaactatgactctggcaggaaacagcgccttttctggataattataccataccaagagctattagggaactatgacaggattctaccgcctgtctccaaattgcgcattataccataccaagagctattagggaactatgacaaaatatggcggtatatcataaaattaagtattataccata

SEQ ID NO: 802 - DNA, 4636 bp, synthetic construct
  misc_feature 1..4636: note = Synthetic
  source 1..4636: mol_type = other DNA
gaactattatggttgctatgataaggtcataggaccgtaaagctctgacgccctgtcccatgacagggcgtcatcttttttgtcaaaatttcgtggaaaatgtcagttgctgtgtgattctttatgcggtatgataatggtaaaaaagaaaaggtgtggtgaatatgaagcacccctatggaattggcctggatattggcattgcgtctgttggctgggccgtggtagcgctgaacgaaaatgcggagccctatggcctgatccgctgcggctcgcgcatatttgatgcggcagagcagcctaataccggagaaagccttgctgcgccgcggcgggaagccagaagcacgcgccgcagactgcgccgccgcagcttgcgcaaggcagacttgtatgagctgatggcgcaaaacggcttgccgggcagggcggaaatagaagaagcggtgcaggcgggccacctgccggatatctatgccctgcgtgtgcaggcgttggatggccctgtaacggcgatggattttgcccgaattttgctgcacttgatgcagcgccgtggtttccgcagcaaccgcaaggcagatgatgcccagaaagacggaaaattgctgcaagcaatcgatgccaacacgcgccgcatggaagaaaaccactaccgcacggttggcgagatgatgtaccgtgacccagtgtttgcagagcataaacgcaacaagtcggaaaactatctttctacggtcagacgggatcaaatcgtggaggaagcggtacagctttttgctgcgcagcgccagtatggtgcggcgtgggcttcgccggaaatggaagcggagtaccttagattttgacgcgtcagcgttcgtttgcggaaggccccggcggaaacagcccctacggcggcaacatcgttgaaaagatggtgggaacctgcacacttgaaggacaagccgaaccgcgtgcagccaaagcaacttggtcgtttgaatattttacgctgctgcaaaaaatcaatcatatccgcattatagagagcggtgcggcgcgtatactgacggtagaagaacggcaagaattactttccgtatgctatcaaacggacaagttggattttgccaggatacgcaaggctcttgccctgtcggaacaggcaagattcaatatggtgcgatatcgggacggacaaacaactgaggattgcgagaaaaaagagaaaattgtatgtctcccctgttaccacaaaatgcgcaaagtgctcaataccttgcggaaagactacatccgcagtgtcagccgcgacaggctggatgcagcggcaacggcgctgacaatgtataaaaatgaagctacgctcagagcaaagctggaagaagcgcagtttgaaccgctggaagttgatgctttgatgacactgcccagttttagcgggttcgggcatatttctgtcaaagcgtgccgaaaactgatcccctatttggaacaaggactgaactataacgacgcttgcaaagaagcgggatatgactttcagggaaattaccgtggtgaaaaatcgcagttcctgcctgcgtccacagaggaaatggaggacatcacaagcccggtggtgcggcgtgcggtggcacagactatcaaagttgtcaatgcgatcatccgcgagcagggagaaagcccggtcaatatccacttggagctggcgcgggagatgagcaaaaacttccagcagcgcaatgaccttgacaaggccatgaaagacaataacgccgagaacgagcgtttgatgaaagacctgcatgaactgttcccagggagaaatatcacaggccaggatcttgtaaaatacaggttgtggaaagaacaggatgggcggtgcgcgtattcgctgcagccgctggaactggaaaaggccattactgtttcaggctatgcggaagttgaccatattgttccgtacagcatcagctttgacgaccgccgtgcgaacaaagtattggtgctggcgtcggaaaaccgccagaaaggcaatcgccttccgctgcaatatccgcaaggaaaacggcgggatgattttattgtctacgcaaaagcaagtgtaaaaaattaccgcaagcgtcaaaatctgctaaaggagaagttgagcgaagaagacagcaaaggttttatgcagcgtaatttgcaggacacacagtatattgcaagttttatgctgaactacattcgcagccaccttgcgtttgcagatttctctgcggcaggtaagaagcgtgtggttgctgtaaacggcgcagttacagcgtttttgcgcaaacgctgggggcttggcaaggtgcgtgctgacggcgacctgcaccacgccgtagatgcggcggtcattgcctgcacgacggatgggatgatccaacgggtgtcgcggttctacacgcatatcgaaacctcggacacccggggcgagcgcttcccggagccgtggccgcgattccgggatgagctgatgcagcgtttgtcggcctgcccgcaggaaaatttaatgcagatcaacccggtatattatcaaaatgtggatatagcaagtatccggccggtgtttgtgtcgcgtatgccgcggcataagatgacgggagcggcacataaggagacgataaagggccgcttggatgatgcgcatacggttcagcgccggtcgattacagatttgaagcttgacaaagagggagaaattgcaggatattttaatccgagcagtgataccctgctgtacaatgctttaaaggaacagctgacagcttttggcggcgatggaaaaaaggcatttactgaaccgttctttaaaccgcgtgccgatggaacgccgggagcacaggtgcgcaaggttaaagtgtatgataaagccaccagtatggttgcagtccatgaaggaaaaggtgtggccgacaatgatacgatggtacgcattgatgtctattttgtgccgggcgacggctattactgggtgccgatctatgtggcagatacggtgaaaccggaattgcccaataaagcggttgtacagggaaaaagctatgcagagtggaaggaaatggacgaagaaaacttcttgttctcactttgtcagaatgacctgattcgtattgaaagtaagcgcacaatgaaattcaaagtgcaaaacagtgacagtacactggaaaaagaaacacagatgaattgcggcttgacctattttgaaggcggaaatatttcgacaggtgccatcacggtaactacgcatgataacgcgtatattgtaggaagtcttggttttaaaaccctgcaaaaggttcaaaagtatcaggtcgatgtcctcggtaactataccctcgtaaaaaaagaaaagcgtcagaacttccctgcacaacggaggtgacctatgtcctaccgctgcctgatgatcgtgaacccggcgcgtatccgctgcaaaaatgaacagcttttgattgaaaccgaagaaattcattctgtaccaatcgaggatatcagcgccattgtgctggaaagccggcaaagtacgataacaacggctgcgctggcggcactggcgcaaaacggcgtggtgacgttctggtgcgatgaaacacacttgccgtgtggtatctcgctgccatttgcacagcatagccgccagttgggcgtgctgcgctggcagatggagctgacactgccgacgaaaaagcggatgtggcagcaaatcgtgacggcaaaaatcaaaaaccaggcggaatgcctggccctgtgcggcaaaacacaggcggcggcgttcctgtttggccgtgccaaggcagtgacaagcggcgataaggacaatttggaagccagtgcggcggcctactatttccccgccctttttggggcaggctatacccgccgcaatgaggatacccggaatgcggcgctgaattatgcttatgcaattttgcgcgggtacatggcacgctgtttggcggtatacggatttttgccctgtttagggctgcaccatgacagcgaactgaaccagttcaatctggcggatgacctgatggaaccgttccgcccggtagctgatttgtacgtggccgcgaatgttgccgaggatgcagcaatgacaaccgctttgaaggggcagttggtgaacctgctgaatgcagatgttctttccggtaatcagcaccacagcgtagcttatgcgatggaacgaatggtgcaaagcctgcgggggcaaacattgcagctgccaaaactgctggaatataagcagcacagctatgagtaaatttatgaggatgatcgttttcttcgatttgccggtgcagacaaagacggaacggcggtatgcgacgactttccggaactttttgctgaaagacagctaccatatgctgcaattttctgtgtatgcgcgtgtatgcaacggcaatgatgcagtcaagaaacacgaaagccgcctgaaggcatctctgccgccaaacggctcaattcgattgcttgttgtgacagaaaagcaataccaatctattcaaatacttctaggaaattatcagccggaagaagcaccgtttgtgtgcgaacagctgagttttttctaaaacaaaaagcgcatcggaccgcaatccgatgcgctttttgc

SEQ ID NO: 803 - DNA, 23214 bp, synthetic construct
  source 1..23214: mol_type = other DNA
  misc_feature 1..23214: note = Synthetic
gcgacaggagggaagcacaatccgttaaagcggtcatgccacacacaataaagcgcggaagggcggttgcaaacgcaatgacccaaacctgtggataactcaggccgggccagaaaagttatccacagaactccaggctctgctcgtagatggtgcgggcgatgttggtgtcgcgggcgtggccgcggacgaagtggccgcggacgcgggtgacgtagaaggaaccgtcgagggtgacctcgccggaaaggagttcggcaagtcgggagccaccgaggtcgggggtggccaggaccttcttggcaagcgggagggcgtagaggtccctcacctggttgtcggtggcgaggccgaagttggagctgatcacgcctgggtggaagctggcggcacgcaagccccggcgggcggattcgcgggcgatgagggcgcagccacgcttgcactgggcgtagacgtcaaagtctttggtgccggtgcggtcgccgtggacctgctcggggacgatggcgggtccgccgtactgggcgatggagctcgtccagatgacggggccttggggtgcgagggcttcctgcaggaggaggttggcaagcacgttggtctgccaggcggggtcgaagccgtcgtcggtaaggccgccggcggggaggatgccaccggcgttgcaggccatggcgtcgatgccggaaagctccgaagccaacgagcggacggcaccaagatcggtgaaatcgcagctgtagtagttcgggtcgtcgatctccctgcggccgacgcctatgatctcgtggccttgcgcgcgcagcttttctgcggcggactttccaattcctgagcttgctccggtgatgaggatgcgcattagttgttctcgatcatttcttcgcgaaggatgttcatcgggatggagccgaaagcgagcgcgcgggagtggaactccttggggctcatgccgtcggcggtgatgtcgtggcgcagttcccgccaggcgcgctgcccaagggcgtaggagggggcctggccgggccagccgaggtagcggttcagctcgaagcggacgttggcgtcggccatggccgtgttgtcctgcaggaaggagcgggcgtaggaggcatcccacgtgttgccttcgggggtcttgaagccgaggtggacgccgatgtcgaggacgacgcgggcggcgcggaggcgctgggagtcgaggtagcccatgacgtagcccgggtcgtcgaggtagccgagctcttccatgagggattcgccgtagagggcccagccttcgccgtggccggagttccagcaggcgaggcgtcgccacgcgttgaggttttcgttggcgatctgggtgccgagctgcatgtggtggccgggaacgccctcgtggaagacggtcgtcttctcctgccacgtgtggaacgtctcctgcccctctggcaccgcccaccacatgcgtcccggccgggagaagtcgtcggtgggtgcggtgtagtagatgccgccggtgcccgacgggtcgatgaggcactggatgctcgccatttcctcggggatgtcgaactcgacatccctgagctgggcgatggcctggttcgccgtcttctgcatccactttttcagctcgccggtgccgtgcagctggtagcgcgggtcttcctcgaggttctccagcgccctttcgacgctcgtcccctcaccgtagagctcttcggccaccttcttttgcttttcgacgatctcctgcagcgcgtcgattccccagttgtaggcttcctcgaagtcgatgtcgaagccgacgaagagcttggagaagcgttcgtagcgctccagcccgcaggcatcctcctgtggcgcgtgcggggcgagggtgtccgtcagccactcccgcatcgagccgaaggcggcctttgccacgtcgatctcggcctcgggggcgaggcaggtttccagcagcgagccgggctcggcaagctcgtcgcactgctttttcacttcctcgatctggcggatcggggcgacgcgcccctggaccgcagcctcggacagggaacgctggtagccctggagggcggccggcaccttggacaggcgggagcgcatggcatcctcgtcggcaggcatgttctggaaggacatgcggatttcctgcaccggggagtcgatgttgttcaggttgccgaggtcctcgtactcgtggtgcaggtccagttccaggcgcagccggtcgcggaggacggcggcggtgacgcggtcgacatcgtcgaaaacgtcgacatcgtcctcggtgtccgtctcatcctcgaaggcatcgacatcggcgagcagctcgcgggcgcgatcggcgacggcggagtagtactcggggctgaaatcctgtaggtcgccctccatgccgggaataccccagtcggtggcagccgtaggcatgagctccgccagactatagatatagtcgtcgcagctgctatctagaagtgactgttcacgagactcggtcataaaagctaagtgtacctatcgccatttctccccgggggcgcgccacgactccagcttctccaccagctcggcgacggtttccacgacgatgagcgcgtcgacgtatttcttctgggtaaagccctccgagatcgtgttctccagcagggtgaccagcgggttccaatacccttcgacgttaaagaggatgacgggtttttgatgggagccaatttgttggttcgtcaaagcgtcgaaaagctcagaaagcgtaccgacaccgcccggcagtgccaaaaagccgtcggcaagctcctccatccgagcaatgcgctcggggatcgaatcgacgatgtccagctgcgggagcccctcgtacgcctgctcgcgatcggcgaggtcacgggccatgaccccgtggacgtccccaccgtgggcgagcgcacccgaagccatctcccccatcagccctgccgaaccgccgccgtagaccaccttgatcccccgatctgcgagctgttcgcccagctcacgggcgacatcctggtagaaggtgcgggagcccggcgccgacccacaataaaccgcaagactgcgcaacggcgggcgcagatgcagcatcatcgcatcgcccgcgacggactcgaaaccctgccgcgcgaacgagcggcgcgccggattatcctcatccatctccagcatcagccctggccagccgaccttcttgccgtactccgtgaggtgctccagaatggccagaccaatgccgtggccgcggaactccggcagcacagcgtggcgaagaaccggggtggaaccgcgagtaaaggacgcccacgcagccgccgcgaccttctcgcccaccttcgccaccacaccgtgatcaccacgagcgggaataaaactgacaaaatcgctggcgataaccttgtcctcgtccagctcagcaaccttctcacgcagcgccgtatccgccgcggtcatctcgcagaaatcgatatgcatagctactagagtagtggtcatgggcaacatcgtgttcttcaccggcgccggaatgagcgccgactccgggctgaccacctaccgcgacaaagttacgggcctgtgggaaaacgtcgacccgaccgcgctcgcctccatcgacgcgtgggcgaaggacccggaacccatgttcgcctggtacacgtggcgctccatcgtctccaacagcgtggcgccgaacgcggggcacatcgcgatcgggtctgccgggtaccccgtcatcacgcaaaacattgataacctccacgaacgtggcggctcggcggaggttgtgcacctgcacgggtcgctatttaaatggacatgcacgatctgcggcaggccttattcatatacgctgccggagtggtcggagcctgttgagcggctgacgccgccgacgtgccccttgtgcgggaactttatccggccggaggtcacgtggttcggggaggcgctgccggaaaaggcctggaaccgggcggttgagctgttgcaggcgtgcgacactctcgtcattgtgggcacctccggcaccgtgcagcccgccgcgagcctcccgcttgtcgcgctggaaaacggcgcgcggctgtacgagatctcgccgcagacgacgtctttgactccgctcgtacacgagttcatcgaggacacggcggcatccggggtgccggcgttgctggagcggctgtaatttttgcgccttttagctctccgtcgcctgcttatgggcggcggcgacgcgggcgtaccgctcggcgtgctcgatgaagctgcggtcgatggttttcttcactgtgccgggcacacccgcgacgagagagtgctcgggaatctcggcgccctccagcaccacggcgccggcggcgatgagggcgccggtgccgacgtgggagcgggataaaacggcggattgcatgccgatgaggcagtcatcttcgatcgtcgtgccgtggacgagcgcctggtggccgacggtgacgtggtggccgagggtgcacggggcatcggcgtcgacgtggaggacggcgttgtcctggatgttggtgtactcgccaacggtgatggtgttgatgtcgccgcgcagcacggcgccgtaaaacacggaggcgtgggcgccgatggtgacatcgccaataatggtcgcgttgggggcgataaacgcggtctcgtgaatggtgggggtcttcccgttgaaggggataatcatctaaacggcacctctcctatagtcttgcggagttttctggttcgtagcttttcgacgttcgcggccaaggcttccatcgccctcaccgcgcacatcacgtgggcttccttagaggaagagtagaaggcttgggcccccgccggaagcttgggcaccgcgtgcagtggcaggtccgacacggacagcagggtgccgtagggcacgcggtagcggtagccgttggcggccagggcacaggattccatgtcgacggcaacggcggtggagccgcgtaacgtctcccacatggtatgcggtgtatgccactcccagttgcggtcgccggtggacagcaccgtgccggtgcgcatgagctgggatttttcctccccgtagacgtcgccaaccgcccgctccagggcgcgctgcacctcggggacggcggggatggggatatcggaggagatgcggtcgtcgagaatgaaatcgcggcgctggtaggcattgccgaggatgaggtcaccgatgcgcatgcggccgtcgaggcctgcgcagtggccgatcatcacccacacctccgggcgcaggacggcgaggcaatccgtgatcgtcttcgcgttggaggggccgacaccgatattgatcatggtgatgccgtcgccgttgtcggttacgagatcgtagcgcgggaactggtgcgtccctgtcggcgtgttcagccccgtgtagcgcgtgcccgggcgttccagctccacgcgcgcccagcgctcaaactccgaggtgtgcatgtcatagttggtgaacaggataaacttctgcacaccttcgcagccgatgccggtgtagtgctctattcgcttacaggcgatgtcgaaacgctggggcgtgaagtggaagagaggcttgacctctccgtggaacgcgtcccaccggccgtcgataatgccatcatcaacatcatccaaagtcggggccggaaatcccgtcagctcggccccctcgagaccgtcgatataagccggcggaataacgatatccgagtagtcggcgcgcacgtcacaagaataattttttgtgagtctggccaacatctcgcggagatagcccgcaaccaggcccggacgggaaaaaacggaggaataaaccccggcctcctccacgtaaccaaacggctccgtccgatcaatcggctgccacgtatcgacggtcaccgtcaaacgcgggtagcgaacgccactatacgcggagcgatcaccagccttaacggcagcatgcgcacggtcaacggactcctcgtacatcttgatgagctgatcaaccacatccatacgagccagcgtaccgcgttcccccaaaatgagggtgacaatcaacgggacctgttgcatcctataagtccggtggcagaatacattatacaaactgccgaatattccctcgcggactgacgggcagcttgtcaaaggtggacaaaacccttacggttgtacgccaagacaattaaaaaccgctagacttcacttgaatagacctctcagggggactatgcttgcagtgaagttccaagctttttagcttgagcaatgaagtttctacattttttaaggagaacataatgcgttctatccgcaacgcagcagttgcaggcgttaccgctcttgctgtctccctcagcggtgtcacggctttcgcagccgagacccccaagggtgagaccaccgcagcttccgagaacaccactcctaccgctggtgacaaggataagaaggccaaggagtccaagggttcctccgagggcaccgataacaagggtgacaaggctgaatctaaaggcaacctttcctccaagctttccccggagtacgagggcgagaaggccgtcagaggccaggacgctttcggttcccacaagcttgattccaaggatctgccgaagtggttcaacgcctgggagggcttcaccattgcaggtatcgttctcacgatcctgacgaacctcatcgcgccggcttacaactacctcaagttcaacggcatcatctaataaccgctggtaacaaacaaggctgaaaggaaaatatttaaaatgcgtattcgtaatgcagccgtcgccggcgcaaccgctctcgcaatcgctttctccggcgtcgcaaacgctgaggagcccgctaaggtcgctaacatcgacaacccggccaatgagcactacatcgctgacaaggatcgcgttaacctcaacaacgatgccccctccaaggacaacctgaaggttgacaaggagaagaaggagtccaacctctcctccaagatcggtgacggtctggacaaggagaagtacgcttccggtaacaacatcttcggttccgttcaggatccggagctcgccggctgggcaaagctcttctacgcttccggcatcctcggtgccatcggcaccgtcatcggcaccatcattgccgctgtgaactacggtctccacgagggcctcatcaagttctaaggatatcgctgaataagcgtctcagctgccgctagcggcagcttatccaagcaccctcagcgctttcacgcgagggtgctttctttctgcccacttatacttattcctccaccaaaggagttctactcccctgatgcgcatcctggttgtctcccagtattggtacccagataatgggatccctcagcaccgctgggcgtggctttcgcgcaccctgaccgaagccggccacaccgtggatgtcgtgtgtccgcacccgactgccggtgatcgagccgtgggggatgaagacctgttttatacgcccccgttcaagccggtaagcggtctaaccaggcgggcactcatacagttggcatctggtatcgacgcggtgcggacggggattcgggggccggaaaaaccggacatcatcatcggcaccgtaccggctatccccacggcactgtccacgtgggcgctggcgcgagcccggcgcgtaccgtacattattgacctgcgggatgcctggcccgacctgctcaactacaccgaccgctggaacgagtcggtagctgtaacaccctcgttgagggaacagatcctgcgtggcttacccacacgcatcgcctcggtgacactgaagaaccttatggtagccgtgttgaagcaggcagcaggaatcattgtgacagccgaaaccttggcgcacgacctacaccgaaagggcgtcgacaagccagaaatggtgactgtaagaaacgtttttccgcgggctaacacctacacgtacacacctcgcgcggaccgggagccggggacgctacatgtactgtatgcagggacgttggggcgtgcccagatgctatccaacgcgattgaagcgcttacacacaccaccggtgttaccctgcgactcgttggcagcggagccgcgcgcgaccagctgaagaaagaagcgcacggactgcccgtcgaattttacaacaagacaaaacccgaagacctcaccaaacactacgaatgggccgacgtcgcactcgtccacctcgccgattgggagcccctcaaccgcgccgtcccgagcaagacctatgagctcatggaaatgcagatgcccatcaccgcagccgtggaaggcgaagccagctacatcatcgaacggatcgccgggggaaacgtcgtacccacacggaacccgcagaaattagcagaactgtggagcacactcgcatcccaacccacaatccccgctgcttcccctgccggggcagaatgggttcgaaaacagcgcaccgaagaagcacagagggcaatagcagatattctaaacgccgtcgcaggtgcataaatagggtatacgtagtagcctttggggtggctctaatacaattttcagaaaggttcgttgtgaccacaccgaaggttataaccgtctacggaacccgccccgaactgatcaaaaccgcgccggtcatcgccggcctcgaaaacgacgatcggttcacttccgtcgctgtctccaccggccagcaacgcgacctcctcgaccaggttaataaactctttgacatcaaaccctcctacgacctaggaatcatgaaacccggacaaaccctcaaccacatggttgcccgcatgatgaccggcctcgacgaggtatttgaaaaagaacaacccgacatggtgctcgtccaaggtgacacctccaccgccatggccggcgcgatcgtcggcttccaccgcggcgttaaagtcgtccacctcgaagcgggactccgcaccggcaacatcgcctcccccttcccggaagaaggctaccgatgcatgatcagccaaatcgcctcgctgcacctcgcaccgacacctgaatcacgacaaaacctcctcgacgaggacttccccgctggggatatcgctatcaccggcaacaccgtcatcgacgcactcctgcacaccgtctccctggagaccacctacgccgaccccgcgctgcaggaggtcaccgcaaccgacaaggatatcgtcctcgtcaccacccaccggcgcgaaaatctccacgccatgaaggccatcggcgccgccgtacaccggctcgccacggcattccccgacaccgagttcgtctgcccactgcaccccaacccccgcgtacgcgaggtcatcatcccgcttatcgacgccgaccccaacgtcctcgtcaccacaccactgccctacaacgagttctgcgccctcatgaaccgcgccaaactcgtcgtcaccgactccggcggcgtgcaggaggaagcccccgcactgggcaaacccgtcctcgtcatgcgcgacacgacggagcgccccgaggccgtcagctacggcaccgtcaagctcgtcggcaccaatgaagacgacatcgtcaacgaggcgacgacgctgctcaccgatgacaacgcctacgccgccatggccaatgccgtcaacccctacggcgatggcgacgccgtcccccgcgtcctcgccgcgatggcgcagctcgccggggtgggagagaggttggaggattttcggccgtaggggacaggagcgaaaaatcagttcttttgacactatgaaaggcactccttaaggtcagctaaccagctacaattgagttacaactcaaccgcggttagaataatctaagagatttgattctcagtaagcgacacctagcttgtgtcgttgaatgctccagcccggttgcactgcgcaaccgggcttttcttttactcaaggagacaaaccatgaataatgtcaactacgttgtcggtttcgatgtcggactttattccgtcggctgctgcgctctggaagtcgatgagtcaggtcgccctgttcgtattttgagtgcactttcgcatattcacgattccggtctggatcccgacaaacaaaagtcatcaaccacgaggctagcgacttctggactggcgcgccgcacacgacgcctttatcggagacggtccaagagaatgaaaacccttgaatccttcctcaaacagcaaaaatgggtgactaggccttttgaagattacgatgacccctactacccgtggcgcgtcagagcatcgttagcgacagaaatggaaaaagacccaagcgtccttggcgagaaactttcggtcgctatccggcatattgctgggcaccgtggctggagaaatccttatgtctccgtcaaatcgctttatacagtgacccctgattctcccgcttttcttgaaattaagaaaaacatccagaatgctacaggtaaaccgctgaatgctgatgtcacggtggggcaagcaatctgcgcaatcgaacttggaaagattaaggtaaggggagaaaacaacaaaattctcactgcacgtcttttccagagcgatcttgctaacgagatttggaagatttcacaggttcaaggcctccctgaaactctcactaagcaaatcatcgaccatgtctttcaccagcggactcctaaagggtcattctacgaaagaatcggttcagacccattagcaccatctcacaaacgggcactcaaggctactgatgcattccagcggtatcgtattgttacggttctgagtaaccttcggatccaggaatccgattatcgtccattgactccagatgagctccagaaatccttctcgttcttaatccaagccaaaaccgcaaagcgacctacatggaatgatctcgcaaacttgctgggtatcccccgcaacaagcttcgcggaactgcggtagtcacagaagatggtgaagtttcaagaaatcaaccaccaattcacgagactgaggcgattctttcttcgaccactatcaagccacttaaggctttctggaaagaagcaaccagagaagagaaagatgagcttattcaggcactctcgaatagtggcactcccgacgtaaattcaagagccggaaacgttgtttccgaatttatcagtggcctttccgatgatgaaatagctaagcttgatacgctccacctcccgttcggtcgtgctgcttacagtgaagccaccttggaaaagctcacggacgagatcctatctacaggcgaaacccttccagcagcacgatccaaatgcttcaccgtacctagtgactgggtgccaccaaagccagctatcggggaaccagtaggtaatcctgccgttgatagggtcctcaaaatcgtaaaccgctaccttcacgctgccgagaagaaatggggtcaaccccaaagcgtgaatatcgagcatgttcgcaagggtttcgttagcgttaaagtgacgaaggagatcgacaaggaaaataagaaacgcgcggagaaaaaccaagcaacccgcatcgagatggctgagaaactcggcttggatggcgctattagggactcggcagtccgccggtttcaggtgcttcagagacagaactgccagtgcttgtactgtggagcccctattgattttaagaccttggagatggaccacattgtcccccgtgccggtattggatcgacaaacaaacgcgagaacctagttgcggtttgtccttcttgtaaccgttccaagaataatttgccttttgcaacgtgggcaaagaataacccaaacccacaaatcacagttaaggctgcagtcgagcgaactgacttttggcaatgtgatcctgatatgaacaagaagagctttaaaaagttcaccaagcatgttcaggatcgattgaagagaactgacgcagacgaagagattgatgcacgttctatcgagtcggttgcatggatggcaaacgagcttcgcgcacgtatcgctcagtacttcaacgacaagaacagcgacaaaaagacaaaggttcgagtattcagaggaagcattacctcggaggctcgtaaagcttcggggatcgaaaggcgaatcgaatacatcaacggaccagggaagagccgattggatagacgccaccatgctgtagacgcactagtggttgcactcatgagctctttcgtagctgaaatcctaaccatacgaaggaacctgaaagatgcgcaacgagcgacagagtctgaagagacctggcgagactttaagggagtagatgcgtctcatataaagcaattcaacaactggtccaacaatatgaaagtacttgtccgacttttacaacaagctttagaccaggatgaaatccctgtcactaagaatctccgtctgcgctttggcaatggtcgagttcatgaggacacggggcaagcgcttataaaacttccccttggcagtgaaatatcatctcaaatggtcaagcgatcgtcgacagaagcgcagtggatagcacttacgcgccaccctgattttgatgccaaggacgggttaaaggaaaattctgaacgagagatacgaattcatggtcagatcttaagctccgacgatgatgtagctttcttcccgaaggatgcagcaatgatgcttgtgccacaaggtgctgtagaactcggaaatgcgatccaccatgcacgggtgtacaaatacgctaaaggcaaaaaggagtctttcgggattctcagagtttacaccgttgatcttctgaagcaccagcatgaggatctgtttaaggccaagatcaaaccgcagtcggtgagtatgcgctacggtgatcctgcagttgtaagagcaatccaagccggtgaagctcagtatctcgggtggcttgtcacagatgacgaactctatatcccgaatatcgaagctttagccaccggtcagctcaaaacgttactcgacgagtacggtcctattaggcactggactgtagacggctttccgtcaccacaaaaactacggcttcgacctcgcttgctttccaaggaagggctttcagaggaaagccactccgacatcagaaagcttctggatagtcctgggtggagggtctcgtccaatgtcgtttttggcaagggtgaagtccgggttattcgtagaacccaacttggttggcctcgaacccaaagtgcgtcccacttaccgataacttgggaagttaagtaaaatgtctgccgggtggcgcacgcttgacttctctcaagcagaaggatcacttcattaccgcagaggtaaccttctttttgtttcgaaagaaaaggaacggatggttccactagttcaagttgccgtgatcctgataggaacgcacgtcagtgtaagcggagcgcttctcggtaaactaagccagttagatacctctgtgactgttgtcgattggaagaatattccaatcgcagcagcacagccttggcatgatcattctcgtattgctgcccgacaaatcgcccaagccaacctctcagagccaaggcgtaaaaatgcatgggcgcgaattgttaagagtaaagtcttaggccaagctcacactctttctctcctggggttcgcttcggcctccaccagactcgtcaccctcgctcgctctataaaatctggggatccccaaaatatcgaaggacaggccgcccgaatatactggtcatcccttaatattgcggatgatttccgccgtctacccggggccggcgaacaaggattcaacggtgtgttggactatgcctatacgcttctgcgcggtcaaggcatacgagcactatccttagcaggcttaatcggcaccttaggatttcatcacaaaaatcggtgtaacccgttcgcgctggcagatgacctcattgagcctttcagaccagcggtagattactttcttcttgcaagtctcgacacctttgatttggacaataagacctgcaaacaagggattttttctgcgttcaattcagttttcgacagcactggccattcaatttctagtgtgcaggaggatttcgcgcacgatgtggggctctatgtcgaaggcgaaactcattttctcccggttccaaaatggcagatgaggatcgacgatgataaagaatttcaaggatgactcatccatgtggtgtatcgtcatgttcgatttacctgtgaagacaaagagtcaacggacagctgccacactttttcgcaaccaactcctggatcttggcttctcgcgggagcaatttagtgtctacgtacaatatttaccactagcggcacgtctcagcaaaacaatcaaggaaatcaaattaattcttccttgtgggggtgccgtggagatcttggcggtcaccgataaggcctggagtggcgcataccgtttttctagcggagctccgaaagagatgccctctgccccgtcccagctagaaattttctaacaggatttcaacccaaaatagacttgaaccaggcgcttttcgcgactgaccaagtctatcagggataaggagatttgattcccagccacttttgtgttaacctatcctttgggtcaagtctatcagggataaggagatttgattcccagcggggctgttttcagcgctgttcacacagcaagtctatcagggataaggagatttgattcccagccaacagtatcgccatcaataacgcgattcaagtctatcagggataaggagatttgattcccagctgggtggttggcgttgcgcttgtattaccaagtctatcagggataaggagatttgattcccagccttagcagccgcaccatgagatgcagcccaagtctatcagggataaggagatttgattcccagcgctgcgcgtgaatggcgtgaacagcaggcaagtctatcagggataaggagatttgattcccagctccttggatagcgatatgcgacggggaccaagtctatcagggataaggagatttgattcccagcgtgcccgacgtttgctcggttacggtgacaagtctatcagggataaggagatttgattcccagcgttggtgcggaacatggcgttgatggagcaagtctatcagggataaggagatttgattcccagccgaggtgtggtctgagtggctgcgctcgcaagtctatcagggataaggagatttgattcccagcttcccagtggtatccttcgatggcgccgcaagtctatcagggataaggagatttgattcccagccgaggtcgtatggccaattcttgccggtcaagtctatcagggataaggagatttgattcccagcgccctgacggtgtacaggtcgacgtaaacaagtctatcagggataaggagatttgattcccagctccaccaactcgcatacctgcaccccgtcaagtctatcagggataaggagatttgattcccagctgatcggctcgatatcttcatcgagttccaagtctatcagggataaggagatttgattcccagcgaccgggcgaactcgtgggcgcgctcaacaagtctatcagggataaggagatttgattcccagccgatgcgtgggtttgcgtggtagtaggtcaagtctatcagggataaggagatttgattcccagccgcaatcgcacccttgttggtgcgagctcaagtctatcagggataaggagatttgattcccagcctaatgccctggctaccaagcttcgtcacaagtctatcagggataaggagatttgattcccagcctgggcagtcctcgacatcgacgaagatcaagtctatcagggataaggagatttgattcccagcggaatcggtggcgactggcactagagcgcaagtctatcagggataaggagatttgattcccagcgctcggggttctttgtgagcagtccggacaagtctatcagggataaggagatttgattcccagcgctcatgatgtgggtgcaagcggatgcccaagtctatcagggataaggagatttgattcccagcgcttgagcatggactaatcgacgccaagcaagtctatcagggataaggagatttgattcccagcgggttccagggggtgcgtccgacagtcccaagtctatcagggataaggagatttgattcccagcctgtaggaaaacttattgtcataggtgacaagtctatcagggataaggagatttgattcccagctggtcaacctgcttggggaatggtcgctcaagtctatcagggataaggagatttgattcccagccaggatctacaggggggggcgtcgcggccaagtctatcagggataaggagatttgattcccagctggttttgcccatgccgagaccgaggaacaagtctatcagggataaggagatttgattcccagcacacacgagacgacgagctggccacacacaagtctatcagggataaggagatttgattcccagctgagtgcgctgatgatgtagatgacgagcaagtctatcagggataaggagatttgattcccagccagtcagccgtggccaccggagcaaatgcaagtctatcagggataaggagatttgattcccagcaacctgaataagccaaccgccggtaggccaagtctatcagggataaggagatttgattcccagctgttgagggtagtgaccccaaggtgggtcaagtctatcagggataaggagatttgattcccagcgggcaccgcaggcggtgagccaaccaatcaagtctatcagggataaggagatttgattcccagctttcctcagcgtggatgtgtgggcttttcaagtctatcagggataaggagatttgattcccagccttttattttcccggatacgggtgtgaacaagtctatcagggataaggagatttgattcccagcggtagccgcttctcaatatcgtcaacggcaagtctatcagggataaggagatttgattcccagcaccgcagccacaccgtcgacgagcgtgacaagtctatcagggataaggagatttgattcccagcactcgctcgcgctagtgcggtcgcttgccaagtctatcagggataaggagatttgattcccagctatggccagatggctaactgacgatccgcaagtctatcagggataaggagatttgattcccagcacagtgccgcaaccatcttcaagtactacgactacccttgtatttatgaccactcctgatagcgcaactcctgcccgccttaagtactccgaagatgctcgcacaacgctggccatagctgacggtcgtgcgcacctgctctctgcggattcgcatctcggggagctcctctatctctcccccgaggccgatttttctgaggggggctcgattcgtggcggcgtgccgatcatcgcgccgtggttcaatgatctgacaggccaggatcctgcgcatgggtgggcgcgtcggaaagcgtgggagtgccaggaggtgccgggaggattcgattgccggattcggcacgacgagtgggatctgaggctcggcattcagaccacgcccaagggctttgcgataatcttgaagtgcaggaatgcagcttcgcgccgtcgcgatgtccagctggccttccacccatatttccgtgtggaggacgtcactgcggtgaaaattgacggcctcacattcgatggtggcgtcgtcgacgaacgcacgacgaccacctcgcctattaccatcgtcgacggcgcccggcgcatcaccgtcaccggccacgaccacgatcacacggtcatctggaatccgggtgccgccgtgccaggcgatatgcctgacgatgattggaaaaattttgtctgcgttgaacctgctctcctcggcgaggatgtcaccaggggcgtgtcacttgcaccatgggagtggacgcagatcggtatgaccgtgcgggtcgaggaggcctagggcccgtagatccactcgttgtccaggcacatcatcatccgcccctggtcatcctggccgccgtcgacggtgcaatagccgccttcgtgagcggtaccaatgcccagcggacgggggccgtaaacccagcggaaatcgcgaccggcgaaaacgcagacaagctgtgatccatcagcaccaagggcgggctgtagaacctcctgttcagagcagagatcgttatacatgggccgtgctggtggggcaggcgcaaacggattcggaagcaagccctgtgacacggcccaggccccgccagcggcgatgaggccgagcacaccgatcgtggagacgacggagacgaccgcgaccgctccaggggtgagcgtctcgccgtcctcttcatagaatgagcttgtgttctgaggtggggtttctgcgtatgcgggcgctgcggcggtgaccgcagcaacggcaagggctatcattttctttttcacacaaaacatcatgacacaccccagccacccgcaagagtaccttttcgaacatgcctggtaggaagcgtcgacaagcgaaaagttggccaggagcggggatgaggggtagaactagccaattggaaaaggagtgatttttgtggagagcgcgcagcacagaatgggcgtggaggccgatgcggtcctgcgtctcggaatgctgctcatgggcgcggggactggcggctaccgggtgattcgtgcgatgaaacgggtggcgcgagcgctggggttcgataggctggacgcgtcgatcgcggtgacgacgattacgtgtacgttccacaagggggatgatttccgcacgattgtggccacgcaggacagtccgggggtggatgcgtcgcggattgaggcgttggagaacctgacgcacgggattcggcagcagatcacggcggagtggctgaatgagcagctcgacgagatcgaaaagatggtggtcaaacggtggtcgctgccggtcctcgtggtggctgcggggctcgcgtgcgcgagctttgcggtgctcaaccatttcacgcttgtcgacgccctgatggtcaccgtcgccgctgcgagcgggcagttcgtgcgcggaatgttggcgaagaagcacgcccggcagctggcgtcggtggcggcgggggccgttaccgcgtgccttatgtattgggtgatcattgagcttttcgggctgacgcaggcggcggcgccggggtttgtggcgtctgtcctcttcgtcgtgccggggttcccgctgttctcggcgattattgacctgtcgcggttcgacttcgcggcggggatttcccggctcgcgtatgcggtgacgcttatcgcaacggcgacgctgtcggtagcgctggtcagttggatgacggggatggagccgccggcgcacgtgccgcaggttgctgacccgcactttttcatccgggcagcggtggcgagcttcgtcggcgtggcggggtttgctttcctgttcaattcgtcgcgacgcatggtgggcatcgcggcggtgaccgggacggtgggcaacctgatccggttggggctcgtgtatgcaggcgcgacgatgtatgcgggggcgtttgtcggcgggctggcgatcgggctgattggctgggtggcgtcgaaaaaggcgcacattccgcgcaccacgacgacggtgccggcagcggtgattatgatcccgggaccctcgatgttcgcctcgatttatgccctcaacctgggcgatatgcagatgggcgtgaccgcggcggcgacggcggcgctgaccgtgctggcgatcgggatcgggatggtgaccgcgcggatgctgacggatcgcgcgtggctcttcggtcggcacattgatctggacgcgccactgcctcggtaggtagcaactcacaccttttaggggagggtggtcttgttctaaaacgtgccttagggtagccttacctttgcctgggcggtcatggcgctcaggcagcttttgattaccgaaccggaaagacacaccgttgttcctcgccaactttcttattgccctgcgagagggcgtagaagcctcactcgttgtcggcatcctcgtggcaaccctggtgaaaacgaatcgtcgcgacgttctcccccgcctctggctgggggtcatactcgcggcggtcgttccgctgactgcgggcgccatcatgacatggggaccctacaccctcaccttccaggcacaggaagtgctcggtggaacgctatccatcgtggcgatgggcatgctcacgtggatgatcttctggatggccacgcacgcccggaagatgacctccaacctgcgggagcaagcgctcgacgcattaaagtcaggcagcggctggtcactggtttggatcgcaatcattagcgtcggacgagagggcgtggaaacggccatcttcgtgtgggcaacagtcaaggccacgtcgcaaggcgggttctggcagcccaccgccggcgtgatcacgggactcatcgtagccatcatcatcggctggctcgtgtaccgcggcaccgccaagatcaacctctccacgttcttcttcgccacaggcttactcctcattgtcgttgctgcgggcatcgtctcctacggcatcggcgacctccaggaagcgggagtgctgccggggtggggcgtgaccatttatgacatctccagttacttcgatggtcacatccccttcctggacgccacaagctggtggttcgtcctcctggaagccatgtttaacgtcaatctcgcccccacatacctccagttcttcgggtgggctttgtacctcatcatcgtgcttccactgtttatccgtcatactcacccgaaagtctcatgaaaaacatccgatttctttccttactcgtgctgcccctcaccctcaccggctgtgtagccaacgcacctagtggcggggacaccgccgcagacagcaacgccccgattgaggtcaccatcaccgacgacacgtgcgaggtgtccacctccgaggtgccgtccggccgcgtgaacttcaggctcaccaacaagggcaacgtacgcaacgagttcgagatcctcgcccccgacaagctgcggattgtgggcgagcgcgaaaacctcggccccggcacgacgaccgattacaccgtcctgcttgagcccggcgagtacgtcaccgcctgcaagaagaacatggtcgggtcactcgtcggcgataagccgttcacggttacccaaggcgaggccgtcgatgtcagcgccgacgagcagcaggccatcgacgatgctgtgacgaactacaccgcctacgtcaaggatcagaccggccagctgctcgaggccacgaaggaattcgcggcggcatacgctgccggggataccgagaaggccaaggccctgtacgcgccgtcgcgcatgttctacgagcgcatcgagcccaccgccgaggcgttcggcgatatcgaccccgccctcgacgagcgcgaggccgactaccagaaggccgacgacaccgagggccgcgagtggaccggctggcacaaggccgagaaggacttgtgggacacgccgcttaccgccgaggagcgcaaggagacggctgaccagctcgtcgccgacacgcaaaagctgtacgacctcgtctactccgacgagttctccatcaacatcgacgacatctccaacggcgccatcagcctgctggaggaggtcgccacgactaagatcaccggcgaggaagaggcatttagccacaccgacctgtacgatttccaggccaacctggagggcgcgaaggtggcctacggcaacgtcgaatcgctggcgaagaagaaggacccggagctcgccgagaccatttctgcccgcatcgatgcgctgcagcagaacctggacaagcacaagtccggtaacggctacgtgtcctacaccgacctcgatgacgcgcagcgccgcgagctgtctgatctcgttgatgccctgcgcgtcccgctggcaaagctgacggaggccatcgtctcatgactttcgaactgtcacgccgctcaatgctccttggaatgggcggcgccggcgcggctctgggcctgagcggatgcagttccgcttcgcctgaggcaagcgccgaagtcgtgccgttccgcggcgagcaccagtccggcatcctcacgccggcgcagcagcagatgattatggttgccttcgacatggtggccacccgcaaagaggacctcgtcaagctgctcaccgactggacactcgccgccgagcggatgcaggccggcgaccaggtcaacgacccgaaggtgcgcgacgacgtgccgccggacgataccggcgagacgctcgggctcggccccggcgcactgtcgataacctttgggttcgggtcgtcgctgtttgagaagttcaagctcgagcacaagcgtccgcgcgtgctggagcggggcatcccgcggatggcggcggagaagctggatcccgcgaaggggtccacggacctggtcattcagatttgcggcgaggacccgatggtggtgctccacgcgatgcaccagttcaagcgcatcgcgtttggtctcgcctccgtgcggtggatgcagctcggctacggtcgcacgtcctctacatcggaggatcagcagacgccgcgtaacttcttcgggttcaaggacggcacgagcaatattaaggccgaggattcgaaggaggagctgaataagcacctgtggatccagccggaggacgagggcggcgagtgggccgccggaggcacgtacctgtgcatccgcaagatccacatgatgatggaggtgtgggacgagctgatcctctctgagcaggagaagaccatcggccgcaacaaggttgagggtgccccgctatccggcggggaggagttcaccgaccccgacttcactgccctggatgaggatgggcagccgctcatcgatatcgattcgcatgtggcgatcgtccacccggatcataacggcgggcaccgcatcctgcggcgcggctacaactacaccgagggccttacagacctgggccgtctcgacgcgggcttgttcttcattgcctacgtgcgggacccctcccaatcgttcatcccgattttgcagcggatggcgacagatcagatgaccgagtacctccagcacgtcgcgtcatcgatgtatatcgttccaccggggattcgcgacggcgattcctatgtggggcagcggttgctcgacgcgtaagcgcgggcacgtgcacattttcacaggcg

SEQ ID NO: 804 - DNA, 23336 bp, synthetic construct
  misc_feature 1..23336: note = Synthetic
  source 1..23336: mol_type = other DNA
atatgtaatataccagacaatgcgtctgcaacataacaccaggtacgtcgttgattgccagcactgttcattataatatctgatttttctgatactgcacgtaaaaacagtgcatcaatcctggtgctttcatcagttattgttgggccgtacacaaagcacaatctggctatgttggtatgtacaccatactgaacataatatgatatacacagggtttctgcggctctttttgattctgggtaacaagacctgggattggttgtgttgataatgcccgaatctgtttcaacaaaagggcggggacccttattgttgccgtatatttcaccagatgatataaataaaaagcgtccgttttttttcaatgcgtgttctaataacgatattgttcctattagatttgtacacataacaccaactgggttactggaaaacgccattggatgtgcggggctggcagcgtggattatatagtcgaatctttgtgtaaataaaacagatttggataaatctatttcgataaagtgtaatttatctgtttctgccttaaaacgattttttaatttatttaatgatgtcgatgttacgtatatatttaaattcatattatgcatatgatttagatatatcagaaaatatgtcaaataagaccccaataatccgttggcgccagtaataagtatagatttattgcgcaatatttgcagatgttttgacaaatcattatatatttcattaaattcttgatataaaatttgattcatttttgtatctttaataatgctttaagtatttcgaaatcatcgggcgttgtcagctttatgttttttctagatccctgtactatatatacttttttgcccagttctgtcataagtgtactggatgtggcggcatttttaataccttttgaacgtgcctctatgtgtgcattaaaaatgtcttttaatttaaaaccttgtggtgcttgggtgcaaattaaattattgtggggtatagcggttgtgctggaaatgccgtcagcagaaaccataatcgcttcataacaagggattacggtaattgcattgccatacttagtaacggctttaatgcagttattgataatggtgttgggcactattgggcgtacagcatcgtgaattaaaacaatggagtccgatgaatagtgtttttttaattcttttaatccattaaatatagattcaaatcctgtggcaccgccagttgttatatgtttaagttttgatattccatatttttgtgcagagtttgccagccatttttcccaaccacgcagacacgatacacatataacatcaatattctggttgttttgaaatatactcaatgtataaagtatcacaggtattcctgatacctttttgaattgtttgggaatagaattatgcattcgagatcctgtgccgcctgcaataatcagtgctaaattcatataatttttccgttaatgaaattatttactatcggtatttcactatagtcccattttatggtcatatggtttgaaaattctggacgaaacgcgcgccaatcgccgtatcgggtagtaagccaagcatccggattatttggggccataaatttgtggccgcaaaacattatttcgcccagtggtaatatatattcttttcgccaaactaaatcgtgataatatcccataactcgttcaggaaataattgccaatctatagcatcaaacatatcgccatcgatataatttggagcaatattatgcataataatatcgccagttatttcctcatatgaattatatttagattccccagcttcaaatctgcgagcttcgtccatagcgctttggtaatcctgtttgaattgcattagttcttcactggttgttattcgggaatagtatgtatcccagggaaaaaaatctacgcatactttattcaaaaatagcaccttaaatattccgccactttttgcccagcttgtacgaaaatatccgtggttatacttcatagttagcaggtcgaccgcgcgcttaaaatcatatcgcattatacctaaatctatatcgtcgtcccatggaataaaatctccattgcgcattgcgcccagtaagttgccgccaaccataaaatatgggattcccgcggaacgcagttcaatatctatcattttagccaaacatacacaggcgcgttgttgtaaacgtaaatgcccagttgcgggtggtaaagattctacatcgcagtttaattcatataagcgggttatatgattacgtagttccccgattttttgaattaaataattctggcctgcttctattctttgcagctgttgcagaaaatctgctgcatcttgatttttacaactcatataaatactccgcttaaaccgagccataataacaattgtttacaaaataatagtttccatactcatcatataaagaaatgttttttggtatatagcattgataaattgatgttgcgccagaaccagctgttatgccactggtactttgatatttgggacatttaatgcattcgttagaaaaatttaaataataattttgcgggcatattatggtttcactgccagaaccaggaccaccaggatgtggattataggcgctgcaatatggtgaatcatataattttatgcacgcgtcagaacacataccatataaatctcctgtcgcataatctgaaccgcaacacttttgaattaactcatcttgtggaaaaattcctgcattatttccgcaacaagaaacaatgccgttgcaatcatattcggataacacaggcgccgcttctacttgataggttttagacatcaacaatcctgcgataatcaaataaaatctatttattttggacattatcgtatctctcagttacataaatgttctcaaaaaacgttccttttatttcggcatatttttcttttgacaatacccagcaaatgtgtaaaattacaatcatcatacaaagcagaaataaaaggaacgtttgtattaggcacgtatattaaaaataaacacaataattagtgcacaaacgtgttttttctaagatttggcagatttcattatttattttgcctaaggtttgtaaaattctaatgtataaatttgtataaaaatcactattatggaaaacaaaaacccgcggaaatccgcgggtttgtcttgatggggggacacaggggaataaaccataagtttataaaaccctaggattttaacctttttcccagattcccgtcatcaaaattgttaaaatgtattacacccttgtattacacttttgcaattccattgtatactattttcagacaatgtaaacgggtatataaccaaagaaatcacggcggataacctaggacattttaatacggacagattgatatttcccgagatgttattcaacctgccgacatttcaacattaaatatcacgaacccgccgaccacaggcattataaatatgttttggtccatttatcccactgccacgggttattacaaattcagacgtataagacaccagttcaccagatatacggacatattcacggttattctggtcataaagacttaccatattcccatactgtttagcgtatgcaattttcatttttaccaccttgttttatacgattatatatccgtcaaatggcagtcgcccaggtaaaaaagagttgaattgaagcattttttaacctaaaattataaccatgaccttacaaaatattcagtttgatagacagaatttaaccatacacggggtaaagttccctgatttggacacattaaactctgttgcaaccgctattgcatctcaggtatatgagggttttaagccaacaccaaaattaatagaagtatatcgtgattatagacttggtaaaatttccacaaaagatttggcgagacaggttcataatgccatttaataacgattataagtatattgataaagaatgtctttatacggataaagataccggtgttttattaaatctgcaaaatataaaagactacgcggaattagttgcatttgaatcattgtgcgttgctaatcgtctggaacaattacataaagaaccttttactgttgaatatgcaaatgacctgttaaagattcataaattcctgttccaagatgtctattcatgggcgggcgaatgcagaaaggtagaaattagcaaaggcggacggcaatttttaccaatgcactcgttcatacaggcattttcatatattgatagactattatcagactataacacgatagacaatatggacaaggttggtattgcgcgaaagcttgcagaaatactggataacgtgaactttttacacccattccgtgagggtaatggacgtacacaacgggaatttattcgtctgttagcacgtcaaaaaggatatgcgctggacttaaacccactagacaatcatacggtctatgaacgatatatgaccgatacaataaacggtgatgttcaggatttagctactcttatttatgaattattagtctgataatatatcgttgacattaacaaaataattttgtttatatcgttttaaattttgcaatatatgtgaatatagatgttcatgtttgtttttatgttttctgttgcaatataatagtcagtatagccagcgcaaccttcttcgctactctacatagcatggtaaaagactattatctaatttacccacaattataatttattcattttagtgacaatttcttgtaatactgcttcaaaatgccgaaaaacttgacgtttatctggttctggcaaagctaataatgcattacataatctattttttgctagcacctgtcgttcttcaccataatttcctggattttctaattgatagtaatcattataattgaaattatccggtaataccaataaattttcaatacctattttatatttaggtgcttctatacgtttttttaaatgaattacattatttgcatctttaacttgagcatcacaatcatatataaataagaatttattattattgttgttgagataaggtaacgccttacggcaattatctagcgcgttatcaccaccgcgattgtttttattttgtccatctccaatatttttaataacaatgtcatctggcaatattttaaagagttcgtttgctccttttaaatattgttcatcagtataacctgaaacaaatactgtttttgtttctttatatttattaagtttctccttcattatttccatttcagcgattttatctctaatgtacggagttactaatggcataattcccatcatttcattaagatctcctcccgtattaggagttatatgtgttgctaaaccattttttgttacaaaaaaaacatccacagatttttgtaaagctacattcatatcttctgacaaagagtaaaaaccgggagagtgagtagttataaacatttgaaattcatcagaatacgatataaattctttggccatgtcaaaacattttgacatttcaacaccgttttctggttcttcatatccccatactatgtttgtgttaacctttcccttatggtctgcatctcgttgactttcagaaataaatttgagtaaagaaggaatatggcgggctttaatgccatcgcccctaaagtctaaatctacaccactgtcattaaattttgtattaaaggtcagagcttcaaacattttttgcatgtcctctggtatgtttataacactctctaccccaatgttgtcatgaatgttacgtgtaagacttttcgtatattcttcaatgtttttagaaaacttttgcgcagagctaatcagtgtattattttctttttgaggaatagcggaatatagttgtgataacagagttttaaaaatactagaacccttaactgctgggatataatgatatttcatttggtcaagcgccgcaggcaatctgcaaagcctttcttttttatgttcatattgcggtaatgtttttgtatctttacgccatttcctggtaaaccacatttcctcaactataaagccatctccatgtaataagatactaatacttatctctttagcagttttggccggaacctttgcaaagttacaaaagtcagtatcaaaattaaaggcccgtccataatctgtttcattattaaaaaataaatttagcgcttttaaaacattagactttcctgcatcattcagccccacaaagatattcatttgtgaatttacttttaaatccaatacatcaatagaacgaaaatttttaattttaatttgttttatgtatacagccatgacacattatctatttaataataacttttatcaaagtagtaacataattaactaattatgtctacttaaaataaatgattgtgtatattttgtactatttctagcaaatgagataaacccactatagctatcattttctagtatgacaaattgccccattttttgtacctactttgtctatttttatacaattttaatattaacaagaatgattacactcaacatattgttcacgttattaaaataacggagcaattgacaattaccatctaaatggtaaaaaacaagttgaattattgcgctttttggcctaaaatgtgcgtgatgtggcggggtgccacattggggtgtcgtaatctctattttgactgcgtttatccaacgttactggactcctgctgtgaaaggcaggagggttggttaatatattgaatacccaacactattttcagtcaaaagtagttacgaacctcctgccaccaaatattttggtggtttttttacaaaaaggagattctggtgcaaacaaaattattctcagacgactacacatcgcaagcaaacgagaagtttagtattgtattattttttagtggtgctggtggtctggacctgggatttgaaaaagccggctttcatacgatttgggcgaatgaatatgacaaaacaatatgggccacttttgaacgtaattttccaaacactacattagataagcggagtataacagacgtgtcagcagatgaaatacctgatcctattgggataattggtggaccaccatgtcagagttggtctgaagccggagctggtcgtggcatagaaaataaacgtgggcaattgttttatgattacatacgtattttaaaagtcaaaaagccaaaattttttctggttgaaaatgtatctggtatattgcacccaaagcattctaaagcgttcaatgggttcttaaaagaatttgaaaatgccggttatgatatattttggcaacttgttgatgctaatgattataacgttccagaaaacagaaaaagggtcataattgttggctatcgtaaagatttacataagaaatttatatttccaacacccgcaaatcacaaaccaacgctaaaagaagcgattggtgatttgccagaaccgttacccgcaaagcccaaaaataaaaccaatgggaagaaagataacaaatggaataataacatatttgttaggttctgacggcaaggattattacaaacttattcattttaataatcataaaacacgagttatgccattcaatattagtgagactctgaatcagtcttctgagaaagcaaaaccggaaattaaaataccaaaaattaaactacctacaaaaattattgatttaagttttaaagataattataaaacaactgttattttaacaatggacgaaggctggtctatttcatttagaatccataatgccagctcgcgtgtggaaccaagtttaaaatttgatatacaattacaagggcaacctgctgaatggttttatattgacgcagagtggtaatgttgtcttttctattgtaagagatattgttatacccctttcattatctcttcacacttgtcaaaatacggttgcagaaaatcatagtttaatttatccacctgttccttaatttcgggcaacctgtggttggaataggattgatccattgtgcttttgccttcacagccgataatattattgataaaggtcggtaaaactcccactttttgcaatcttaaactggcatttttacggaaagaatgaaaaccctgtttatccccgtttttatctttaatatcaatatccgacaagaattttaatattccacgggttgcaaatttattattttcctttccaccactggtttgacatttcggaaatataaaatctgtatttgctgcttttaattttgcctgtctgttccgcacatattctacaaatcccaaatttaagaattgttgcgctatcgggacaatgcgttcagagacttctgttttaaggtgtttaatggggtgattttcaataaattggatacaatccaagccatcttttttaagcacgtccccatattgcaggggcattgcggcattttgttgcaaccccgtaaacaatgtaatcattgccgtccagaattgttcgggattctttttgaaaaagtcgtattttgggtcaaacatttccaacaactggtcatcagtatacggcatgtgtggtttttgttgagatttcggcgtcttttcaaattttgataatatttgtatcagattttctttatatgtgtcaggttccaaaatatgggcgtgctttattaactggacaacatattggatatattttcgctgtgtgccactttttacattgggcatattacggacagaattaccaattttatgcatgatttccggtttgtaaaaatccatataatcagaatcaagcccgagtccgacatcttgaataagtttttttattgcaggatattttcggtcggattcggctttttcattatttgccgtttttgccatagatgtcaaaatttccccgaccgtatgtttaacaacttttggttgttgaatggcttgctgtctcaaaatggaattctgttgttccaatagttggttgttttgtaattgggcttgaaaactcttttccaaaaggtctttaatagcaggcaaataatgtaaaaattggctaaatgttgctttgtcgtcgggtaataattcggaacgttttacggtatcaacataatttcctaaatctgccaacccctcaatgacgtggtctggttgtggtgtttttgattcttttttccgcaaatgtgtaattcccgttcggcaagggggtatacacaggctcaaaaatgacctgagaccataacaaatctaaggtttccatgaattttgtgttcatacactccaaccgttcagccataattttagcattttcccgtgcttcatagtaattatatgtcttcaaagacttgctcaagaagcgtcttttcctgttttctcgtggtaattcaaccctataataaaaaatgttatttcgcaataatatattgtggtctgtattacactttgtattacacgtttttgccatatctgtatccctttgtttctggcaaaagtgaaaatacgaaaatgttggatttctaaggttttggtgtgtttcgtatggttcaaaccaaaaaaataaaaacccaacaaaagtgttggatttctaacaattctattctggtggggacacagggactcgaaccctggacccaatgattaaaagtcatttgctctaccaactgagctatgtccccaaaactgaactggaataaagaacccaagggttctttttccaaagttcgggctcaattttgccacagaaaaaaacaaaaatcaaggaaaaatatatttaacgctatttttatttataacaaaaatcggacaccgaagtgtccgaatataatggtgaaatctctttccataatggaaagttcttattaacgactagacatctaattccaacttattttaatcattaaataagtgtttcaccacaactattataaaataaaaagaggagttgtcaaatatatttgattttaagcacgcagaaatatattattgatacaaagggatgcaatatgaaatataaattagggcttgatctgggcagcacatcattagggtgggcgattgtcgaattaaatgaaaaagatacaccgatacgtttggttgatatgggggtgcgaatatttccggatggtcgtgatgcacaaagccatactccaataaatgctgtacggcgccaggcacgtcaaatgcgtcgtcgcgttgatcgtattcatatacgtaaaaagcgtgttttgcaactaatacataaatacggaatggattttgatattcgaacagataagaatttagaaaatccgtatgaattgcgtgtgcgtgcactgacgcaaaaattattctcatctgaattgggacgtgtgttattccatttatctttacgacgcggatttaagagtacgcgcaaagaaacacgtggcgaagatggcggaaaattaaaacgtgcaaccaccgccctgcgcactgcaatgggggatgaaacgctggcacaatttcaaatgcaaacgggcaaatacagatttgcgaatcaatttgatggcacaactataaaagatggtgcattatatccaacacgtgatatgtatttgggcgaatttcgcgaaatttgtaaagcccagaatttacccgataacatacgccaagaatttgaacgtgctattttcagacaaagtccgctaaagcccgtcgacgttggtaaatgtgtatttgaaccagaagagccgcgcgcatataaatttgagccagattttcaaaaatggcgtgcattacagcaattaaatcaattggccattttggataaagggattgcaatccctttaaccggtgaacaacgctctaaattgttcaatgttatgtttaatacgtttgatggcgtcagttttgaaaaaaacggtcgtgcaaaaataacatttgccaagataaaacaaattctgggattatctcgaacatctaaatttaatttggaatcagaaaagcgaaaagatttagattctgatgctactggcggtgcattttataaaattggtgaaatagagttttggaatgcgcgtaatgatgctgaaaaatctgatatattaaacagaataaatgatgataaaacagatgattctgatttaataaattatttagtccaagaatatggaatatctgccgaacgcgccgaacaaataatagatattccgttggaagaaggtgtgtcaaacgtttcattaaaagcaattcgtaaaatgttgccatttttagagcagggcgacttataccacactgcggctcaaaaagtatggggaaaacattcagacaaagatattccagaattagtttctttgccatattatggcgatttaacggcattaaggtcgtcattggtgctggataaaaacggtgtatatcgcacaatgaatgcaaccgtacatattgcaatgaatcaaatacgtgcggttgtaaatgatttaattcatcaatatggcaaaccatatgctataaacatagaaatggggcgcgatacacgtgccggtgcccaagaacgtagcgaaatagatgcacaacaggcaaaaaataaacgtgaaaacgaccgtattcgcaaagagttagcatcaatcgatataactaatccatcacgtgaagattttcaaaaatttaaactgtgggaagctttggcaaaaaagccacaggaccgaatgtgtgtttatactggtcgtcccataaccagtttgacagaattgttcaaaagtggcaattttgaaattgaacatattttaccattttcacttaccctggatgattctttggccaataaaaccatttccgctatagatgcaaataagttcaagggtaatcgcataccgtacgatgcctttaatgatcctgcatccccttggtcgtatgatgatgtgttacgtcgcgcacaaaatttaccagattcaacaaaatggcggtttaacgaaaacgcaatggaacgttatttgaaagataatccagattgtattgcgcgcgcattaaatgatacgcgtcatatgaccaaaatggcggtcacatatttgcaacatatctgtaataataaaagcaaggttgtcggtgtaaatggccagatgacggcaatgttccgtgatatgtggcacctgaactggtggaaagaccgggcggatgcagacaaataccggggcagtcacatacatcacgcgattgatgcatttgtaatcacgtgtatcagcccaaatatgtattatcatatcgcacgaaatgcgggtgccgctgaacattattttggaaaatcacaaaaagaaaagcgtgacatatggtttgctgatatggcaacgccgttcgatggatttgattattatgatttcaaaatgaaatgtgaaaatacaatcatttcatacagaaaatctatcaaagatccgcgtgaaaatggtactgttggatgcctgcacgaggaaactgcatataaccttgaatcttttgaaaatgataaaacgataaaagcaacaatgtctcgccgtgttgagttgccaaagacagacgaaaaacgcgaaaaattcaaaaaagatttcaaaaatataaataaaacaacattgcaaatgtttttgtctgatactggggttacaaatgacgatgcagatatcgtgccaaaatttttggattggtgcaccgcgcgcggaataaaaaagcttcgtatgctaaaaagtgatgttgatatatcaacgtatatcccagtgttcagaaccaagaaagagcgtaacgaatatttgcgtgcgtatgaaaactggtatgtggcagatggcatttctgctggaatcaaaaataaacacgcaaagcaagagcagttaaataaagaacgtgaattactggacaattttaagtcggcggcaaaacgtgcttacaagtggtatgttggcggtaataatttctgtgcggatatatttgaaattagatctgatgataaacactatcctaaggatgccggaaagtggaaagtcgatatagtttctaattatatggctgaaaccaatccgggcgtatcactgtggcataaaaaatatccaacagcgcgccgcataatgtcattgcgtataaatgatatggtaatggcggaattttcaaaagatgacccacaattgcccagtggtataagggacaccgttgcacatcagtgtgcggttgaaaataaagatacggtcaatatggtttttagagtgaagaagttgaatagttctggaactatatatttgcgaccgcattttattgcaaaggaagatgcagatacaaagtcctggatcgcaagtacaacgtcattaaaagaacacaatgcgcgtaaaatttccgtcagtccaactggcaaaatattaaaataactgtaattggttggggcggtgtgctagcactgttggcgcatcacccctgtccaaatggataatatcaccaaactgtgtatctgtgaaaaacaagatatttacgtccccggtacacggattgttacgttttaccgcatttacgtatttttgtgaattttcacgcgtgcctgtaaaacgcatataaacagaatattgtgccatagaaaatcccaggtcctgtaaaaagttacggaatcgcgatgcctcgcggcgttcgcgtttagtttctgttggtaaatcaaacataaccatcatccacatatattttaatccatcagttttgtatgacattttcatagtccagtttgtttttcttgtcctttagtgaatttacaaaattccatacgtcgcgttgcataattgtgattagtggtgaatatccagatctggtttttatgtccgtgtctaaaattccggccaatgttcgtttggcatctgggtctaagttgcgaaaatagttatcgtttccattaaacatttcgtacactagtgcatcaacaattgggcgatatggttccattaaatcatcaaccaaacacataggatttaattggttgtggtgttgaattccatacgatgggtttaatcccgcaccaacaaccaggcgtgccactgctccacgcaaaatagcatagccatagttcaaaaaactattgatgccggggttggtgtgaatacgtaaaaaatcgctgccaaacaattctgaaaaatacattcgggccgcgattccttctacatttcctgtatcccccgaaagaacggccgcgggtaaatgttttattcggttgtttaattgaaatttgtccaaaacgcgtgactgatttctaattttttctttaactatcgttcgccacagttgtttttccaatggtttagatgtgtttatttgaatttgttgtaccgccatttgtcggttttgaccaatcagcggtgtcataataccaattggattataatttgcaccgactattatcaatggaattccattttcgcacaatgtgctcatcagggattgtgtaaaaactgttgctcgtccggttaccataattgcacaaatggaatccagcggtatttttcccaatacttcaccgtgctcttttatacataaaaagccacgctgtacagacagctcgcggttatcatttgagatttcaataattgttggttgcatatatcgtgtatagcacataattatattttgtcaactttttatatgatgggacgattcaaaaaatagaaaaatcgaatcgatttgatgtgcgttataaccatttttatacttggtatatcaaaacagaaaccccagaattcctggggttttggtgatatgtattatatcaaattggaattagatgtctagccgcaacctatggctcagcaggcctggaagacaaagcattatatcaaattggaattagatgtctagccgcaaccaaccggtttcagcaggtgacattatatatattatatcaaattggaattagatgtctagccgcaaccaaaaaacgcgtctaaggtgtatttaaacgattatatcaaattggaattagatgtctagccgcaacgacaatccgagcacaatttccgatatcttcattatatcaaattggaattagatgtctagccgcaacgcatgcattagggaggtaatcatggcatatattatatcaaattggaattagatgtctagccgcaacagaagaatcagacgcagtatcgcgttcaagattatatcaaattggaattagatgtctagccgcaaccacctttaagcgttttcaatcattacaaaaattatatcaaattggaattagatgtctagccgcaacgcacaataccgtttgctaattccccggtttattatatcaaattggaattagatgtctagccgcaactactgaatccttgggacgaaaagccaaagaattatatcaaattggaattagatgtctagccgcaactgacttcggattgaatcaagcccagttcttattatatcaaattggaattagatgtctagccgcaacttaaccgcttgtattggttgctttacgggtattatatcaaattggaattagatgtctagccgcaactacgtcgggctgaatgataaagatacaaagattatatcaaattggaattagatgtctagccgcaacataaacggttcgtccatttagcatcgccttattatatcaaattggaattagatgtctagccgcaacaatatcatccgcaatcttgcggcctctcttattatatcaaattggaattagatgtctagccgcaactccaccggcacagatttttatttgcctgatattatatcaaattggaattagatgtctagccgcaacatgattcgccctctttttttatagttactaattatatcaaattggaattagatgtctagccgcaacaataggtatatgattgcccttgacggttatattatatcaaattggaattagatgtctagccgcaacaaaaaaacgacaaggggttttcaatcatcaattatatcaaattggaattagatgtctagccgcaactaaaacctgcgccaccagtataatatgtttattatatcaaattggaattagatgtctagccgcaactaatcaacaatataatagtcccctttggcaattatatcaaattggaattagatgtctagccgcaacgtaaattcaagatgtatgcggggcaaagaattatatcaaattggaattagatgtctagccgcaaccacaagtccatgtatctgtttgtggtggagattatatcaaattggaattagatgtctagccgcaacaagtacgattgtgccgtcatcgtgcttgtaattatatcaaattggaattagatgtctagccgcaactgaaccatcaccaacccgaacaatacccgcattatatcaaattggaattagatgtctagccgcaacgggtcaacgatgcgtggagagtcatcataattatatcaaattggaattagatgtctagccgcaactgacatcgattgcgggacggtgtttttgcgattatatcaaattggaattagatgtctagccgcaacaccaagccgtctcgatatgaatgcaatggattatatcaaattggaattagatgtctagccgcaactcaaatatgataaatggcaggcaatcgcaaaattatatcaaattggaattagatgtctagccgcaaccaaatattcaacaattcccaaatcataaaattatatcaaattggaattagatgtctagccgcaactgctattgttatcaaccaacgaacgaaaagattatatcaaattggaattagatgtctagccgcaacagaggccgctgcaatattgccaaaagatggattatatcaaattggaattagatgtctagccgcaacccaccaacagccgtagccaggcgttccaatattatatcaaattggaattagatgtctagccgcaactaggctggcaagcctgcgcattactttatgattatatcaaattggaattagatgtctagccgcaacaattgattccccttgtcggttttggtgggaattatatcaaattggaattagatgtctagccgcaactttgttcgtgattggactattatggacggtattatatcaaattggaattagatgtctagccgcaacttttgcgtccggcgaagacacaacgactaaattatatcaaattggaattagatgtctagccgcaactgtcgttcgatatgggttttttggttccaaattatatcaaattggaattagatgtctagccgcaacggaatatgatgccgacccgaaatccgcacaattatatcaaattggaattagatgtctagccgcaacactatcttgtatcataatataatacaattgattatatcaaattggaattagatgtctagccgcaactaagtcaaccggtgacaattcgtccccgttattatatcaaattggaattagatgtctagccgcaacacaatgtagcgtctgttgcatcaacaagtaattatatcaaattggaattagatgtctagccgcaactgccgctttcttgtacgcgacttcatcagaattatatcaaattggaattagatgtctagccgcaactgtgaaaacggttattataaattctatactattatatcaaattggaattagatgtctagccgcaacacgaaatgaaagacgctattgagtccggcgattatatcaaattggaattagatgtctagccgcaactatctgggtataaggaaaataaatttaataattatatcaaattggaattagatgtctagccgcaactatatacattggattaccaacataccaacaattatatcaaattggaattagatgtctagccgcaactactgatggttcaacaccgtcagggtttctattatatcaaattggaattagatgtctagccgcaaccggttataaacgcggacgatttgcgtatcgattatatcaaattggaattagatgtctagccgcaacagataaaggagacaaaaatgaaattatctaattatatcaaattggaattagatgtctagccgcaacaatcgccggcaaattctattgacaacgcttattatatcaaattggaattagatgtctagccgcaacattgtctatactccaaaatatacgaggacaattatatcaaattggaattagatgtctagccgcaacgggtcgttcgtaaagacggacggcgtattaattatatcaaattggaattagatgtctagccgcaacgtcaattattggcgggttttctagcgaaaaattatatcaaattggaattagatgtctagccgcaaccgtagcaaggtttaatcgccctgcatcggcattatatcaaattggaattagatgtctagccgcaaccgattctgctctctgtacgcctagataaccattatatcaaattggaattagatgtctagccgcaaccgaatatactgtcgattccttttgatatgaattatatcaaattggaattagatgtctagccgcaacatgcaattcgtaaagcttggacgtttggtaattatatcaaattggaattagatgtctagccgcaactttgttcgtgattggactattatggacggtattatatcaaattggaattagatgtctagtcgcaacagaaaagcacatcaccatttacccagcagattatatcaaattggaattagatgtctagtcgcaacttgtttgtgcgttttttagatttatttctgattatatcaaattggaattagatgtctagtcgcaacacttctcttatcttgcggccggcggctgcgattatatcaatttagaactaataagcgtgtaaaaccattcgtggcttgtcaagtatgaataaatatccgatcaagtcacgttatatatttgatttttttgtgcgacatcagtatgatgcaatgtactatgcttaagaaaataatttttagtttattagcgtttatgataaatatcagcattgctacttctaatactattggtgataatatgaacatacagattacgattgatggggcaaaggtcagtgggcaattaaacaatacggcggcggcgcgggatttgtgggggcgactgcccattactgtgactgtatacccccatcaatcgcgcgaggtttattccaacatcccactgaataccgacggggataaaattgcggattcatacaatgttggtgacattgcatactggatgccgggcggggcgttggtgttttactatggacccggatacacggacagtttggtcattatggggcgtatgacgtcggactatggtattctggcagacattacgcgtccgatcgatgttacaattgaacgcgcacaataacaggaaaatatatgtcaaaatacatcgatgcgcattgtcatttacaggattgcacagatataaacgccgtattgcagaatatgaccgcggcgggtgttatcggggcgatatgtaacgccacgtcgccggcggattgggggcgtattattgaactggcacagaagtatgccggcctttacggatgtatcggtgtgcatccgtggcatatcgcggggctggcacctgggtgggacgataaaatgcacgaaatgttgcggcaatttccaaccttgatggtgggcgaggttggtttagataaaaatcacccggatatgccggtccaggaatccgtttttatttcacagatgaaaattgctggcgacctggggcggccgatatttgttcactgtgttggggcgtgggatcgtgtactgcatattttgaaaaactatcgtggtgcgcgtccgcgggtcttgatagcacacgcatttgctgggtcgcgcgacataatggaacgcctgggggcagaatatggtttttatttttcttattcgccggatatattgaacaataatcgcactcgcttggtggatacggtgcgcgaaacgccgattgaacggattttgattgaaagcgacgccgccacgccagatattgttcccgatgttttgcgtcgtgtggcggaaataaaatcgattgcggttgccgatgttgctgatatagtttataaaaatacaatcagaattataagaaatggacagattgcatagaacacgtttattgtttggtgacgcggcgatgcaacgcttgggcgaagcaacggtaatggtcgttgggtgcggcgcggttggttcgttcgccatagaagcattggcacgcatcggcgtaggcaatttgattctgatagattttgacggggttgaagaatcaaatataaatcgccagttgtttgcgctggattcaaccattggcttggcaaaggttgacgttgccgcggcacgaattagtgatataaacccgaagattcgcgttacggcattgaatatgttctttgatgaagcgcacacgccggatgtaacaccggattttgttattgacgccatagattccgtaccgtctaaaatcgcattgtacaaatggtgcgccgcacgtggggtgtcgtttatatccagtatgggggcagcacgcaagaccgaccccacgcaaatcagaatttcaaaaatatcaaaaacatctgtttgcccgctggccgcaaaaattcggcggattgtacgtgacgagaatattgctgattttgatgtagtatattctgtcgagccagcagattcaaccgtatccggccgagagtttggatcattgataacggtaacgggaacttttgggttgatgatggcaaattttgcggtgcaaaaaatagttggtaagtaaaaacatttatggcaatttgttccggtgtatataaagaaagcccattatttctgcgggtaagaaccttttcctaaatgcgctattgcgattgaaaccgtgtttgaaagcggttataatgaacctgtcttattacaagacaaactaaatcttgaaaaggagaaaaaagagatgagaggactgacaacctttgtgttgatgccattgacgattatcggtgccctgaactggggtttgattggaatctttggtttcgaccttgttgcgtttatatttggcccggccacgattgccagcagcattgtgtacagcattattggtatcgcggcgttggtatggttgatatggatgataatcgaccgtccggtgcgcaacgaacgctaaataaagcaactgtaatatttcgtgtcaatcgtcctgctgcggtattgtaaagatattgttctttgatatgtatgcaggacgttttgcttttgcaacagtcggtatttttttcataacttttataatcagagccgtataaccacaggaggaaattatgatatacggctatatccgcgtcagcactgataaacaagattgcgaaaaccaaaaatttggcatagaggccaaagcccgcgaattgggtgtaaaaatagaaaaatatatcgaagacgccggtgtttctggcacacgcgaaccagaacaacgtgcactgggcgggtgtttgcgccggctgcacgcgggcgacgtcattatttgttcggaattatcgcgcctgggccgcaagatgtttatgataatgcgtattttagagcactgtatgcgtgttggtgcccgggtgtacacggtcaaggatggatatgaactgggggacaatatccaaagcaaggttatggcgttcgcatttggactgtcggcggaaatagaacgcgatttaatcagtcgccgaaccaaggaagcattggatttgcgtcgtgcccagggacacaaactggggcgtgcgtttggcagccgtaacaaacatcatattctggatggcaaggccgcccgcattattgcgatggcaaatcgtggcgattccaaactaaaaatagcccgaaaaatgggcgtttctgcggcaacaataggacgttttttgcgcggaataaatgaaaaatcggacaatcaaacggtgattagattgtttaatgtttcttgatatggcaatgatacgaaaaattttactggaatcaagaatttttttattgcaaactattgaccgttggattgttccctatttaaggacatttgattgttccgaaattagggcagaaaaacagctaaaactgcttatcaaggagcaattatgagttttatatcttgtactcccaataaagctattcacgggggcgataaggtcaccgcggctctttttctatcacaactggcaattaaacaaacagcgggggtgttatggaaataaagcggttatttttattcgccggatatgacgcccagggtattgtggataatacattgttgcattatttgcgatgtctgtccggatatggcgatatcgtttttgttatggataatgatgcggcagaatccgaagtggataaagtggcatcaattccaaacgttctgtacgcggtggccacacgtcacggcgagtatgattttggttcatacaagcgcgcgtatgattgggcggataaaaacggcctgttgaacaaatatgattgggtttatctggtcaatgacagtgtatatggcccgctgtatgatattcggccaattctggacgatttggaatcgcgcggggttgatttgactggtatgattgatttttcaaacaaatgcacacctgttcaggtgcagtcctggtttgtgggactcagtcgtcgtgtcgccaccagcgattttatgcacgtttttatgaaaaatattcgtgcccaatcggataagcaactgattgttttgaaatacgaggttggcctgtcacaaataatactgcgtcacggatataaaatgtcgacatatattcaggactcagaaggtgataccagtcatcgcatatatgataatccgttggcattactgaaactggggttgccgtttataaagaagggtggactgcaaaatttattgggtatccagtatttgtatccatatacgacggatgcatttgttgattcaataaataaaaatgccgttcgttgcggaataaagtttgccgcatcacaatacgaacgcccgccatatacaaaaagttatcgactgacactgttgtcaataccgttggtgaccatttatcgccagcgtcacaataatgaacaattgacgtgttacaagatctttttgtttgactttattcctgtggcaaaaattctgtccaggaagtaaaaccactatatcccgtgtgataattaaagaaacagttaaggatttattatgcccggcacaaagcacagcacagaatataaactgattgcgaaatcgaaatattttaacagacgttggtatttgaaacattacccggatgttgcatcatctggcatagacccagtaaagcattatttaagatatggttggcgcgaaggccgcaacccaggcccaaacttcaacacgcgggaatatttacgcaaatatccggattgtaaaatcgtaccattaattgatttaataag

SEQ ID NO: 805 - DNA, 23330 bp, synthetic construct
  misc_feature 1..23330: note = Synthetic
  source 1..23330: mol_type = other DNA
gcggcgatttatccaatcacccccagtagtacgatgggtgaactggcggacgagtggtcctttcagcacaagaaaaatatttggggcgcaattccacagattattgaaatgcaatccgaaggtggcgcagccggcgcaatgcacggtgcgttacagatggggtcgctggcgacgacatttacggcatcacaggggttgttgctgatgattccgaatatgtataaaatcgctggcgaacagacgccgtttgtcatgcatgtggcggcgcgcgcattggcgacacatgcgctgtccatatttggcgaccacagtgatgttatggcagtgcgcagcactggttttgcgctgttgtccagtcataatgtgcaacaggcgtctgatatggcggcgattgcgcatgctgcgacgttacgggcacgtgtgccatttttgcacttttttgacggattccgcaccagccatgaagaatcgcgtttgattcgaatcgaagatgatgtgttacgtaaaatgattccagataatctggtgcgtgaaaaccgtgcacgtggtatgtcgccagaacacccgacaattcgcggaactgcccaaaatccagacgtgtatttccaaggacgcgaggcggcaaacccactgtatgctgcgacgcctgatattgttcaaaaatgtatggacgaatttgcggcactgacggggcgcaagtataatttggttgattatgttggtgacccaaatgccgaaaacgttatcgttgccatgggcagtgcgtgtgaaacaattgaagaaacactgccgttcctgccacgtggactgggactggtcaaggtgcatttgtatcgaccgttcccggttgacgcgttgcgcgttgcgttgccgaaaacagtgaaacgtattgcggttctggatcgaaccaaggaaccaggcgcaatcggtgagccgttatatcaagatgttaaaacggtcgtgggcgatgcggcggcggtatatggtggacgttatggactggggtccaaagaattcaaaccgcgcgatgtcaaggcagtctatgaaaacctgatgcgcgatacattgcatcataactttaccgtggggattgatgacgatttgtcgggactgtcgctgaaaacggatccggcgtttgctgtccaggcagaaaatttcaagaccgcaattttgtatggtattggttcggacggcacagttggcgcggttaaaaatatcgttaaaatcgttggggaaaattctgatttatatccgcaatcatacgcagtatatgattccaaaaaatcagggggacttaccgcatcgcatattcgtttttctgatgcaccgattaaaagccagtatttgatagaagtggcagattttatcagcgtatcaaactttatgattgcacagcgttttgatgtgtttcgcggcctgcgtgcaggtgggacgattatgataaatacgtcaatggcacctgatgtggcgtttgcaaatctgccacgagaaacccaggaacatttaatcagactgcgtgcaaatgtgtatttcttggacgcaaatggtgcggcaaatgaactggggttaggcaatcgtataaacacgtttattatgctgaatttctttaatctgacccaggttattgacccagcggttgctgccaaatcggccaaggcggcaattgaaaaaacatacaagaaaaagggtatggatgttgttcaagcaaactgggcagcggttgatcgagcagcgggctatctacatcaatatacgttgccgtcgtcggtgtcaaattttgcgccagactttatcccgtcgatgactgcggatgccccggccgagattgcggggacattgggtgaaatggcggcacagcgtggtgacgcaattccggtgtcgcgtttccgcactgatggtgcgtttggtgcaggccagtatccagtcggcacatcaaagtatgaaaagcgttcgatttctcagcgtgttgcaacgtgcgatttggaaaaatgtattcagtgcggtaaatgttctatgctgtgtccgcacgcggcaattcgtatccgtgcattgaccgctgatcaagtggcgtctgcacgtgcatcgggaataatagttgttccgatgaaaaccccagaactggggccggatatgtattacacactggcaatttcaccagcagattgcactggttgtggcgtgtgtgtgaaaaattgtccagtggcggcactggctatgaaaaacgtgcgcgatgttgccgacgaaaatcaacgcgcatttgacgcagtggtaaaattgcctgatattccgcgtgaaaaactgaacttgaatataccaaaacatgtagaattattaccacattactttgagtttccgggggcctgtgcgggatgcggggaaacaccatatatcaagatgttggcgcatttgtttggtgaccacatggtggttgcaaatgcgacggggtgttcgtctatatatggggcaaatttgcctacgacgccgtggacgtgcgacgcgtctgggcgcggaccggcgtggtctaattcgttgtttgaagataacgcggaatacggtttgggtatgcggttggcgttgaatcagaaacgcgacacattgcgcagtttgctgttcgaattaaatattccaaatgttgacgcaatgtttgatacatgcgacataaatgcccagcgtgccagtgcggaaacattacgcaaaaaattggcgacaattgatgggccacgtgctcgcctggcggaaagtttagttgacgcgattattgataaatctgtatggattatcggcggcgacggctgggcgtatgatattggatatggcggtttggatcatgtcttgcacagtggcgaaaatgtgaacgttttagttctggataccgagggatattccaatactggcggccaacagtcaaaatcgacgccatttggtgccagtatgaaatttgctatcggtggtaaagaacatgccaagaaagacttaggtatgattgcgatgatgtcgggggcatacgttgcgcaaattgcgttgggggcaaatcctgcccaggcgattcgtgcgttccgcgaagcggcagcgttccctggaccatctatcatattagcgtatgcgccgtgtattgcgcacgggttcgcgttgcaaaatgctgttcagcaccagaatcaggttgtccagactggcgcgtggccgttgtatcgttttgatccgacaatggtgatagaagggcgtaatccattgacgctggattcaaatattgataatccgaccgcattggaggactttttgaaaaccgagagtcgttttagcgctgcacgcgcggtcaaccctaactttgacagattggtcgaatttgccaaggaaaataatcgttacaaggtggaactgaaaaaatatattgcgcattttgcaatgatgcacgcagcaaacgaaaccaaagaaaatggcgagggataaataacatgaaaaaaataatcgcgatttgtttaatggcactggtcggctgcacgttccagaccaaacatcgaggatatgttttcccagcggatttggatgcacgcgtggcgcaaattaaaacgaccgatgaactggaacagcagattggtgcgccccaggtaaaaacaatccatggtgacgacgtctggatttattatggtgcagatgaaaattatcgcggcccattgaaaaagacatatgataatcggacggttttgttggcgtggataaaaggcaatcgcgttacccgaatgcaggttttgcgtgatgatgatttgcctgaagttcgggttgctgatggtgaaacagaaatcccggcagcgattgaattgaacgcaatccaggaattgtttaacaatatcggtcgtttcacaccggcgggactgggacaataaaaagcgtttggatttttaccgtaaattgtgtaaaataatgtccaaagagagatgcagatgaaaaaactgttttgttctgtgattgtgctggccacgatggtaacgtgtgtgcatgcggcgacgttcacgtcgtgcggggcggggtatatattggcagaacacgcaaaagttgatggcatcaaggcggctgaatgtcaaaagttgtggtgccgcgatttggaaacaggtcacgtaatgggcaatggtcgtgcggcgtcatcgggatacgttgatacgcccgcgccagtggaactgattgacgcgtctggcaatcgcattgaatgctttggcaagcgtaaatggtgcaatggggaaccagcaggtaactggaatccagaatatggtgcatacacgcgtggtggtgacgacagcacgtataaatcgtatcaaaaaggtgggtgttttgcatggcaattagaaaaaccggattgtgccgatgggctgaccgcgatattgcaaaatcataaatgggtttgcgccaaggccgaagggggggcgtctatcaatcgtgcgtcagcggtgcgtcgaactggcgcggttcgtcgcataaataaataatattatgccgtcttgaatgggacggtatttttttatggtcaattatttgtttttttggtttttttgtggtatactgcctgagagtcagagagaatggcaaccgcaaagggtaacgctattatgccaagcaagaaattagattttaaaactggccagtatgttgtgtatccaacccagggcgttggaaagctggtccgaaccgaagaacaaacaatcggcgaccaaaaaattaaaatgttggtcattgattttgaacgcaatcacatgactttgcgcgtcccggtcgagcgtgccgaaatctcgggactgcgtccactgaccactgccaaaaaaatggacgaggcaattgcgtctgccaagggcaaggcgggggcaaagcgtatgatttgggcgcgtcgtgccgcccaatatgaagagaatataaattctggcgatcctatgaagttggccgaggttgtgcgtgatctgcaacgtcggacggcggcggacacgatgacgttttctgcgcgtcagttgtatttgcgtgcgctggaacgcatggcccaggaatttgctgttttgcataaaattgacctggatgctgcgtctgaaaaaatagaagatattttaggggtgcccaaggaaatcgacttgaacgccgccggtgttgatgacgatgacgacatggacgaagaagatacggaataaaaaacggggcatcgccccgttctttatttagagagcatccgtctctgctgcgccctctgctctctaaaatagacgacaccccggtctgcgcaccacccctctggtcagaggggaactgagtccgcgacgaggctttacattgtgaaatcttcgcccagatagactttcttgaccatttcgtctcgtataatctcgtcggtggtgccgtgctttaaaatcataccatcatgcagaacgtaactgtgatcggtaattcctaatgtttcgcgcacattatggtcggtgataattacgcccagaccacgattctttaattgagacaccaggctgcggatttcgttcacggcgattgggtcaatcccagcaaacggttcgtccagcaatataaactttgggtcgtttgccaatgcgcgcgcgatttcaacacgacggcgttcgccacccgacagggcggttgcagggctgtgccgcagagatgaaattgaaaattcatccagcaacgcgtccagtttcatcttgcgtttcttgcggctgggttctacgacctctagtattgccataatgttttgttctactgtcagaccgcggaaaacactgttttcttggggcagatatccaatatgcagccgtgcccgctggtaaaatggcaggtgtgttatatcctgggaattcaggaaaatctgacccccagtggccgctaattggcctgtgatacaataaaatgccgtcgtcttgcctgcgccgtttggccccaacaggccgaccgattcgccctgacgtgcgaccatggaaatgtcgcgaatgaccatgcgtttgccatatgattttgacaagtgttcaatgcgtaatacggattgtttcataattttaccaccaattcgtcagttagtattttgtcgccgttactggaatcaatgcggacgttcccactgagtgtcacagtttgcgcacggcggtcatatcgaccacgatttgcacgaatattgtcggttatacgttcaccgctggtgcgacgaacaatcgtccccgatacagattctagaaatataatgtcaggcttgccatactcctggcgaccggacgcggcacgtaacttgaacggctcgccgtttgtatcggtgccagcaaatgatgcgccagacatcttgaattgattgctgacaatgtcagtcatattcaccgcggtaattggcgtccatagtaattgtttggtaaacaaagaaccagcgaccaacgccgccaccattaccagtccccagccggtaaagaaaaactgccacaggcgttttaagcgtctgtgtttagtaaatataataaaattgcgtttgtcgccttgcacgtgattcagtttagcgcgtcagatgacaaaaagcaatttttatatttattcaattgtttttttatgttataatgttcgccaagagagatgataaaaaaattgctaacctttttatgtatggcgttgtttgcagtcacatctgatgctgtggcggcggtcacggttaaaaaggctgcgccggttgcaccccagacgtctgtcacatccacagataccgctagtttggttggaacggtattggggctggtcaacagtgtgcagcagttaaatgccaagcaaaaggcactgaccgcggaatgcgttccgtcatccaaggaaattacgttcgtcaataatatgatgaaagagtgggcgaaagttggcgaaatgaccgcggacgaggctcagacccgtctgaatcagcgtcgttgtactattgcacggggcggttatgcccaagcagtgcgcattgctgcgggaaccgacgcgacggaaatctgctatgattattttgcgggtgacggcaacgatggtatggtgtgggcaaatttcccaatggccagtaccgctacgtactgcacagatggttcgctgtcgtgcaaaaatccggcaaatgtttccaatatatatgaaatattcaatctgattgatttttctgaaacagactatacagacggggataatcggacaatagcagcaaatctgatatcaaaaattgaaaactgcagttatgcgaaactgagtgcaaaaaaacgtgcactgtggggtaatttcttgactagcactgtcagcaatatgggccagagcacaaatactggcgcaatcatggattcggtggggcagatgaccagtggtggtggtggactaggtggcctggggtcattgggggcaatagtacaacaaattacaaataaatagtgcggtttatatcgcacttttttgctttactcatatgacaaaaaagcgtataatacgggggattataagagaagggatttctgatgaaaaataaatcttgtgtgttgacatggattgtatcacgcgtaatctcgatggcgtctgttgtggcgttgacggcgtgcgcaggcagtaaagataatgcccaatatgcaccgattgatacgccaacggttgattacgtggaacaattagatgtgtattctgcgccgcaccaggattcatttttgaatcagttggcgatgaattaccgttcgtatgcaatttataatgcacgaaccagtgggtattctgaaatgggtgaattattcgcacaaaaggcggttgctgcattcagcggcgaggtgccgttcccagaatccttggaaaattggccggttgacaacgaacaggattcatttgaattatatacagcttataatgatttgatggaccaattgaaaaacgatgccagtgaagccaacccgcaattagcggccgaggcccaggcaaaatttgactgttggttatctgcggcggccagcggtcaagacggcacggcacgtgaatgtcgtgacagatacttgaaaactatggccgcgttgcgcgactgcaaagggggcaagattgtaactaacaatcgcgtatctgcaacaacgacgacaacgaccgagacaatcgctgttcagtcgcgtcggccagttacaaatgccagtaatcgcccaacagattattatccagaaactcgcactatgcaggcgatgagtgggacggggcatgcacgtgatggcgtgattattgtcaataatgtaaatgttccgcaacatttgattaacccggtgcctgttcaaccactggtttttaaccagaatatctatggtggcgacaagacaatttcggacagtaataatatggcggttatgtcggcggaatgtgcggcaaacccagaaatgccagactgtgccgttgcaagtcagaacgaagaaatcccaatggtgggcgacgaattggtcacacgccaggaattcatcaatatgatgatggctatgcgttccgaattagcggcgataaatgcacgcttagaccagattcaggcggcatctggtgataaaaccattatcaaggtgcaacaaattccattggaaccaaaacagcatgttatggaagaagtgtttgaaatccgctttgattttgacaaggctacaatcaaaccagaataccaggatttgattaaaaaattggccaatgcaacccaggaaaacaagaatatcaaggtgtctgtggttggacacaccgacacaatgggcagcaaggattataactatgcattgggtggtcgtcgtgccgaggctgtgcaaaaaatgctgattaaatacggtatcccggccagccagattgtcgcggtatcgtccggcgaagaagatttggcagtgccaacggctgatggcgttgcaaatgcggccaatcgtcgcgtgcgtgtggtcaaggaaacgcactatgccgaacaggtcaaggccgcgccaatcgtggttgaagagtattcggcaaatgaaccgtgtggcatgtatggttgcgacaaataaaacaaattgttgacaattatacttgacaaaaaaggtttgttgttataatctgaccactgtcagagagatgttttgacaagaggcattgaatatgactgataatgtgaataagtttagtattgcgtcaaacgccgtagcaaacaaggcgaatggggcaggttacaagaagggtattgcggcggtaaatttggcggccgaatttatggcgcgtggtgtgaatttgcacaatggctcgcagagtgagaagtagtttttgtgccgtattaaacatctattttacgtcgggggtattttgcccccgatgtttatttgacaaaaaattcttgataaaaacgcgtgttttagtatcgttattgcgaaaggaatttgtgcaaaaacagttcaccacgggggaggttgaatttcgcatgtttttgtcatgtcatgtttttcggacggtatttttcggttgcgtttttgcgactgtgttttgcgttttttgtgcttgggcgttgccaaatgatgtcaatcctgatgataatggcacgacttatgcgacaaccagagtggtattgccggcgtcagttatgtcaaggatgttgtggcaaacaaggaaaatacaatgaacaaggttatcagtctgacacccagtgtgaccgatgtccaatatccatcggcattggcggtctattcgtcggtgtcagagcgtgtcagcacatcatctgcggcaaatcaatcaatggcgggtaaatataatgttacggggacgctttccgttccagatttaccattgcccagggcagaatgaggaaaaaaacaggcaccaaagtgcctgtttttatggtgaaatatcctttcgtatgaaaggttcttattaacgactagacatctaattccaacttgattttagtgttatttctttcaccaccgtaattatacaacactaaaataataagtcaattgatttgcatttatttgttatgttttgtatcatgtgatgtgcacaaaggggtgtggtcgtgaaatataaattaggcttggatttaggcagcacatcactggggtgggcggtcgtagaattaaacgatatggataatataacccgtttggttgatatgggggtgcgtatatttccagatggtcgtgatgcgcaaagtcatacaccaatcaatgttgttcgtcgcgagcatcgtcagatgcgtcgtcgcggtgatcgtgtggccttgcgtaaaaagcgcacattgcaactgattcataaatatggaatggattttgatattcattcaaatgtttcgttggaaaatccgtatgcgttgcgtgcccgtgcggtcgttgaaaagttgcaaccacatgagttgggacgcgttttatttcatttggcgttgcgtcgtggattcaagagtaatcgtaaagaaaccaggggcgaggccggtggaaagttaaaaaatgcaacggcgtctttacaggtggcaatgggtgacaaaacactggggcaatttcaatttgaatcacacagatacagattcgcagaacaatttgatggaaataaaatcaaagatggggcgttctatccgacgcgtgatatgtatctggcagaatttaatcgtatatgtacggcccagggattatcagatgaaatgcgaaaagaatttgaacatgcaatatttcatcaacgtccgttattgccacctgttattgggacgtgtatgtttgaaccgggacaactacgcgcatataaatttgaaccggtgtttcaacggttccgtgtcctgcaacagataaatcaattgcgaataattgataatggtgtcgtaacggaattatcgggtgaacagcgtcagaaattacaagatatattattacggacgtttgatggtgttaagcgcgataaatcagggcgtgtaaagattacgtttgctgcggtgcgaaaaatgctggggttggcacgtggtgtccggtttaatctggaaaccgaaaaacgcaaagaaatggacgttgacacgacagcgttcgcgttttcggaatgtggtttgtctgatttctggtatgcgtgtccagacgataaaaaatcgcaaatcttggcacgaataaacgatgatacgctgggtgatgatgatttggtcgactatttggtggaaaattgtggtctgaatccagatgtggcagctcagttgatacaacgcccgtttgaagacggggttgcgaatctatctgtctgcgccatgcaaaagatgttgccatttttggcgcagggtgatttataccatgttgcggcagacaaggctggatataatcatgctgaccggggtgttgttcagatggcacaactgccatactatggagatgttgcagcattaaagccgtcattggctccagataaaaatggtgtatatcgcacaatgaatgccactgttcatattgcattgaaccagttgcgtgcggttgtcaacgatttgattgcacgatttggcagcgtaccatatgcgataaatattgaaatggggcgcgatgttcgtgcgggggcgctggaacgagctgagatagacagtcagcaagccgctaataaacgtgaaaatgatcgtatcgcgtcggaattggtggtgatgggggttcgggtcagtcgtgaaaatattcaaaaatataaattgtgggaaaatctgggcaagaatccattagaccgtcgttgtgtttatacgggtgaaattatcagcaaagaaaaattatttagtcctgaatttgagatagaacatatactgccgttttcgcgcacactggatgattcgatggcgaataaaacaatttctgcggtggcggcaaaccgtttcaaaggaaatcgcagcccagatgaagcgttcacagactctaaatcgccgtggcattatgatgatgttgttgcgcgtgcacaaaatttaccaggggcgacaaagtggcggttcaatcgtggcgcaatgaatgcgttcttgcgtgaccaagactgtattgcgcgtgcgttgaatgatacgagattcatgacgcgtatatcggtcacgtatttacagcatgtatgtgcagataaataccgtgttactggaatgcctgggcgcatgacagcgatgttgcgcgatgcatggcatttggattggtggaaagacaaagcggacgcagaaaaatatcgtggtaatcatattcatcacgcgattgacgcgtttgttgtcgcgtgcactggggcagggatattgcagcgcttgtcgcgaaacgcgattgaaactgataaattgtttggtaaaccccagaaagaaaaacgcagacagtggtttgttgatatgaatgtgccgtttgacggttttgattattatgatttcaaaatgcggtgcgaaaatacgattatttcgtatcgtcaatcccagaaatcacccaaagattcaaaaggaacaattggttgtctgcatgaagacacggcgtataacctggaattttttgaacgcggaacatctgcggtgatgtcgcgacgcgacgcgttgccaaccacggacaaggatagaaaggcatttaccaaagatttcaacaatgtaaatccaaaaacgctgcagatgtttttgaaagacacagggactacaaatgatgagccgaatatcgcaaataaatttttagattggtgtacattgcgcgatatccgcaaagttcgtatgtataagcgtggtgttgacgtaacgacatatgttcctgtatttcgaacaaaacggcaacgtgatacatatcgtgcggcgtatttgaattggtatgttgccagtggaattgccggcggtattgccgataaaaaaatgcgtttggcccagcaagaaaaagaaaaggctttgctgcaagaatttcaaaatgcggcaaagttggcctataagtggtatgttggtggtaataatttctgtgccgatgtatttaaaatgcgtgatgacgataaaaggtatccaaaactgcgtggccggtggcaagttgaaatcttgtccaattataatgcgcaactagatgcaggttcgccattgtggcgacgcaaatatgcgacggccggacgggtaatgcggctgcgaataaatgatatggttatggcgacgttttccaaagctgacccaaaattgcccaagggattggtggaaacggttatgcaccaatgcgcaatagaaaatacggatacggtcaatgtgatatttcgtgttaaaaaaatcagcagtaatggcacgatatatttacgtccgcattttattgccaaggaagagggcgatacaaagtcatgggccgccagcgctacgtcattgcaagagcataacgcgcacaaggtgtatgtcagcccatctggaaaattgcaatgctcagaataattgtaattggcccggacgcgatgctaatgcgcgtgggctgtttgctttgtccaagtggattatatcgccaaattgtgtgtcggtgaaaaataaaatatttacgtcgcctgtccgtgggttgttgcgttttacagcgtgaacgtatttttgtgaattttcccgcgttccggtaaaacgcatatagactgaatattgcgccattgaaaatcccaggtcttgcagaaaattgcgaaaccgtgatgcctcgcgacgttcgtgttttgtatcggttggcaaatcaaacataaccatcatccacatatattttaatccatcagtttttaatgacattttcaaagtccaatttgtttttcttttctttcagtgaatttacaaaattccaaacatcgcgttgcataatggtggccaatggtgatgtgccaccaccccgggttggaatattggtctccagggtgcccgacaacatgcgtttgtcgtctggggtcaattcgcgtgacggattatcggtgccatcaaatatgtcgtatacaatggcgtcaattactggacgatacacctccatcaaatcgtccaccaggcacattgggtttagttgattgtggtgttctatgccgtatgatgggttcagaccactggcaacgaccaggcgtgccattgcgccccgtaaaatagcataaccgtaattcagaaacgcattgattcctttggcattatgattgcgtaaaaaatatgggccaaacagactggtgaaatacattctagcggcaataccttccatattattgctgtcgccagataataccgcagatgggatatgtttgatacgattgtctatgccatatttatccaaaacgcgggactggttgcgaattttttcttggacgatgcgtcgccacaactgcttttctagtgggcgcgatgtatttatttgcatttgctgcacggccatttggcgattttgaccaaccagtggcgtcattataccgattggattatagttatcaccgattattatcaatggtattccgttttcacacatggcagacattaaagcctgggtaaaaacaattgcgcgtccagtggccataacggcgcatatgctgtctaatggaacttctccgatagttgttccgtgttctgtgacgcacaagaatccccgtcgaaccgacagttcgcgattgtcgctggaaatttctattatattggtttgcatactgctcatataggactgtttttagttttgtcaatacgtattttcggaaaaaagacgcaaaaaataacgataacgaatcgtttcatgcgaaaaataaggtattttttattttgaaataaattataaaaagccccgaatctcggggcttttgttgatatgtattatatcagattggaattagatgtctagccgcaacgcgatggcatcaaaaggcgattaaataggcaattatatcagattggaattagatgtctagccgcaacgtataacaacaaatatgtcaaccagaccaaattatatcagattggaattagatgtctagccgcaactgcaaatgccgttgaacaatccggtgttttattatatcagattggaattagatgtctagccgcaacaaacatacccctctatctcagagaatatgattatatcagattggaattagatgtctagccgcaactgtttgtgcggctgtgtatgtcagaaccgcattatatcagattggaattagatgtctagccgcaaccgaacggttcggcgttgacctggtaagggattatatcagattggaattagatgtctagccgcaactgattctggtaaaaacattattgccccctttattatatcagattggaattagatgtctagccgcaacaattaaataaaatcaataacttaaataataagatttatcgtgttttttgctttccctttagcattttattatataattcgtcaaatatgacaggaatgttctttgcaaataattctaatgtcggttgcataatttcttttacacatggacgagaattacctaaagcgcgtaattcaaatatatgataccattcccgtagattagctgtcatattcatctcagctgcagtcgattgtggaagtaatagacttaattcatctggtgttgcacctaacgtagccatttgtaaataatgttcttcagcttgttgacaagcatttaaccagacttgatatttcaatgtatctttaggaatttcaattggatctaagaatttaatattattatcaaacttatcctttgaataattacaccaacgtgtgctttcaattgcaaaactagaatgccgcatacgagtcaaatctttatatgctgcaatattagttaaataattcatcgaaacagaatagttttcaatcatggacgtatgcccagatttcattaaatttgctacaatcttctttgctgattctaaatcatctgaatccttatatgatttataacaggttctagcaattcgttgaattaataataacgcttctttaccatcaattttagttaatggatttacttgtgctttaacgattttcatttttactcctttataaacaaataaaatcaatggaaaatattataattatatcagattggaattagatgtccagccgcaaccggttattggcaccgcccttaaagaatgtctggatgggcgtagaggcatattcataattaagatattttgctagcgatctggcacaggtggattttccaaccccatccatacccttaatatcaatgatcatttctggtccttaattgcaagttttaatatgtttcttgctaccagcaaatagcataccatcgcttattgtcaagcaaaaattgtcaaaaatatatattttgtccagttgtcttctttgtaattactttattccacttttaccgtataccaatttgaagttcctgcggttctttttacgaatagaaacgtgtggcttgtctgagtctatgacaaaaacaatcctcccaatccaaattctgaaatatcttgcatgtacttttttgaatttaactggttcatgggttcgtatttctgttccgtctgtgtgttcatattcagtactgcgtccaaacccatatttgttgttatcaaagtccaagccatactctgtgaaaatctttttaacttttggcatgattgtcctccttttctctattaaattctgccacgaatgctctaggttcgcaataattattctttgaatttactagtttagcatttcttcttcaatatctaacgtgattgaggtgcttttattgtctaccttgttgataagacaatctctttcatgattatagcaagtaattggactgcctctgatacaaatgatgtgctattaaaatttatcatggttgtccttcgattcctgaattctgacatgaccaaattaccagatgaaaaacgcttggcattcaaccaatgcaaatatagtgatgaactgctgaaatcaatgattgaaaaaatcgtgtacaacaatcataaaataagtacttttataaaaatcaaaaatatcgaatatctgcaaaatttccaaaagcaagactatatgaatccgacatgcgagccaatggactactacgtcatcagatgggcagtatgcggtaattgaaacccctctatatttctcggctggtacttgtattaaccaacgaaatggcgatgtagaagttgaattactgacaatgaccggaaacactcaaatactaatcaaggcactggcctatgcgtggaaatataaaaaggagtatgaaaacggggttggtataaaggccatcgcaaaaaacgaacaacgcgatcaacgaacaatatataaatacctgaacctggcatacctgtcgccacggattatcaacgacatcatggacagcaaaatcccaccccatgtcaacctgcaaacgttattccaaatcgcaagtaaacatgagaattttggtgaacaggaacaggcattttatgaaatcaactaattaacgggtttaaattcaatcttaataggaagttccgacatcgcataatgtacaaagtccttgcccaaattggttaattcatattgtttgtttggttcaaatgctgattccatcgttgttgaagctgaacttttgccaataccagatcgttgtcttagaaattgtccatcgtatgtaacattacgatgttgtctaattattccacctgtggacaaatctcttatcaccaagcgaaacaaatctgcatctgcggaattttctctaactcgttggcgacctaatttattccagatttcaaaacgagaaatcccttctggttggttatagatggcttcaataactctaaaatgtagctctgagtatgtttttatccaatccaagaacatacgtatcacatcatagctataactccctgatacatctgcagccgtattggaaagtatatttctgatgtagatacgcttttgttcgctttcggccgccccccattcacgaaatgccttttttgataatgattgaaaatcggtgctagaaactttgtctgcaattttttcatcttgaaaatctaatcttgacatgatttcaagaattgtctgttgcttttccttcatttcatctcgtaacattgaaatccaattatataaaaaagcatttgctttttcttgttgcttatcctggtatgcaccctttatcgccgaaataattccaccagcatacggtattacaccagccaatacatcaagtcctgcctttgctattcttttacctttgctatcttgttcaatttcttctggtaaattatcagccataatcaaatcctttcttttttctaaaatatagattttttccacaatttttcaatcccattgactccacaaaattaggcattatataaattctggtatattatgggtggatttgcgtatattaggggaataccggagtcaatgcattccgcgaatgcccgcagtggggggcggagacacgaaaaaagtcgcaactgtgtgcgacctttctaattactggtcggggcgacaatgagtaggcgagggcgtgcattgcacggccaaaccgtcacgaatgccccgcagttgtggccaagccacaacgagggaaagatgagaaccaagtttaaatccgcgtcccacgaaaaaaataaaaaacgacccaaagtggtcgtttattatttttctggtcggggcgaaagggaaccggtcattttttgtaaaaccccagaaaaccaaccttttttatgttctgcttttcccaaccttgttaaaatgtcatacactttgtatcacactttcttgttgatacagttataatccatttttttgataatgtaaactggtttttatggtcgtgaacccagtttttatattttttgggtcaatcgaccactgtttcaaggatgttttatcaacggagtcataaaatttagggttttggtatcataataccataaaaatcaaaaaaaatgcaaaaaaatgacatttataaagtctaacaagcgttaaaaacgtaaaaaaaatagttctaatatatatggggtgataaattttgtcccataaccgaacctattttttattaaccccaaaagacaccaagtggggtcaaatcaaaataaaatccaaaaacaaatcaaatacctttgtcatcaaaaaaatatcggtatgattatttttgtcgttttttaacatttgtccctttttgatgtcctttggattccaattaacattttctgtaaataatgcacaaaccgaaacaacagagaggtataaaaatggatacccaatttccagcgattatattcgcaagacaaaacctattttttaaacaggataaagtggataccttgaccccacaattatttagaactacaaaatattgcttaaaaaaagatctggtaattttacagacgttttttgaaacacacccagcagattatgtattttataaaatgataaactacataaccgatttacataaaacagttgcagttgtgtttgatagtgcaaaacaattacccacgtatgattttggaagaattgttttattagattttttattcagcacaagcaccattgaaatacatttggttaaggaaaatatggttttgatggacataaaaagcgaatatgaatcaaaaatgtggtcaaaatatacaaatacacatccaaaaaaaatgcagtggttacgtaacggtattgatgtttacaaatatttggaactagataccacaaatggtttacatactaatcttggttaatttataacaggctgggtgcttgtcggggaacagttgaccatttcgggcacccacaggatactattttacccaattttattaaaagacacagttttaaccgttagtgtcttatcaaccaacggagtgattattgtggggtatctgacccccggtataggtgaaaaaacgcctttacgttacggtgcgtataaatatcagttgtcgttaatagacacctgtgtaaacgacattatcggacactatggacttcataaatagacgtattgaaaaataatgtcgtattttatcggtaatataactgggcaagccccaagtaaacaaatatacctataattaaaataaataaaaaaataacatacaaacaataataaaaataacaattaacataccccataatataacacatcacttacattatggggcacaaatataggaataaaaaaatgactaaattcaacaaaaatactttttacagcaaacagcaatattataaaatgtttcctaaacttatttcgttcctaaacgaagacaatcccacacattacttatgtattcgtttacccatttatgccgaaactgattgcagttacaaggcacttgatttattacacccaattttattaaaccttgaacgaaaattatgtgggtcacattggaatcgacatcatttacgttttcgtggtgtaacagaattggggacaaaacacgtgtgtcattttcatattcatttgacagcacccaatcataccaccgaacaaatacaaaaagtgtgtaatgatattataaaattacgtaaaatgccgtcacatgctatattagtgcaagacataaacagaacccctgaacatcttgcgggttacaataccaaagaaatatatgtagataattataataactttgaatcgttacgaatatttacatccaacgacttgttcaatataccgtataaacgccccaaaaaataaataattattatttttggacatcacgcacccatttaccgtttgaatcgtaaacgtgattatgggtgctgaatattccaccgcttgtgataacaaaatctgatgtatatgataccaacgtcccatttacacgacaatattcacgattggaactgtcgtaaagtgatacttggttgccgctttgttttgcatacattatttttttcatttgtgctacctatactctgtttctacgagaatattataatacataaaaatactgtcgcaaacgggtaatttataattttattgacttttactagggttttatgttacaatgacagtcaggtaaagggactatatcccacgttaagcatgtctatgcagccgcaaggtgttcgtgtggtgattgtccctttttttatattttgcaggttataaaaccaaaatctaacccttgtttgaatatactgtcaaatctgtcaatgggttttatatggtctaaaacagaaattgcacctaattcacgcatcatacgtaataataaattgtgcattttatgacagggcatttgtcttttatggcaaatcaacaaagaaccattatgtgaaaaccgattacgataccgacgtatttggtctatttcaaaacaaaccttttccaaacgaataaatgcctgacgtttagaaaatatctctgacaatatattcgggtatttgttccaaattgtatcattatatgtggacataaataaccgagaccaaaaggcaaaggttaaactgtctatcaattcattacggtctgtaataagtttttcgtcaatcaacttttcgtcttgtttaacaaaatcaaaaatccaattttcacccatgtatttggaaaaaacaaaatctatcttgttacgtaaggcaacttcaaattgactcaacaatgggtaaaaactttcacaaagttccacattgaaaaagtattctttgattgtttccggtttatttgtatcaccatactttgataaacgtttttcagataaaaagtcaataatttcacacatttgccataccgttgttaccgacaatattatgacaaaatacctataatttcaagataaaaccgaagattatttaataaaaaaaagggacgactgaaaatttacacatcgtcccattatatatactattataatgccaaaataccacggtgtaaacgggtaaaatgattatttagctacaccaaaagccccgttaaattctacattattattttgaaatcctacaccaccaacagcttcagatgctacattattgtcgccatagtatataatattggtctctaaattatttactggtttttctgaatccaacgcataagtattttcaccagtcaaacttgtatctcccgtccatgatacactgtaatttccatccacgggtttattaacggtaacggtataccagttattaaacggcatagtcaatgtagtatttcctgacgcatcaatttgcaactgtgtggctgtatcacccgtttctatttttgtagacccattttcgtgtactggaccaagtgcagcaatggctttacctgtaaaggttgcaccagctaagttttctggatttttaatttcttttatttcataaccaccataaactatattattatcatcaccaacaccgtcaccgtcttcatgaatttctttggctaatattgttgtataaccaaaatcagcgtatcttaatttacgagctaatcctttgccttgcaaatcaacaacattacgatgcacgtattctgttggttccatattttctgtgacagaacttataatatcgttcattgtattttcaggaacttcatcttcccaggcatctctgaatgcattttttatttcgtcaacagtatattgtttcggtgccaaagagtctgtataatatgtattagcacccaccgttacattatatttgtatacattgttacgaaaaacactgctgtcgtcatttgcggaatcttcacgaacagccatttcttctagtttgtcgccattatacatacgtatttcttttattcgcccattttcttcatctataccaaaagatacatattcatcaccaggttctgtatcgtaataaaattttgcatcatctaaatgataagaaatgtattctttaccgccatttgttaccgttccagaacgtacgatacttggtgaagtaccgtcttttgccactaaaatttccgatgccatagatgttacatgtgaattacttgttattgccgtttctgatgcacgcataccagaatctgggataataccaggctttcctccgccacttccgccaccacaagcagccaaagccaaaacagacgttaaaattaaacattttttcataaataactcccttggttataaaaagttgaccaccaagggaaatggtggtcggggagttctcaaatcatttgttcattgattctgcggtttttcggtttcccgtattttataaccaacagctccccgacataacatcagggatgacaacggtgcaaaaacaccgaaacatcaaattacgatgctttcgcaccggaacaaacgggcttgagaaatgcccgaacccaatctcttggattcaaggtaattataaaatatcagacacgaaatgtaaatactgatttaagaaaaaattctgaataatcaaaattaaattatattctgcgctggtttgttaggaaaaaatcgtaaattcttcgtttcggatccatatagaaccatacagaaaccattaaaatttgacacagga

SEQ ID NO: 806 - DNA, 23327 bp, synthetic construct
  source 1..23327: mol_type = other DNA
  misc_feature 1..23327: note = Synthetic
ttacaccccgtcttttgtggaagaaatcgccatcaatcacgccggccaggtgtggatgcgtctgcatggcgcgcgcgtgccgtgggtgtcgtatgcggcgccaaatttatccaaacaatatttggtcgatttgattcacacggtcgccaatatctatgaacggccgtttaatccgacccacggtgtgccggtggtatatgccacattacccggcaatcaccggttcagtgccattgccggccccaatgttcaatatgatgaacgcgatgtcacgggcggcgttgcattaaatattcgcggcgggtcggcgtttgataccagttttgaaaattatcatttgaaacgcggggcggaattgttgcgggtaaagccgcgcgaacgcgtgcgccccgatgacccgtacgaacgattaatggccgccattaatgatggcagtcccatcttaatcagtggggcgaccgccacgggaaaaaccacgtttttgaatcatatgctgacgctgattaatcagggcagccgtgtgattaccgtcgaagatgcgcgtgaaatccgcgtgccccaggaaaaccgggtgcatttcgtattatcgcgtacggaacaaaacaatgattttaattatgcgcgcctgttggatttggtggtgcgtatgacgccggacgttattatcggcggggaaatttcgacggataatgcgtcggtgttgtgggaaatgttggggacggggcatgaccatttttatacgaccattcacgcggaaagcgcggatgcggcgtatgcggcctttgccgaccgaattttgcatacccagcccgcatataaccgcagtgaattaatcgcagaaatgcgccagaaaatccgtgtcgtgcaattgtcgcgcgacggggcactgcgcgccgttaccgaagttgtgtagtttaatcagaaaataaaaaaacaaaaggagacccataatgtacgaagacgaaattgttgtatatccggatatgagcaaatccgaagaagaaatccaggcccaaatcgaagccaaccgccaggcgaaactgcgtcacgcggcgcgccgcgaacaggaacgctttgaccggcccagcctgttttcccgggccaaggcaaagttaaaggcgttgttggcgcacaaacaggccacccaggttcaaaaccattccgaaaaacagcgttaaaaaaatcccccgttcgggggattttttattttgcaaatgaataatccattttcaaatggtcgggattgtatgtcccgttcatgatggcgacggtatcttcgaccagaaccaattcttcgttggtcggaatcataaagattttaaccgcgctgtcgggggcgctgatttccatttcgccagcgcccatgaacgccattgcggcgcgattcttttccgcgtccagtttgatgcccatgtgggacagacccgcgcaaatcttttcacgaacgatatagttgttttcgccaacgcccgcggtgaatacaattgcgtcaacgggttcttcgatggcggcgatgtacgaaccgatgaatttttttgcgcgggccgcttccatttccatggccagacggcatttgtcgttgtcgccaaaatgttccataacgtcgcggcggtcggcatagcattctgtgatgcccaggatgccggattgtttattcaatgcttccatcgttaatttgtcggacaggcccagtttttctttgacatagaacggaatcgacgggtccaaatcgccacagcgtgtccccataaccagccccgccagcggtgtcatccccagcgatgtgtcaatgctgttgccgtgtttaatcgcgcatgcagatgcaccggaccccatgtgcatcgaaatgatgttgcattgggatgccggtttgcccagcaatgccgccgcgcgtttggacacatacagatgcgatgtcccgtggaatccgtatttacggacgcccaattcgcgataccatgcgcccggcaccgcatatcgataattgtaatccggtaacgtctggtgaaacgccgtgtcgaaaacggcaacctgggtcgcgttgggcaatacttctttggccgcgacaataccaatcaggttcgccggattatgcagtggcgccaaatcggtcagttcgttaatggtttttatcacttcgtcggtggcggccacgctgcacgcgaatttatcaccgccgtgaacgacgcggtgaccgaccccgccgatttccgacaacgcaattccattttccgtcagcaattcgataaccgccgtcaatgccgcggcatggttttccattttgatgtctttcttgccgcgattggtgtcggatttaaatgtgatgttggacccatcttcgccgattttttcggcattacccttgaacacgggttgataagtctgggtgtcaaaaacctgaaattttaatgtggacgaaccgcaattcagcgccagtatgtacataagcttccccttggtattaaatttccaagttcaggctagcaaatgtttcccggactttcaataccaaatgataaattttatgttccagcggtcgttggtaatgggcacctggaccccggtggttttgtggctgacccagaagttttcagacccaatcgccaatcgaatgtgtgcccccagcgtatcgtaaaagacgttcggcaacgggttcgtccggtcgccgattccaaatgccgtcacgacgtcgccgatgctgtaatcagcctctggcgtttggcagaccaatgcgacataggcgaatttgaccgtcgccccaccgttccacagatattccatgtggcccatgttgacgacgcgtgcggtgcggctttcgtggatttggatgggggcgggggcgaatttggatatgatggtttgccagaattcgtcggggacggaattaatgtcaaagcccgcgccgtcgcccggggcgccggtggcctggtcggcgcgcgccagggtaaatccccccagtgtttctccgtcgtgcacgcgcagtgttttggcgtctgtgtcaaacgaaacttcgcccggcagccccgtaaagttatcgttttgtgcggttgtaccacgccgaatttgcagaattcgtgccatttgtaatcctttggttaaatggtggaaataaaaaacaccgcgcatggcggtgtcaaagtttgtaaaattattataccaaattttgccgaaaaaatcaagcggcatattgatgattctggtaccaatcttgtaattttgggccgatgttggcactgaatttttgctgggcccgttttttactgatggaccagctgcgcgttttgtgccccgtttccagaaaatcccaatgtgccatcaattcattgtattcatcccgatgcgccgcgtcccagccgtttaattcatcattacgctgttgcacgcgttcgcccaggaaattgacattatcttgggcatcgtggaattgcgcgatgtggtctatttggtcgtccaccgatgtttgcagggcgtcgcgattttgctgttcctgggccagggtggcgcggtcttggcgcaattgttgccacagacggacgcgttggatacgcaattgacgatattgttgttcaacctgggcccgttgggggtggttgacgtttgccgggtcgcgcagccacgcccggaactggggcagggtgttttgttccaaatccgtttttttctgggtggcatcgtccatctgggtttgcagattgtcgatggtgttttgatatgtggccagcgtttgttggtcattatttaattgctgttcgtgggcgccgatggtcgtggcattgatgccatattgttggtcaatggtatccatacgctgttgttcggcgttacgctgggccaccgcatcgtcgcgggcacgtattgccgcgtttttatcggcatcgttttgcgcgcgccaggcatcctgggccccgcggatgcggccacgtttgccgttaaatttggccccccgggcatggattttgttgcccgcaatggtgatggcatacccgacacccatgaacgcggttttcagacttttgtcaaatgcggtggttacgaatttgatgccttcggttttattccaagacaacgacgggtcggaaaagatggatagattttccttggccaatgcgtccatggttttgctggtggtccagccgtatcggataacggacaggatttccatggcgattttcgcctgttcttttttgccatcgcgcacggcggtcataaccatttcttcgaccagtgcgcggcgctgtgacccatgggacagcgctttttcgaacgccttgggcatggtggattgcaaatccttcatcgttttgacaaagtactgaaatgcttcgactgccttgggcgatttgtattgcagctttttttcaatatcccccgccttgtccaggacgccttttaacccgtcggtcggcttgattttcgcaccgtgaatggcgccgacgatggtttgggcttcgggtttgatgaacatctggtcgccgcgcagttttacaaacttttccagaacgtcggcgtatgtgtccccccaccaattggatatttgctgccccagggttaattcatccgtgcgcttgggcgggacgtaatccttgctgtccttgttggtgtaatcggttttttcaatggccttggccaattgcttggatattttgccgttatcgtattgcttgaatacgtcgtacgcctttttgttcgtgtacaacgtgcgcaataaaatgtcatagttcccctttaaataatcgcggcgcggggcgctgacgctgttatcttggaaaccgttttcgatgtcggaaaaattctggaccccgatttcggcctgtaacgcggggtcgttggtgccgttggtatagtatgtcaggtaacgcgcaacctgggttaatttttcctggaatgcggggtcggtcttgtacttgccccccgtcaggccatcaaccaatttttgatacgtgaaatccgaatccaccagattccactgttgtaatttcatggccagtgtgcgttcatgcgcctgcaacagacgtatcagcgcgggaatctgggcctgggccgcggggctgggctgggcattggtgaacagtttgcctgggccgaaccaatcgtccagaaattctgtggcctttttatcttccttgaactttgaccggttggcgttcatcgcctggaacgcatcgcgcagggcgttgaacaatttgtcccattcggcgtccgtcatcccgttcgccgccgggtcgggtaatgcgttgttgacccatttgccactggggtcgcggtgcatcaggtctgatttccagcttttcatatttccgcggaaatcatcacccttggcatacacgttgaactgggcccgaatttcggccggcatgctgttgaaatgcagctgtctgtaatattttaaaagaaaatcgttcatcgcgtaattccgtcccattaattatagtgcaattgatgccaaaaatcaatatttacacgtcggcgcaaaatggttataatgcccccattaaaataccaggataaccgacatggaaaataaacattctttaaagcgatttctgcgcaatatatacgggtatggtttttttaataagatgactttgttgacgccggtctatgcgttgtttatgcaggcaaacggtgtcacagacgcacaattgtccggtttgatgatgctgtatccgattgcgattttgctgacccagatgccggtcacgaaaatcacaaaccgtatcggacgcaaatacgccgtggttatcggccaaatgttaaaagcgttggcctttgtcatttggtgcgtggtgccgacgttgcccggatttgcggtcgggatgtttctgtgggggatgcagttcgcgttttcggaaatcgcgatggatgcactgatttacgatgaattggatgcccgccatggacgcggggcatatacgcgggttctggggcgttatttcgtggccaaagcgtccggcgtcgccgtgtcggcattcgggtcgctggccatggtgtgggggtatggctgggttacggtcgcgtccgtggtggcgctggggctgtcggtgttgtgcgtgctgaacattcgtcagatggcgccggtggttgttatcccgaaaaaggttcggttcaccagcctgatgcgtgttggatgccatctgtgcatgaccgtgccgtgtattttgaatttaatgctgttgtcgctgatggtggcgaactttgcgtatttggacgattatctggggccgattggggtggccatcggtttgccgatgaactatgtcggaattatgccgtttttattactggggtgcagtgttctgggccaaagaatcgcgtacaagtttgcccgcatatccaattacaccatttatggcgcgatttgcgcggtgggtgcgctgttcgggatgttttgcatggtgtattcggttgccgcaattgcgttgctgtgcgcagcgtatttcttggtcggggtgctgaacacgttgctgtattccaaattccaagatgccatcccaacgcacgcccgttcggtgttgttgtcgttttacagtattgggtcaaatgcggcctatgtcatggtgtgtggcgttatcggattggggtcgggtctgggcagttggcgctggggcgtggcgatgctgggggcggttttggtgtggaccggtgtttggggcgcactgtttgtgcgtaaccagtgcgcggtccccaacgccgatgtgcgggccgcaaataccgcaccccaagtcggcaccaacagcgtcgcgtgatgctgtgatatgcttcctgtggcgggggcgttggcgcgggtgtagagtgtaatctatgaaactgcgcgatattttattgaaaatgattccatattcgttgtcggtggcgggtggcttgttgctgtttgtgctgaccaaggataacatcagcaacgaaaatgtcgcggatttgataaataatattgctgcgtccctgttggcgattcccctggtgtttttgttgtatgattattccaattcgcgtgtgtctaaacggctgagtcaaacaatggcgcaaaatctgggcgatacgataaatctgttggttatgaacctgatattggtgatgaggcgcatatccgatgtgcgtggcccggtaacactggaatcggttaataaaatgagtgactggcgcccgtcctatatcgcgcggcggttaaagattacatcgcgggacctggatgaactgcgcaagtatcgggatgaattaaacgatttgatttacaaatatgcgcgtgcgaacattttgaccacaaatcaaatccaagatttgtcggccatggcgcgcgatttatcgcatctgataaacgaacacggattttacgcgaacaaacagatatcgtcaaaatatgtggcggggattgtcacgcggataacggattggttggatacggacgcggaaatgtcactgcattttcaggaaatggtaaagcagggtttgatttcggtaaaaaataaatagcaaaatttgtataatttttcttgcattttatgaaaatatgtgtcaaaattggccccgaaccacggaaacagaacccagtgttctgaatttccggttccgttttggggacatagctcagttggtagagcaaatgacttttaatcattgggtccagggttcgagtccctgtgtccccaccagaaattaaccgccacatggcggttttttcttttacaaaacaaccgccacgatatcgggcggttgggggttatttccatgcggcgggcattgtgtcgtaatcggacagtcccgtcgcattttggtaacagcccgtactggcgttggcggtcccatcgggccacaattcatacaggtatttgccgttgatgcgcgccgatgggccggtcagaccggttgaatccttgaacgattggtaaaacatccattcggccgccggccccgacaggtcgccaaacatgttttccgggatttgcccggttatgcctgcgcagctgcccagtacgccataatacatatattcagccggcgcgccgcggatgtcgccaaacaatttggccggcagcgggcccgttaaattttgacaatgcataaatgtgccgctgtacatatattcggccggggcgccctttatcccgctgaataattcgggcgggatggggccggacagttcgctgctgttaaatgtgttgtttaacatcgcccatgccggcgcgccctggatatcggcaaataattcgggtgggatggaaccggaaaacgggctgttttgaaacgcgccggcaaacatacgttcggccggtgcgccatgtacgcccacgaacaattcgcccgggatgggggtggtcaaattcttgcattcccggaacaggttgtgaaatatcggttgctgggattggttggcgccgttgccaatcgtgccgaatatggcgcccagcgaaccctgaatcccggccagattgttgtttttccaaaaacggattgccgcggttggttcggtgcgcgggtcggcggtgctgtacccggtggcgcggcccgacatgccgattttgtattcgcccgcccgggcataggtatgtgaatatgtctgaaatttcgtatcggttcgtgtgattgtttgggttgtgccgtcgccccaagtgatgaaaaattttccctgggccgataattcaaagctgaacacggtggtgtccgccgttgtcgtcatgataaagggctgctgtatcaatcgatcaattgcatcatttgtcgccacggtgtccgccgccgccaacgtggcaaagttcggattgtcgccgtggtttgtgacatctttgtcattaatgatttcgtttgcgcggtccaccgccgtcaacaggtatttcatattcgccgcaacccgcggattggtcagcgacgggttatacggcaccgtaattccccaccggttttgaatagtattgtggatatattcgacattaaccatttcggcggcatgggatgcggatgcaaacaacaggccaaaaaagaatatcagacgcgttatcattatggcagcgggggtgtgggaacaatgggtgatgatgtaaatgttttggtgccggcaacttcctggttggtggatgtggtgaccaatcgctggggcagggcatctgaaaaagtgtttaattcatccttgctgacgacgcgggactggctgtctgcaatctgggcattgacgtaactggttgatgcaacgcgcgaatccgctgggtccgccaacacgggccgcagcaatccagagcataaaaccgcaaaaaatatcagtaatggcgtgcttttcacgaccaaaatcccccccttactcgtcactgataagaattgccaatatgtgttttcatggcatattataccacgatggggccccggaatcaaatttacatgtaaaataaattgcgcatttttttcggggcgatggatatgtcgccccggatatgttatttcgaaatgcaattttgctggtcacacatgcgggccatgcggaaaaattcgtcttcggaaacgcccgcggtttcaattatcttggctattgtttggctggatggccaacgcggctgaccatatgtcgtgcagcgtttgcttttgttaaacgcagttgcatccatgccgcatcgccgggccagggcggatggcgtcaatcccataatttctgcaactttatccacggcggcccaaatgccggtatgagtcatgtttccctcctgtggtttctcatattgggaataaaatctagaaacgcagtgaataatatcacagcccccaccaaccggtgtagaagtaagaattcctaggaaaaaatggtctgaaataaaaacagacaccgaagtgcctgtttgtaaatggtgaactcctttccaaagaaaggttcttattaacacaaagacaccgaattccaatctgatactgggtgttaataatactcacctgattatgattatagcgtttcatgccgtgatgtcaaatgatttgattttatccccaggttgtaataatgtggtattagcaaccgggggtacatatgaaatataaattgggtttggatttgggcagcacttctttggggtgggccgcggtaaaattaaatgatgcaggtgcggtggaacaactgttggatttcggggtacgtattttccccgacggccgtgatgccaaaacacatgcgccaattaatgtggtgcggcgtgcggcgcgtaccatgcggcgtcgtggtgaccgtgtaaaactgcggaaaaagcgtgtgttgcagttaattcgaaaatacggtttggattttgatattcgttccaaccccattttggaaaatccgtatgaattgcgtgtccgggcactggaacatcgtttaagtccgtctgaactggggcgtgtgttgtttcatctggccctgcgccgtgggttcaaaagtaatcgcaaagaaaccaagggtgaaaacggcggtaagttaaaggcggccacagatgccttggcatcggcggtcggggacggtacgttggcccagttccaggttcagaccaaaaagttccgcttttccaatcagtttgacggaaatgttatcaaagacggggcactgtatcccacacgggatatgtatttggatgaattccatcgtatttgtgatgcccagggattggataaggaaatgcgggccgcatttgaaaacgctattttctttcagcggcccctgattcccccggtggttggtacatgtatttttgccgccgggcagccgcgtgcgcacaaatttgaacccgtgttccagcggtggcgtgcgttgcaacagttaaaccagttggcgattttggataatggacaaaacgtagccttgacggatcaacagcggcaatgtctggtggatattttgctgtataattttaacggggtaaagcgcgacaggggcggccgtgtaaaaattacgttcgcggaaataaaaaagcagctggggctgtcccgtacagtgaagtttaacctggaatcagaacagcgcaaggaattgaatgttgattcaactggtttcagttttgccgaaattggcgaactggatttttggcgttctttgaccgatgaacaacaatccgatgtattgaataaaatcaatgacgaccagacagaagatgccgaattgattgaatatttggtggcacattacggattgtctgcatcacgcgcgcgggcaataattgatatccccctggaagatgatgttgccaatgtgtccgtggtggcgatgaaaaaaatgctgccgtttttagaaggggggcaattatatcatctggcggtacattcggcggggtatcattatggcgaacaagatgtgccattaatggataaattaccgtactatggtgatttagatgtgttaaagccgtcattaatgcccgcgcgtgacggtgcataccggaccatgaatgcaacggttcacattgccatgaatcaaattcgggtggttgtaaacgatttgattgaacgttatggtcggccatgcgccattaacatagaattgggccgtgatgtgcgtgcgggtgccaaagaacgcgccgaattggacaaacagcaatctgccaacaaacgcaagaatgacgctattcgggcggaactggccgaaatcggcatattaaacccatcccgcgaagattttcaaaaatataagttatgggaaaatttggcgccccagccccagaaccgccggtgtgtctataccggcgaaccgattaccagtctggccgcgctgttcaaaagtgggcggtttgaaattgaacatatcttgccatttgcccagacattggatgattctttggcaaacaagaccatatctgccgttgccgctaaccggttcaaagggaaccgcagcccggccgaagcatttgacgatccggcatccccatgggcgtatgcagatgtttgggcgcgtgcccaaaatctgcccgatggcagtcgttggcgctttgaccgggatgccatggaaaaattcacacggcacggtgattgtattgcacgcgcattaaatgatacccgttttatgtctgtgatggcggttaactatttaaaacatatctgttcggataaaaacaaagtccgtggattgccggggcgtttgactgcgatttttcgtgatatgtggcacttggattggtggaaaaaccacgatgatgcggacacatatcgcgccagtcatatccatcatgccattgatgcgtttgtgattgcgtgtatgggggcggggaatttacaaaaactggccgaaaatgccacgcatctggaagattttcatggaaaaacactgaaagaaaaacatcgtcaattgtttgcggacatgtatctgccgttcccggaatttgattactatgattttcggatgcggtgcgaagcatgtgttatatcctatcgcccatctgtaaaagaaccggccgcatcggatactgttggatgtctgcacgaagatacggcgtataagttggaaaaattcgaaaccggaacgcgggcaacgatgtcacgccggattgccttgccaaccacggcggatgcgcgtgccaaatttaagaaggattttgattcgctgaaccccaaaacattggaaatgtttttggccgaaaccggggtggcaaacgatgcaaatgacatcgcagaccagttcttgaattggtgccagatgcgcggaattaaaaaagtgcgtatgtttaagacccgggtggatacgacgacttatgttccggtgtttcgcaatcgcggggataaaaatgcgtttaaccgtgcgtggaccgaatggtatgcggccgcgggtatcgcgcgggggatgacagaaccaaaggctaaaaaagcccagcaggaaaaggaaaggcgtttattggcgctgtatcaaaatgccgccgcccgtgcatacaagtggtttgtcagtggaaataatttttgtgcggatatattcgaaattcgttctgatgaccgacgctatcccgcattggccggccagtggcaatctgaaattatatccaattactgtgccacattgaataatggcacgcccatgtggcgttgcaaatatgcaacggcccggcgggtgatgcggctcagaatcaatgatatggtcatggcggaattttcgcgggataatgtgcctttgctcaaagggttggaagacgcggtgcgtcatcaattggccgtgcaagacacagatacagtaaatattattttcagggtaaagaaaatcagcagcaatggtgcaatatttttgcgaccgcattatattgccaaagaagatgctgatacaaaaacatggaaagccaatgcgacatctttgcaaaagtacaaggcccgaaaaatacgcgtcagcccaacaggaaaagttctagaataattgtaactgattgggccgctgtgccaggatggttggggcgtcggttttatccagatggattatgtcgccaaactgggtgtctgtaaaaaacaggatgttgacatcgccggtgcacggattattccgtttgacggcgcggatgtatttttgtgaattttcgcgtgttccggtaaagcgcaggtacaccgaatattgggccatggaaaatcccaaatcttgcagacaattgcgaaaacgcgacgctgcgtgacgttgttgcttggtttcggtgggcaaatcgaacataaccatcatccacatatatcttaatccatcagttctgtatgacattttcaaaatccagattattctttttttcggccatcgaatttacgaaattccaaatgtcgcgttgcatgatatttatcaatggtgaaacccccgtgcgcgttttaatatccatatccaaaatggcggccaattcccgcttgtcatctggggtaacagcttttgtggggttgtcaatgccgtcaaataaattgtgtacaatcgtgtcaacaatcggtcggtatggctccatcagatcatcaaccaaacacatcgggtttaactgattgtggtgttgaattccataagatggattcaatccagatgcgatgaccaatcgggcaacggccccacgcagaattgcgtatccataattcaggaaactgtttattccgggctgtgtatgaatgcgcaggaaattcgacccaaacagggattgaaaatacagacgcgcagcaacaccttcgatattgcttgtgtcaccggattgaaccatggctggcatatgttttatatgattgggtttgcccagcatgtccaaaacgcgcgattgattgcggattttctcttggacaatgcgtttccataattgtttggccagtggacgggacgtgtttatctgggattgctggactgccatttggcgaccttggccaatcagcggggtcataattccaatgggatgataattgttgccgatgataatcagtggaatgccgtattcgcacaacccggccattaaattttgtgtataaatgaccgcacggcccgtggtcatcacggcgcaaatactgtccagtggaacttcgcccactaactcgccgtgtcctttgatacacagaaatccacgtcgaatggacagttcgcgattatcttgtgaaatttcaataatatttgtttgcatatattttatataatacaaaaatattgtttgtcaattgcaggtaacgcagaaacggatcaaaaaaatgaagttaccgaatcagtttatgaatcaatgtcagtgattttttatttctgtatatatcaaaaaaatcccgaaaatccgggattttttctatgatgtattatatcagattggaattcggtgtctaggtgcaacacgttatcgttctcattccacctggggtttattatatcagattggaattcggtgtctaggtgcaacctgttgcactaaaaatcaaccagttcaatcattatatcagattggaattcggtgtctaggtgcaactgccataaagggcatacaaatgtcgaagagattatatcagattggaattcggtgtctaggtgcaacggcgataatgaagaacacgactacagctggtattatatcagattggaattcggtgtctaggtgcaactgtaagatacctgcttctacttcaatatcaattatatcagattggaattcggtgtctaggtgcaacttgcacgtttcaataccaatcgtcttgcttattatatcagattggaattcggtgtctaggtgcaactccgtagaagggtctctgattttgaatgatattatatcagattggaattcggtgtctaggtgcaactcattttataaagtttccaccataatttacaaattatatcagattggaattcggtgtctaggtgcaacgaagatggatttcagcattgcgcgccgggaattatatcagattggaattcgatgtctaggtgcaaccccattgccacaaacgttccagccaatgccattatatcaaattgtaatttcatatccaggggcgtttttgttaaatggtgtgtttggggatgggacgggcattgatatttgtttatggaatctttgcctgggatatttttgacgtgaatatttgcttgaatttttgggggtgggcggggtatggttggggtatggaaaatatctgtattgatgcccattgtcatttcaatcgtgatgcggatttggacgccattgtcatgcgcgcacgcgccgccggggttatgggcggggtgtggaatgcggttgtcgaacccgattgggcgccaattgccaatgcgtcggcggcgtgtgatggcatttggggcgcgattggaattcatccgatgtatgcgggggatgttcgtgatgggtgggacatacggctgattgatatgttggcggcccatccggatttgatggtcggggaaattggcatggacaagaattatccacaccccgatgtccaggaacgcgtatttgcccgccaaattgaaattgcgaccgaaatgcggcgggttgtgcatatccactgggttgggatgtgggaccggttgttccgtattttggatggttggcgtgataatttgccaccgcggattattctgcatgcctttggcggcagtgcccaaaccatggctgaattggaccggcggtttggggtttacttttcatttggtcccgggattttcaatccacggcgccgtcgcgcgcatgaatgtgtcgggcgcgcgcccgtaaaccgaatcttggccgaaagcgatggcgatgatttggccgcggttgtggatgttgttcgccgtattggcgaaatacgcggtcgcgatatgacatcggttatttatacaaacacccggggggcattaaacaatggatagattacacagaattcgtttgttgttgggggacgcggcggttacgcgtctgcaaaacgccaccgtgatggtggtcggatgtggggcggtcggttcgttcgcgattgaagcattggcgcgcagcggggtggggcgtctgattctggtggattttgaccgcgtcgaagaaagcaatatcaaccgccaattatttgcattaacgtcaaccgttggcgcgcccaaggtggttgtggccgccgcgcgcgtgcgtgacattaacccaggtatcggtgtggatgcccgcgccatgttttgggatgcggatacggacattgatgtgcgaccggatttcgttattgatgcgattgacacggttgcgtccaagattgcactgattaaatggtgcgtgcgccatgacacggcatttgtgtccagcatgggcgccgcgcgcaagaccgacatttcccgcattcgcgtatcccggatatccaaaacatcggtttgtccgttggcggcaaaaatccgtcggatggcgcgggatgcgacgctgccggattttccggttgtgttttccgacgaagttgccgtcgccgccacgccatcggcgcccatggggtccatgattacggtgacgggggcgtttgggctgcatctggcgaatgtggcgattgggcatataattaatagttgaaaacaaaatcccgataaattaaactggtaccagaaaccaaagggatttggcttcgggggtgttagaacccttatttgttgcggtgcagttttgcatcgatatctgaatctgatgtgatggtgcatgactgtgccgttatatccctgacctgggtcggggagccgttcgttatacaacaggggtcatcccaaaggcaacggagtcatttcaacaaatatgatttctaaacttcccgaccgccatcttgtttggcggtatttttttatgcctggcataggaaaatatttctatacaacagaaaggaatgtaaaatgaaaaaatcaaaaatgttgtttgtaatgcctgttgcgatgtgctgtgcggtcaatgcccacggcgaacaatcgcaagataccgtatcacacaaaccatcggcatatattgcattgcgcgggggatatgcggcatcatcatgggatgatgcgggcgtggacccgtcgggtatcgcggttgccgttgcggccggaattgaatacaagatgaccagtgtcaatctgcgtgcagaagtcgaaggtggtttatctttcctgggcgatgacaaggatatcgatttgttccccatgtcatttggatatgtcgaaaacagccaaacatttacatcggtgctggccaatggatatgtcgatttcttggccgattataagattaaaccgtttgtcggtctggggctggggatgatgcgtctggacgaagatgtcgatgcgttcgtgacatcttatgcgggcggccacaccagcgatgtttccctgtcggcgtcagaaacggcgtttgcatatggtctgcacggtgggattgggtttaatatttcgcaacatatgtccgccgatgtcggcatgcggtattttatgaccacgtctgaaaattctgtggatttattcggggttaacgtgggattgcgttatacgttttaaaacaaaccgccgtatggcggtttttgatttttgtggtttgacacccgccccaaaaatggtgtagatttgatggtatcaaaaggggggcgaatgaaatatctgtttcagtttggggtgattatgctgttcgtctttgtcggcgaagtgatggaatattttatcccgttgcccatcgcgggcagtatttatggattggttctgctgtttgttgcgctggtcacggggattgtcaaattatcgtgggttgcggatgtggccgattggctgcatggggtaatgtcgttgttctttgtcgcgccggccgtcgcaatcatcagtatttggggtgaaattgccgatatctggccgatgttggtgatactgctggtggtggcgtatttggtcacgatggtgacgaccggcgtcaccgcccaggcattgattccggataccaacgccgcgcacaaattggggcggcgtcataaatcggggggggcaaaatgatggaatttttaacggcgtcgccgtattttggcgttgcgttgacgattgcaatgttcgcgttggcggtgattattaatcgcaaatggccaaatccatttacaacaccgttgtttctggcgacgatgtttgttgtcgcggttttgttgatgctggacgtgccgtatgacgcgtataataacggggcccagtatatcacatactttctggtgccggtgacggtgtgctttgccgtgccgatgtatcgccagttgccgttgttgcggcgccatgggccggccatattgctgtcgattttgattggggtgctgtgttccgtattttccgttgcattgatttgcattatgtttggattgggtgatgttgtggccaaatcactggtgtcgatatcggtgacgaccgcgattgccatcggcatcacggaaaagctgggcggggtggtcgccctgacggtgtcgtcggtgattgtcacgggcattctgggcgcatcggtcagtgatgttgtctgtcggcgtttggggttgcgcaatgcaatcgcccggggattggccatcggcaacgcgtcgcatgcggccggcacgaccaaggccatggaaatgggccccgtcgaaggcgcgatgagcagtctggccatcgtgctgtcgggattgctgacggcggtgattgcgcccatggcgatttacattttgttttgatggcacttgcatttttcccctttgccctgtatcataagttctgataccgggattatccggtattggggcgtcgaaacctctctattatgcgtctgcgcagacgataaatgcctcctgcttgtcggcgggagggcgggtgaatatcaaataacccgcgctatttcataatagatagtttcgaacctcctgccacctgaataaatttccggtggttttttatcagacatgggggtatgaaatggttttgcctgttattacaaagagacgtcgccgttgggcgatttttgcgacattttggattccgtttgccgcatggcgccgcgcatggcgtggcgttattcagctgggggtacgtcaataccgtgatgttctgcgttgcgataacaatcgtcagtttgacagcacactggccattgccgccattatgaaaaacgaagggctgtatttaaaagaatggctggattttcatatcttggtcggggtggataatttttatctgtatgataacggttcggatgacaacagtcgggaaatcttggcaccatatatcgcgcgcggcatcgttgaatatacgtggtggcccgggaaacagatgcaaaatgcggcctatgtcgatgcgattaatcgccatgaccaagatgtgcgttggatggcactggtcgatttggatgaatttattgtgccggtatatcataaaaccattcccgaatttttatacagtttgccatctgggtttgcacaattaattatgacgtgggtaatttacggttctgggggacacgtgacacgaccggacggactggttattgaaaattataagtaccacagcgcaaaatcgtggggtgtgaaatcgattattaatccgcgattggccctgtgccagcacagcgcgcatgccaacgccgtcgccggttttaccatcgatgaaaatggtcgccgtttgggccatattgaccaaacgaataatccgcccacgtggaatcgtatccgatgtaatcattatattaccaagtcccaggaagaataccaggcgcgttgtgcccgcagtgacagcggccgtggcgccaatcccgaatggataaaaatattgaaccagcgttttgcccaatcggattgcaatgatgtctttgataaaattatggacccgtttattgaacggatgaaacagaataatgttgcggcagcatgttccggtaatgtgtaaaaattcccaggaaatccgcggctaagaacgttttcctaaacgctgtattcaaattgaaacgcggtaaaaaaacagatataatgaacctgtcgtaactgacacattaaatcttaaataggagacaaaaagatgagagaattaacccgctatatcctgaaaccgttgacttttatcggcgccttgaactggggtctgattggtttgttcggttttgacttggtcgcgtttttgtttggcccggccaccgttgccagccgcatcgtgtactgcatcatcggtatcgctgcgttgatttggttgatttgggcgttcatcgaccgtccggccgcgcgtaacgcacgataatatatcgattataaaacagtccaatggcccccgcatgcgggggctgtttttcattatgcgtgtgaatctatgccgcttgtgcgtgatgggacattttggtattctgcccgtcggagagagaaagacgggacgtccaccacgccccgtttttttattgaatcagccgatgtttttgggtaccgttattgcatatgaaacaggaactgtttgattttctgaaaaccgatttgcaattcgtcaagggggttggtcccgtcgtcgccgcccggttcgaagacgtgttgggtggtcgccgcgttctggattttttattgcatcgccccagtggtgtgcgccggcgcgatataacggataatgttgccgatgttaccccgggcgatattgtgacggtgcgtctgaacgtccaatcgcacaaggtgggcggaaaattccgcggccgccgcgcccccagccaggttgtatgtaccgatatgggcggcaaccgcgtggtgatacagttctttaacgtgaattttctggattattggttaaagaaattgcccattggcgaataccgcgtcgtcagtggcaaattggaacgcagcccgcgcggcaattggattatcaatcatcctgaatttatcgaaacggtggatggggcggacaaaatccccgcggtccaggcgatttaccccgccggcgaagggttgacccaaaaaacgtttgccgccgtccgtgaccaggtattccgtgccctggacgaacgggtggggctgaatgatgccgatgaccaaacgcgggaattttttgatgcgctgcgtcatgtgcatttcccgaccgaccccgccgatttggcgccccatgcccaatacatggttaaattggcgtattacgaattattggcgcatcaatcggcgattgccatcacccggcgtgaacgtcgtgatgcccgtcaccgtcggccgcatcgcgcccacaaatacgatttgatggaccggttttatcagattttgccatttgaattgaccggcgcgcaacaacgcactattgatgatatccgcgcggacatggcgcgcgacgtgccgatgatgcgcctggtccagggggatgtgggcagtgggaaaaccatggtcgccatggccgccgccgtcgccatggccgaaaccggtgcccagacggttttaatggcgccgaccgatacgttggcgcaacagcattatgcaaaactggccccgatgtgcgcccagatgggattggtctgtgacattctgaccggccgggacaaggggggcgcgcggcgcgaaaaactggtatcactgcggtcggggcggacgcggttggccattgggacacatgcgctgttttccgacgatgtggcgtacaaagatttgggattggtcattgttgatgaacagcatcgatttggcgtttcccaacgcgaagccatgcgggccaaggggacaaacccggatttattggcgctgtcggcgacgccgattccgcgcacactgtccatgacgatttacggcgacatggatgtttccgtgattaatgaaaaacccgcgggccgattgcccattaaaacgaccaagctgccgttgtcgcgcattgacgcattggtcgggcgtgtggcggcccagattgatgccggtgccaaggtattctgggtcaccccactggttgcggaaacggcggaatctgacatgaccgcggcccaggcgcgatttgatgatttaaagaaattttggccgaacatcggtctggtccatggtcaaatggacaagaagcagcgcgacgccgtcatggccgaatttgccgacgataattccgacatgccgctgttggttgcgacaaccgtgatagaagtcggcatcgacgtcccccgtgcgacgattattgttattgaaaatgcggaacgatttgggctggcggcgttgcatcagttgcgcggccgcgtcgggcgtggggcgttacaatcgtattgtgttttgttgcatggaaattacctgggcgaagatggaatgcggcgtctggacgtattgtgcgaaacggacgacggttttgttatcgctgaacaagatttgatgatgcgcggcaccggtgaattactgggcacacggcaaagcggttgggtccaataccattttgtggattaccgggaacatcgtgatttgttcaaattggcgtcgcgtgcggcgatggaaatgaacgggccgacccagtttattttggatttgatgtttatctttgaccggcgattggcggtgggggcatgatgaacgcggtgcgacgcatttttgccgttgttgtgggggcgtggttttgcgccggggcatatggcgccgcgattatcaatgatacggaaattgaacgccatttgaccgaattggtggaaccattggcggatgcggcggggattgcgccggggcgcctgaaaatcaatgtggtgcacagcgatgatttcaacgcattcgtcagtggtggcgaagaagtttatatttataccggtttgctgacccaaattaaaacgcccgacgcgttacaggccgttgttgcccacgaattggggcatacgctgggcgggcatatggcgcaaatgtcggcgcgtatgaacgcagaactaaaacgcaccgccattgtccaggcattgggggtggggctgatggtggcgggcgggaacccgtcgctggggatgggggtgttggcgggaaccgcgggaatgaccacgcaatcaatgctggcgttttcccgggacgaagaa

SEQ ID NO: 807 - DNA, 23282 bp, synthetic construct
  misc_feature 1..23282: note = Synthetic
  source 1..23282: mol_type = other DNA
cattcctgcgcaggcaggaatagggtctctgaaattactaattttcgtttatgtacaatttacgaaaattataaagaccgcaacttttttgtatttggctcactacgttcgcactgcttagtccctattcccgcctgcgcgggaatgacaagtttctagaatgtaatactcattcttgttgcggacaaagttctcctcttgtgggggagtaccgcgtagcggggaggtggtcttttgtcagaaagcacgcatctataattacgcgttctctcgaccaccccgtcctgcggccccccctccaatagaggggaatttaatgcaaaacaatccagtataaaaatgtgtccgcgggtggcggacacattgtcataataaaaactatgcctcggtactactgctgctgccctcaaaaattgttatttcaaaccctgtgccatcatcaaccgtgcattcggggtaacacgtgtcatcaatcaacaggtaaccgcttttgcacgacgttctatcacatgtattccaagtaccgaatacgttgcacgtctgtgtaccagtgtatgatgatgttgagcaagaacgcgttgcaccaacggtgcattctgccttgcacgtgccacgggtctgtgacaaagaccagtttgtgtacacactttcgcttttttcgttataggtcgtgctttttgaacacgtcattcgatattgcaacaatgtcgtgttatcgcaataacattgaatcatgtcaccatcccccaaacttgtacggacatttgttgtcgattctaatatacattccgttctggttacatgaatctgatcggtgctttgtgtgccgccacatgttacggttactgttttacgtgccgcatcggcatctttgctgtgcataacgcccacgaacgccagcaccgctgcccaaaaacgaaaccaagatgatttaattttttgcattttatcttcctcctaaaaaaaattcatatcaatatttgcaatcaccaccagaatattgccaattaccagtactatctttgaacgtttggtaatcataaggcgatatataacacgcacttcgcaacaatggttcattgggtgcaatcggtttcagtgtcaggccggtatgcggactgccgataacatcaaccgaccatgtgcgtaccttggccgtgccaccatccgccaatgttttgcttgggcatttggtgcaactggtgtaatatgtcttttgaaaataagtatcgcttcgtacactatcggcataaaaaccgtcgttgcattggaaaatcgcacaaattttcacctgctcgtatgctgcatgcgtcatacatggcatccacaaaatagataacccaaaaattagtatttttttcatgtaatctccttttttaagaaaaaccgccagaattggcggttggagattcacaactacagatagatagccgagtgtattcaatatattccacccgtctccaaccatgtgcatgattggagttttttcgtcttctctgacgccatctgtgggttgtgaagcccaaccatcagaatacccaatggcaggattattgtataatggaaacgtcttttttgcaatcagtatttgattgttatgtgtgctctgtgcactttcctgttgcgtgggaattttatctgtgttagagtgtttatgacaaggcgaagcggccatgtcggggcgtaagaacctctaatttacagtgtccgaggggacaaaaaatacctccaatctatgttcgggttggagggtggcgatatattcgaataagcccgctattttctgtaaattatagttcttaacctccaaccacccgccttggcagggtgttttttgtgcccgacgaaaaaagggaaaggaaaatatgaaaaaattcattgtctgtggttttgcgattttattggcggcaggtggtgcaaacgccagtaccgttacgcgatgtgttgtacgccagtgcgctgatggctatttcgcaacagaagggtttatggattataagtcaggcgaaacaatgtacaccaaatgtaccaagtgtcctggcaagatgctggccagtggtggcacagccaaggttcgcacatggcaagccgatgttatcggcagtccgcacaccggcctgacgctgaaaccggttgcacccaatgaacctttgctggaaggtgcgtgttatatttcgccttatgattaccaaacattcaaagatagtacgggtaattggcaatattctggcggtgattgtaaatattgatatttagggggaaaataaaatgcaaaaaataaaatcatcttggtttcgcttttgggcaacggtgctggcattcgtgggcgttatacacagtaaagatgccgatgccgcatcacgcagttatattaggttgaagtgtggcgggccgacgctgaatgacaatcaaggtagcgcagcatggtatacccacgattgtaaaattgattcgtacgatgccccagtaacagaaaaaaatattaccgacatttctagtgttgactgttattgcgacgatacaaccgtgttgcaatacaaggttacatgcgttgaagaatcgtggttggacgttaatagcgaggatgtgcatcatcgttatgaattgaatcatacatcaggaaaatgtaaaaaaccagattgcacccctggggatacccaggattgtgtaactacaaagggttctgggacacaaacatgtagtaaatatggtgactgggaactttgcgatgtcaacacatgttccaacgggtatttgatgattgatgacgtttgttatgccgaatgcgatattgacaatggcgagggttatgaacgtacggttaatccagattccagcagtagtactggtgcgtgattttgtggtgatgttgtgtccgccgccacccgcggacatttttttagagcatagataatagagaatacatattgtgcgccattcggtgcaactctactgactggattgccacgctgcgctcgcaatgacaaggggggggctagacagcaggcgatacgattatagattatgaaaaaattatttcttgctggcccagaataatgcccacagccatccgatgccagtccaactgaatacccaactgcccaagcgaaccagaatcatatcttgcttgccccgtgccgtttggcgcgcaatccatgcgggggccaagaatatgccaatggccagcaatactgcgattgcgtatttggcaataataaaaatttggtgcgttgttatcattgggcctcagaaaaaagggggcgcacgatttcgccccccgtttgttacatttctagtaaattatataccatactttgccgatttgtccagttcttcttcgatacgcaacaactggttgtattttgccatacggtcggtgcgtgacatagaaccggtcttgatttgacccgcgtttgtcgcaacggccaaatccgcgattgtggtgtcttcggtttcgccactgcggtgcgaaatgattacgccgtaatttgcgtcttgggccattttgatggcgcgcaatgtttcggtcaatgtgccgatttggttcacctttatcagaattgcgttcgcaacaccggcatcaatgccacggcgcagacgtgcagggttggtcacaaacaggtcatcgccaaccaactggcactttttgccgattgtttcggtcagtttgcgccatcccgcccaatcttcttcggccaatgcatcttcgatagagataattggatatgttgcaatcaactgttcgtaaaattcaatcatctggtcggatgataattttttgccttcgaaattatatacgccgtcggcataaaattcagatgatgccacgtccagaccgattgaaacctgatcccctggggtatagcccgcatcgcgaattgcggcgatgattgtatccaatgcctgtgcgcaagaatgaaagtttggtgcaaagccgccttcgtcgccgacgttggtggaattgccaccggatttcagaatctttttcaaatggtggaatatttcagagcccatgcggattgcgtcggcttcggattttgcgccatttggaataatcataaattcttgggcgtccagaccgttatctgcgtgtgcgccgccgttgatgatgttcatcattgggcgtggcaatacgcatggatttgcgttgccgtatacgcccgcaatgtacttatataatggcatacccgattgattggccgccgcatgcgccgccgccaatgacacagccagaattgcgtttgcacccaatttgtccttgttctgtgtgccgtccagtgccagcattttttcgtccaatgcggtctggtcgtttgccaccatgccaataattgcaggggcgatgatttcatttacattgcggacggcggttgcaacgcctttgcccatatatgcgtcgccaccatcacgcagttccaaggcctcgaaactgccagttgatgcacccgacggtacggccgcgcgaccacgtgcgcccccagataacacaatgtcgcattcaacggttgggttgccacggctgtccataatttggcgtgcatgaactgattttatctcatacatatttgcttctcctttcttttcatttctttgtgtaatatttgtcttgcccttataccaaaaatttttttataatggaataacaaattgcaaggaatggaaagaaagatgtctctgttttcaaaaaaattagtatctgttgtatgttgcttgatgccttttggtgcgggcgcggccacgtttgcagatgggctgaatatcggcgcaaccgatgccagtaaaacgattgacgcaacggacaccagtttggtcttgggcgatggggcaacgacaaatggtttgaatgtcgcgggcgcggtttatgttggtggcacgggtcagggcggtaacggcgatttggcaattttgcgcgatacggggtctttcaccatccagtccgatggcgatgttgtcattggtaataatctggaaattaaatctggcatgacgctgggcattcagaacggcacggcggcgggcatggatgtgtcgattggtggcacgataaatgcgctgggcgcgctgagcgtggcggcaaacagtggtgttgccggtggtggtatcgattcatttacgtcgggtgcgataaatgcaaacgacactttgcgcatcattgcaaataccatcaataccggtgcgattgatgtaaatgccacgggggcaaatgctgacgtcaatttggatgcaactgattctattactatgaagcagttcacatacaagaatgcgaacagcactggcaagattacagcgggtggcgatattacatcgggcacaattcaaaattctgcgggttcgctgaacgtaacggtgggtggcaatttgacgttgaccaataccgacaccacgggcagtttggaaaacaaggccgcaggtacggttactgtgtcggcaaaggacattacgattgcaggcgcaattacaaacgaagatacttctgggacaatgaacatcaatggtgacagtttgaccatcaatggtggtaacggccagaacgcgtccatcgtcaacagtggtgtgtttgttgcgaatatttcgggcctgaccaaaattgcccagaatattgattggagcaatatgaccgacagcggtaaattcacgttgaaaaccggttctttgcagatgacgggcgatatcttgctgaaacagggtatggcgaccattgaaacgacgctgggcgatatgtcgtttggtgcgatttctaatgcgtcgattttgccgcaaggcggtattgccggattgacattgaacagtgcgggtaatttcacatcaacatcgattcgcaatacgggcacgttggaaattcgtggtctgagtattacaacaggggcgatttctggtgatggtgcggacgcaaatgcaacgattgcggcgggtggcgcgtttgttgggggcgacgtttccaacacaaatggcagtaaaatgcgcatcgacggtaatacagtaaatgtggcaagtgttacgaacactggtgatttacgtgtggcggcatctgcgtcgtccagtggtgcgctgacggttgatggtaacgttgtgaacggcacgtcggcgggtgaccaaggggtcttggacatcacggcgcgtaatatcacgattggcggcgatttgacaaataatgccggcgcgatgacggttattggttcgggcaatgccagcgacaatatttcggccaagaatttgaacgtattgggcggttcggttgaaatgaacgcactgattggcaatattcaaattctggacaaaatgattgtgtctggcggtaaattgagtttgcgcagtgcggttaaaaacctgactgttgaaaattcggtacaaattgatggtaactttatcgccagtggcagtgccgcggcaaatgcgggcgacatgtcggttgcggcggacggaacaacggcgtttgtgttgaaatcaaataacggcataatcaatattggcggggacgttcgcgttaccgatacaactgcacgtacggtgcgtatggacgcgtcgttgatggacattggtggtgatgcgttggcgacaaatgcaaaccagcgtttgatatttggttcggcggatgcatcgcgtgcagcgggccagacgctgaatgttgcgggtgcggcatcggcaaccaatggcgcatggctggaaattgcggcggcgaatgcaaatgttgcatcactgacgaatcgcggcacaacgaatggtttgattgttttgtctgggaaatcattgaccgcaacaactggcgatatcagtgttggtggcgaattgttgtttaacgatgcgacgccgacatgggggatgaccggaatggttatcagtggcaacgaatacaccatggaaaccagcgtggggggcatgtcttttgacagcgtgacaatcgccaatggtaaaacgttgacattgacgtcacaccaagatttcacaatggatggcgcgttggcgaccaatggcacggttaaaattgatgcggtgggcaccgctaaaatcggtggccagaccagcaacggcggcacattgacaatcaacggcgcaaccattgatatgggcgcattggccagcagtggtaacgccaatatcaacagtgcgtctgacctgaccattggccagattgacaataccggcacattgaatttggttgcggcggattctattaccgcgggtgcgattgaatcaaatctgaaactgaatatttcggcggaaaaattgaatatggcgatgctgaccgtgtcggggggcagtgcggttatcaatgcgccaacaatcacgtctgatgatttgatttctgttgcgggtaacataacacacgcatctgacgttgcaggtgcggcggcatctgggctgagcattgttggcaacacaaacgtcaccgcgggcagtttgacagccactggcgcgttgatggccgacaccggtacggttgcatacgacgttaaaaacgcggtcgcatttaccggcgcggcgaatgttgcggcgggcgcgacaacgtcgatttcgtctgaaaattccagcatcgcatttgggggcatttcaaacaagggtactttgacactgaatgcggcacgtggtatgacactgggtgcggttgacaatgatggcgatttgacgattgcatcgggcgcggatgtggcaaatgttgattactttgccaataatggcacggcaacattgtcgggcgcgggtatgaaatctgcgggtgcatttacagtcaaaaacttgtaccagaattatgctgggacaatcgcggtgcgtgatgcaaatatcaccggcgacagttatgcactgtctgcgtctaatgtgattgtgggcggtaatattcagcaaacatcgggtgcgctggacatcaatacgactgacctgacggttgcgggtaatattgacgtcaaaaacatgcgtgtgtattcaaacgcgggcctgaccgtgggcgttaccggtaatgtttctggcggcgcgcgctttggtggcttgcaagaaatgacgattggtggcaactatctgtttgataacgacagtggcctgtacgttgatgtcagacgtcgtgatgtgctgaccgcaccaacacgcaattactggtcatcggtcagtttggcggacgataacacgctggggcgcatcacaaacgccacagacggcaatgcgggtgcattgattcaggttgatggtgcgttcacatctgatttgacgctgtcgcgtaatccatcgactgggtttgcaaatgcgaccgatcagattggtgttgcgttgcgtgaattggcaacggtgggcgatgcaatttggctggtacatgcagacgatggcatcacagaattgggcgataaactgcgcaatctgaacgttgttgtgtgcaacaatacgggcacgatgtgttatgactatttcagcggtgcgctggttgatgcggattctgcatacctgaccgtgcgtgataccgacggtgatggtattgacgacagtatctatttggtgtttgatccacgctttggtgggccggtagaggtgttcaagattcagccgattgttggccgcaccccagggcacaccagtggcgaatatatgtccgcaggcgcgttggacgacatgttggatggcgcggccgctggcaagggattttatggtcgtcatgcgctggaaatgttgcctgtgatattccgtggcacaaatctggaacagttgggcaacgaactgtacaagcgtatggaagattataatacgaatcgcgatggtacggcgttgtcacgtttcagccgcttggttcagccacgtgaaatcgaacaggtcgtgggcagcattgtcttgaatgaacacactaatttccgttcattcgaagaccgcatgtttgacgaatttatctggaatcgtaaccgcaacctgaaaaaggcatgggttgatgcggaatttggtatgttcaaccagaaagtgtccgatggcaaacgcgttgatggtaaccgtatcaacgtcgcgggtggatttgactggcagcattctgaaactttgattctggggttgacagggcgtatatcgcacatgtcggcggacaactcggattctatgaatttgggctataccgttgaaaatccgttcatcgccggcaatgttgatgtcaaggttgcagataccaacatcggtctgggtggttatttgatgcagacattgggcgaaaaaacacgcgtttatggtaatgcgttcttggacatccatgtgttggataccacacgtcaccagacatatataaatggcgcgattgatggtacgggctatgacgttgcattcaccagtgaatggggcttgctgcatgattggctgaaccagtatgttgttggcaatatgtatgcgcgcgttgggtataactttggattctcgctgacggaaaaggcccgtggccacgattatatggacatggaatccgacgggtatctgatctttacacctgggtattcgttgaccgcgcaaaagcgtatctatccatcggcatggttccagattcgcccatatgcgacaatcggaatcgaatacgatgtgttgggcgcgccagacaacgcgaaatataaattctcggtcgcaaattcgttcacaaagtatgatattgatatcgatccaatgtgggcgaacatcggcggtggcgtagaaatgctgtcggccagtggcttgcagattggtctggattaccgttaccagtataaccaagatattcaactgcataatatcaaggtttccggatcataccgcttctaagaaaaacaccccgcaccgcggggtgattttttgtaaaataaacggacaccgaagtgtccgtttttaatggtgaaatctcctctcttgcaagaggttcttattaacgactagacatctaattccaacttgattttagtgttattttctttcaccaccataattatagcgtcctaatataataagtcaaataatttgcttttcagatattgattttgtagaatttatgacgagatgaaaggaaacagttatgaaatataaaattggtttggatttgggtagtacctcgttggggtgggctgtcgtagaactgaatgaagcagaccaaataacgagtttggttgatatgggggtgcgtatattcccagatgggcgagatgcgaagagtcacaagccaattaatgttattcggcgtgaacatcgtcagatgcgcagacgtggtgatcgcgtactgctacgtaaaaagcgtgtcttgcaattgattcataaatatggtctggatttcgatattagtgcagatatcaaattagaagatccgtatgttttgcgtgcaagggcggtttctgataaactgtcgtccgcagagttggggcgtgttctatttcatctggcattgcgccgtggtttcaaaagtaatcgcaaggaaaccagaggggattctggtggcaaattaaaaaaggcgacattggcattgcatgatgccataggtgataaaaccttgggtgaatttcaggtggattcaaagcgttatcggtttgcagatcaatttgatggtaataaaatcaaagatggtgctctttatccgacgcgtgatatgtaccttgacgaatttaatcgtatatgttcagtacaaaatatgtcagatgacatgcggcaacagtttgaatatgctatatttcatcagcgaccgttggtgccaccagaaattggaacgtgcatgtttgaattagatcagccacgtgcgtataaatttgaacctgtgtttcagcgttttcgtgttctgcaacagataaatcaattacgaattatcaacaatggcgaaataaaggaattgaccgcagaacagcgcgaaaagttgcaagatgctttactggctacattttgtggggtaaaacgtgataagtcggggcgtcccaagataacatttgcggaagttaagaagttgttgggtttatcacgtaatacaaaatttaatctggaatctgaaaagcgtaaggatatggatgttgatgcaacggcatttgcatttgctgaatgtgaattggcagatttctggcgtgcttgtacagataatgtaaaatcgcaggttttggcacatctgaatgatgatgaattgtccgattctgatttggtggattatctggcgcatgaatatggtatttcgcaagataaagcagaaaaattaattcagcaaccgtttgaagatggggttgcaaatttgtctgtgtgtgcaatgcaaaaaatgttgccgttcttggaacaggggcatttgtatcacattgcggcaaaagaagcaggttatgatcatgctgataggggaatagtgcatttagatacattgccatactatggcgatgtcatggctttacgtccatcgttggttcaagataagatggggcgttatcgtacgatgaatgccacggttcacattgcattgaaccagttacgcgcagttgtcaacgatttgattgcgcgttttgatggcgagccatatgcaataaatattgaaatggggcgtgatgtatcagctggtgcagatgaacgtgcagaaatagaaaaacaacaggccgcgaataagcgtgaaaatgaccgtattgccactgaattggtcgccatgggcgttcgggtttgtcgtgaaaatatacagaaatataagttgtgggagaatttgggaaaaagtccattggatcgtagatgcgtttatactggtgagataattagtaaggaaaaactgtttagcccagagtttgaaatagaacatatattgcctttttcacgtacacttgatgactcgatggcaaataaaacgatttctgcggccgttgccaaccggttcaaaggaaaccgtagcccagatgaagctttttcagacccaaagtcaccatggaaatacgaggatgtggttgcgcgtgctcaaaatttgccagatgctacgaaatggcgttttaatcgtggggcgatggatgtgtttctgcaaggcaaagagtgcattgcgcgtgcaatgaatgatacgcgatttatgacacgtatggcggtcacatatttacaacatgtgtgtgcagacaaaaatcgtgtgaacggtatgccagggcggttgacggctagtttgcgcgatgaatggcatttgaattggtggaagaataaggcggaagaatccaaataccgtggcaatcacattcatcatgcgattgatgcttttgtcattgcttgtactgatgagaacatattgcggaaactagctgatgcaaaatctgatatgcatacccctttccctgggtttgattattttgatttcaaaatgcggtgcgagaatactattatttcataccgtcaatctcaaaagaatccgaaagatgcacatagtacggttggatgtttgcatgaggatacggcgtataatctggaatgttttgaagatgggggatgtggcgtcaatgcggttatgtcgcatcgtgaagaactgcccacaacagataaagacaaaaaagcgtttgcaaaggatttcaaaaatgtgaatccgaaaacactgcaaatgtttttgaatgatgctggtgttgcaaacgaagaaccagacattgcaatcaagtttttggattggtgtgcaatgcgaaatatacgcaaggttcgtatgtataaaacgggggtcgatgttacgacatacgtgcctgtgttcagaactaaaaaacagcgtgacgtttaccgtgccgcgtatttgaattggtatgtaaatactggcgttgccagtggaattgtggataaaaaattgcgtgctgttcaacaagagaaagaaaaacacttgttgcaagaatttcaagatgctgccaagcaggcgtacaagtggtatgttggtggtaataatttctgtgcagagatatttgaaattcgtgatgatgatacccgctatccaaaattgcgtggtcgctggcaggtggagattttatctaattataacgcccaattaaatgctggtgcaccactgtggcgtcataaatatgccacagcaaagcgcataatgagtttgcgtataaatgatatggtaatggcggaattttccaaagacgatccaaaattaccaaaagggctggtggaaacagttgcacatcaatgtgcaatagagaaaacagataaagtaaatgttgtttttcgtgtaaaaaaattgaacagcagcggcactgtgtacctgcgtccacatttcattgccaaggaagatgctgatacaaaatcatggattgccagcgcaacatcgttacaggaacacaaagcgcgcaaggtttgtgtcagtccgtctggaaaaatattgggattaaaataattgtaactgtcctgggcgtgtggctaatacacttggggcagttgccttgtccagatgaatgatatcaccgaactgcgtgtcagtgaagaacaatatgtttacatcgcctgtttgtgggttgttgcgttttacagcatgtacatatttttgtgaattttcgcgtgtgccggtaaaacgcatgtaaaccgaatattgcgccattgaaaagcccaaatcttgcagaaaattgcgaaacttggacgcctcgcgacgttcgcgtttcgtatctgtcggcaaatcaaacataaccatcatccacatgtattttagtccatcagtttttaatgacattttcaaaatccaatttgtttttcttttctttcagtgaatttacaaagttccatacatcgcgttgcattattgtggacagtggtgaaattccaccgcctcgtgttgggatgctcatttctaatactgcagacatttttcgtttgtcatctggcgtcagctcacgtttaggattgtctgtgccgttgaatatttcatagacgattgcatctatgattgggcgatacacctccatcaaatcatcaaccaaacacatggggttcatttgattgtgatgctctataccatatgatgggttcaaaccgctggccacaactaaacgtgccatagcaccacgtaaaatggcataaccataatttaaaaacgcattgattccaccggcgttgtgatcacgtaaaaaatcagagtcgaataaactggtaaagtacattctggcggcaactccttccatgttgttgctgtcgccagataatacagccgcaggaatatgtttgatacggttgtctttcccgtatttgtccagtatccgcgattggttgcgaatcttttcttggacaatacgtcgccacagttgtttttccagtggccgtgatgtttttatttgaatgtgttgcactgccatttggcgattttggccaaccagtggcgtcattatgcctatggggttataattatttcctataatgaccaatggaatcccgttttcgcacagtgctgccatcatggcttgtgtaaaaataatggcgcgtcctgttgtcataatggcacatatgctgtccaacggtacttcgccaataagacaaccgtgttctttaatgcacaaaaagccgcgtcgaacagatagttcgcgattgtcactagaaatttctataatatttgtttgcatgttgtatatataggacgattttttattttgtcaacacttgtagcgtgcaacaggatgaaaaaaatagagaaaacgaatcgtattactggtggaatagggcgttttatttttttgttatgtagcaaaaatccccagaaaactggggattttgttgatatgtattatatcagattggaattagatgtctagccgcaaccatttaatcgccattgccacccccccagaattatatcagattggaattagatgtctagccgcaacgcggttctggtaatgcagttgagaagtagattatatcagattggaattagatgtctagccgcaaccaggagcagcacaaacacgtgaaacaaacaattatatcagattggaattagatgtctagccgcaactattaaagacgttgcactgacaaaggcattattatatcagattggaattagatgtctagccgcaacacggcgtcgggtacaccgcctgcaaggcaattatatcagattggaattagatgtctagccgcaacaatgttatgccgcgttcacagttccgtgaaattatatcagattggaattagatgtctagccgcaactatttgttgtattatcagttctctgtttttattatatcagattggaattagatgtctagccgcaacgaagtttcattttcaatgtctgcgttggttattatatcagattggaattagatgtctagccgcaacaggagcgcatgtcaaatactgcagttcagcattatatcagattggaattagatgtctagccgcaacaatgcccgattcttttatcagttttttaaattatatcagattggaattagatgtctagccgcaactattattttatctttattttctttccaataattatatcagattggaattagatgtctagccgcaacaaaacacacaaaactgatttcaaaaccttgattatatcagattggaattagatgtctagccgcaacttattgcgtcaatttccgccaactgggcggattatatcagattggaattagatgtctagccgcaacagaaacgctgggcaggcggcggacggctgaattatatcagattggaattagatgtctagccgcaacggtgctgtcgttcgcctgcaagtgatagacattatatcagattggaattagatgtctagccgcaacgtttataaccagcgatgcccaagtttcggcattatatcagattggaattagatgtctagccgcaacagccccgcgacactggatttattcagatttattatatcagattggaattagatgtctagccgcaacaaaaaacttgctacaaacaaacctgaacaaattatatcagattggaattagatgtctagccgcaacagcatggcgcgcccctattttagaccctgaattatatcagattggaattagatgtctagccgcaactgatttcaaatttaatcaagaaaatcaagattatatcagattggaattagatgtctagccgcaaccgcagtgagtgaatttttgattgccttgcaattatatcagattggaattagatgtctagccgcaacaatgctcgcggcattgtcttttatctcttgattatatcagattggaattagatgtctagccgcaacttatttcattgtaagtttttttcatgttctattatatcagattggaattagatgtctagccgcaactggtttatgtgtgctattgtgcacgtttttattatatcagattggaattagatgtctagccgcaactgttttaatcttaatgtactggtccaacagattatatcagattggaattagatgtctagccgcaactactcctattcatagtattcgtctactatcattatatcagattggaattagatgtctagccgcaacttttccttttggttacgccgtggcacagccattatatcagattggaattagatgtctagccgcaacttgaccgctggcgcgtgttttatcatttcaattatatcagattggaattagatgtctagccgcaacctcattcaacgcgtccactttatcgtctggattatatcagattggaattagatgtctagccgcaacttcatcatgttctatccttatttttaatgcattatatcagattggaattagatgtctagccgcaacgaatcttgtccgtgaacttgatggtcgcacattatatcagattggaattagatgtctagccgcaaccataacgccggcgcaagtcctacgggcgcaattatatcagattggaattagatgtctagccgcaacaaaaaagcgacacaggcgtcaaagatttcaattatatcagattggaattagatgtctagccgcaaccaaacgcgacagaaaacaaaacaatcaaaattatatcagattggaattagatgtctagccgcaacccgtggagggtttatttggcggtgtcacaaattatatcagattggaattagatgtctagccgcaacaactgttccaataaattcatcacagcacctattatatcagattggaattagatgtctagccgcaacggtgccgatacaccatccgcagacaactgaattatatcagattggaattagatgtctagccgcaacaacaattttgcgatggtttctattttttcttattatatcagattggaattagatgtctagccgcaacaagctgaaggtctcttgttcgcttcggttgattatatcagattggaattagatgtctagccgcaactgccaattcttgttttttttgtagttctttattatatcagattggaattagatgtctagccgcaactgttttagttgctgtacgtctgaaaattgaattatatcagattggaattagatgtctagccgcaacaggtcaaagtaatgaccaaacaaaaaacgcgccggtatggcgcgtttgtttttgaacttggcattcccaatttttagaatggaatttcgtcgtccaatggtgttgtctggatttcttcacgctgtgcggcggccggcgcagacgccatatcgccacccatgttctgggcatccaaactttttgcgcccgacaggattaccatctggccggaaaatggattcaagaccacttcggttgtgaatacatctgcaccctgttggttctgccatttgcgggtacgcaaagaaccctccaaatacagttttgtgcccttttgcaacatgcgttctgcaacctctaccaaattcgggttaaagattacaacacgatgccattctgtctgttctttctgttcgccggttgcacggtcacgccatctgtcagatgtcgccaacgagaaactgacaaccttttgcccgctctgcattgtgcgcacctgtggttcttgaccaacgttaccgaccaatatcactttatttatgctacctgccatattcacttcctttgttttacttgtatatcaaatgagagcaattatgcgccgaaaaagcaagtaaaaataacaattcttgactttttgccctaaaatgcgtataataagtgggtcaaaaagacaacttgggccgcggattcccgcattcagcccacccccacaaaaggatttatttatgcatgtgaatgaattaaaggcgaaatcgccacagcaactgctgaaaatggcggaagatatgggtattgaaaatccatcacagttaaatgtgcagcaactgcgctttgccgtgatgcgtgtttttgccgccgataacaagattacattgattggtgacggtgtcttggaacgtatgcaggacggttttggtttcctgcgcgcgcccgagagcaactatctggccggcccagatgacctgtatgtgtcaccaaatttgattaaaaagtacggtctgaaaactggcgattatatcgagggacaaatccaagcgccccagaatgaatcagaacgctatttcgcattggaaacgattgagcgcgtaaatggcgacaatcccgacaaattgcgtcaccgtgtgtcgtttgatgatatgacaccactgtatcctgatgaaatgctgcgcatggaagtgccagatgacaaggacaagggtcgcaacctgtcggcgcgcgtgattgacctgatttccccgacgggcaaagggcaacgcagtttgattgttgcgccaccacgtactggtaaaacagttatgctgcaaaacattgcgcattccatcgcgacaaattaccctgatgtaaaactgattgttttgctgattgacgaacgtcccgaagaagttaccgacatgcaacgcagcgtcaagggcgaggttatttcgtccacatttgacgaacctgccgcacgtcatattcaggttgccgaaatggttattgaaaaggccaaacgtttggtagaggccggccaagacgtcgttatcttgctggattccatcacccgtttggggcgcgcatataatacctgtgtcccatccagtggcaaggttttgaccggtggtgttgatgcatacgcgctgcaacgtccaaagcgtttctttggtgccgcccgtaacatcgaagggggcggttcgctgactattattgcaactgcgctggttgataccggttcaaaaatggacgaagttattttcgaagagttcaagggaaccggcaacagcgaagttatcttggacagaaaactgtccgacaaacgcgtgtatcctgcaatcgacatcacgaaatccggcacacgcaaagaagacctgttggtgggcaaagacacattgtcaaaaatgtacgtcttgcgccgcattatcaacccaatgggcacgttagaggccatggaatttttactggacaaattacgtttgaccaaaacaaacgaagatttctttaattccatgaatcagtaaaaaaacggggcatcgccccgtttttttataaagggaacattatgaaaatatatttgattgcggcattgtccgcttttattttattcgcattttgcgcgggcgtgcgcgttggcgttttgcaatgccagcgcaatacagcgcgccaacatgcaacagcccaacaaacaatcattcaacaacaggtaaccacacatgcagaaactatgcatactggcatgcacgatattcgtcgcgtcttgcgcgaaaaatacaccattgccgaataacacgtgcacgccgtgcataccgatatacgggcgtgcaaacgattggggccaaatcagtgacgatttggcccgcaatatttatcaacataatttgatgtgtgaacggctttaatccgccaacgcaataccaaccagttcacgaacgatgtccgcactctgcgcgtcgccatcgtgtggggcgtattccacaaattcaaaactgtgtgcgtcgggcgcgaacgcatgtgtcaactggcgcgccgcagacaacgaaataccatttggttctggaacaagcacagatgcaaacgtatttggatcaatcgcatcaaaatcaaatgatacaacgtacgggcggtcgtcaatctggcggaaaatttcgccaaccacgcggtcaatcttttccggtgtgtctaaatccaacggcgtacgcataaagatattattctggtgcacaaaatcaatttccgccggttcatatgaacgcgaccccagatagaacaaattttctgggcgcagtgccggcacgcgcgcctgtaaccccagccagcgttcgtccccattgcccgccaatgcgcgtacgtttgcaccatgtggtgcgcccgatgcctgtgcccgggatgattccggcgtatgcgcgtccaaatgcgcatcaatgtaaattagacacaaatcttcatccatcaatctgtccgccaacgcagcaaagtgcccaaagttcaccgaatggtcacccccaatcattacgtggggcgcattcggcgttgccgcatagattttccgctgaatcaacaggttttcaccaaagcgatcacgcgcccacaaatccgcgtcatatgggtcggccgtaaccatcgtccaatttgcatcagggtacattttctgcaccgccgcaggggccaatgccggcccgcccaagacaactttcgcggtcgcgccgcggccatattctataccaaacaaagatttcatttatatgcctctactatactttccgccgcatttttcaatttttgcaacgatttttcatacgtcgaacaatcgcgtgcaatgtcagaccgataaatatcgcgcagatttgccgccatgtaaaaacagccctgtaaatgctgcatgcaataatcatgccccgttacaaacgcattttgaccacgggcgcggctttccaaactggcccaatcaatattcaatgcattgtctaaattagtccacgaattttcaccacggtatttgccgacgacgctcatccaatactcgttcatctcggcctctgtccaccgattcgtgccccgcattgtcaaaatctgctttatcaaactgtcaatctcgggctggtactgcgcatcaatctgggacaacttggcactgcaatagcagcgattgtacgcggtgttttcacgcacacagtacccatccatgcattcactgtaatccgccaagcatcgcgccgccgtaacgttggtgtgactgccgctggtgctgttggtggcggtattttgcgtatttgataccgcatcgtcacgcgtcaccgtgccattgccacgaaccgtacgtgcacgaacattacgcccagacgccgtagcaaccgaactgcgcgccgttgtcgcacccgacgtcgttccgctgcgcgatgcgctgcgcgcgacaacacggcgtgcattggtggtcgcccccgttgtggcggtggtattggacgtagcggcggccgcaacggccgtgccggtcttggtcgcactgcgcgcggtggtggaacgcgaaaccacacgacgcgcggcggtggacgcggtatttcccgtcggaattgtacgcgtcagaacatcaatctggtttgtagattggctggggcttgtccctgggttcaactgggtacgcatcgcattattcatgtatgggtacatgttgttgtatgtattcgcactgacgtaatccgacgcgcgcgtcgccgcgccggccgcaccgccgccgcacgcaatacaccacgcacacaaaattggcaaaaaatgcaataactttgacatttgatgtaatgatataagtttttcccccatgcgggcaagtataaaataaattttaatatttgcatttgaaaaaaatgctgttataatctgtgtcgtttcggggtgtagctcagtctggtagagtgcttgctttgggagcaagatgtcgaaggttcgaatcctttcgccccgaccagaaaataacaaacgaccgctttgggtcgttttttattttcccgcgggacgcggattcgaacttggttctcatctttccctcgttgtggcacgccacaactgcggggcattcgtgacggtttggtcgtgctatgcacgcccgcacctactcattgtcgccccgaccatgaataaaaaatcggtatcgtcagataccgatttttttattcattgattgagtgtgtgggattcgaaccttcgaggcagaaggttcgaaccgcaggcacaaggcagacggcagtatgccggttcctcgccagcgcgaatgtgccaaggtcggcgtcagccaatcctttcgccccgaccagcaataaaaaacggtgctttacgcaccattttttattgctgttttgggcaaatctggatttgatacataaacattatgtttagcaacattgtacatttatgaaaaagtgcccatgacttttggcgtgatttgcttgaaaatcgaaaacaaaagtactacaatagccacatcaacaggaaagggagttgcattatgccaaagaaagagcaagttaaaaaatctgcgccaaagcgtgtgcggaatgtgcgcagtcgtcgcacagaatccgatccaatcgcggccgcggttgaacgtatgtataacaaatccgcgccattgttggtatgcgaagggttgttgtttggtattgcggcgatttggatgtttttcaatcctgttccaattttgaacgtgctgacattcgttattggtatcggtttgatactgttcggattgtatcgcacgatttcgggttttattgtatcacgtaatgttggcggtggctggattgacgtgatatttggtctggtaaacattgcgttgggtgtggtgttctgtgtgtacccaacgggttcgattatcggactgacattgattttcgtagtgctgtttttgttcaaggcactgcgtgcactggtgttcgccatcaatatggcgcgcgcccgttttggtcattgggttattgacctgattatcgcagttgcgctggtcgcgctggcggtggcattgttgttctggccattggcggcaccaatcgcgattgtgtattatctggccataacattgttgctgtatgcggcatcagatatatacatgtatatcgaattgctgaaactgaaacgcaacgtactgagttaacaaatcaacggataaaacgccgcccattcgggcggtgtttttttgtgtataaatatcgccttgaaaaaattcgcatcaatgatagaatatacaacgacatggcgatgccgtgttggggcgtcagaacctctgaatatggtgtccgtggtggacataaaaatacctccaactgctggttggagggtggtgatatatcaaaataagcccgctataccatattatagttctgaacctccaaccacctgctttgtcgggtgtttttacaaccaaagggaaagaacatgaaaaaatcta

SEQ ID NO: 808 - DNA, 24617 bp, synthetic construct
  source 1..24617: mol_type = other DNA
  misc_feature 1..24617: note = Synthetic
attaaagaattaaattcaatttcactttcttttaagtttaataaagatttaggttttgctgaaatgttattaaatggagttaatgttgaaaaagaaatcagaacattagaagtttctcaattggtaagtaaagtcgctgcaatttctgaagttagaaaaaaattagtagcagaacagcaattaatgggaaaagaaagaggtattgttatggatggtagagatattggtactgttgtttttcctgatgctgatttaaaattatttatgactgcttctgctgataaaagagccacaagacgttataaagaattgattggtagaggagataaagtgaattttgacgaaatcctttttaatgttcaggaaagagatagaatagattctacaagaaaggattctcctttagttaaagcagatgacgctattgaatttgataattctgatatgggaattcaagaacaatttgagagaatttgttctttagttgatagaaaacttcaagagatctaaaagtttacaaacaagtctagccctgattgaagcatttgtttgagctcttttttattctttttcagaataaaaaaagcgagtgcgaaaagcaggaaatagcttcaaaaaaaattaaggaatattcaaatatttatgtgtttgtaaagaaatcttccatttaggatttttcattacataatctacaatttgttccgtcattttttcttttttactccattctggttgcaaaaataattgacattttttacccacttttgcagcttgttcttcagcaaaatcaaaatctgatttattatggataatcatttttaattcatcagcttctctgtaattttctgttaaaggcaatttggtttttttaggagatagacaaaaccagtcccactttccagaaaaagaatatgcaccagaagtttcaatatgagttttaatattgttttctaacaacaaatttgtaatataatccatagaccacattaatggctcaccaccagtaattactacagtatctgcatatttttttacattatcaactatagtatcagctaaagttggtggatgcaaatcagcattccaactctcttttacatcacaccaatgacaaccaacatcacaaccaccaactcttataaaataagcagcagttcctgtatgagaaccttctccttgaatggtgtaaaactcttccattaaaggaagcattatacctttatctactaattcttttgtctctttatccatcatttactttcttgcagcaactacttctatctcaatttttgcacctgcaactaaattggctgcaaatgtagttcttgcaggtaaattttccttgaaaaatgtgctataaattccattcattttagaaaaattatcaatattagaaagtatcactgtacattttattacatcatttagagttaaattgtgatgctttaaaacagcttcaatatttagcaaagcttgtttggtttcttctttaattccaccatcaactagttttcctgttttatgattttttccaatttgacccgttaaaaaatacaaattatcaacttgtacagcatcagaaaaaggtgcattttgtctgctttgttcgtgagatttatgatgttttattgttgatgttgatttgtttttgcatccaaaattcatcagaataaaaaaaagaatgaaagtttttaagattgatttcataaagttttgattttcagtataaatataattagattaaaatatgtaagacatgaatatcacagatttacactgatagatatataggatctttaattttctatttcttgaagagatttttaaaataatcaattaaaaataagctagatctctcataatcttctcttttcttatctaagtttccagataaatcatttttttctttttcggtttgtaatttataattccaatataaaaaaacaaaaaagactattattaaaagtaaaataaatagttcaaacatatttacaaatataatcacattttaaaacaattattttatttgtaagtaattaaaaatcaaggaaattttgtacatttgcactcctttttacgagaacagatttgtaaaaggaataaaagataattatttttaaaaacatctctttgcgttttaatcgttaaaaatctgtaaaacaataagatacaaattatttttagacatatgtctgaagaaacaaaaaacactgaagagcaaatagttgctgctgaagtacaagaaacagctactgaagctgttacagaaacagttgaagaaactgtaaatccagaacaatttttagctgattttaactggcacaaatacgaagaaggtattgatgaagttgatgaagaaaagttaaaagagtttgaagaggctttaaaaggaaccatcggttttgtaaatgaaagtgatgtaattgaagggaaagttatcagaattacagatagagatgcaattattgacatcaattctaaatctgaaggcgttatttctctaaacgaatttcgttacaatcaaggtttaaaagaaggcgatacagtagaagtattagttgataaaagagaagattcttctggtcaattagtattatctcacaaaaaagcgagggtaattaaagcttgggagcgtgttaacaatgctcatgaaactggtgaagtagttaacggttttgtaaagtgtagaactagaggtggtatgattgtagatgtttttggaatcgaagcattcttaccaggttctcaaattgatgtaaaaccaattagagattacgatcaatacgtagagaaaacaatggagttcaaagttgtaaaaatcaaccacgagtttaaaaacgttgttgtatctcataaagcacttattgaagctgatattgaattacagaaaaaagaaattattggtcagttagaaaaaggacaagtattagaaggtgttgttaaaaacattacttcttatggtgtatttgttgatttaggtggtgttgatggtttagtacatattacagatttatcttggtctagaattaatcatccaaatgaggttgttgagttagatcaaaaattaaacgttgtaattttagattttgatgataataaatctagaatccaattaggattaaaacaattatcagctcatccttgggaagctttaaacgctgatttaaaagttggtgataaagtaactggagaagttgttgttttagctgattatggtgcatttgtagaagtagaacaaggagttgaaggattaattcatgtttctgaaatgtcttggtcaacacacttacgttctgcacaagattttgtaaaagttggagataaggttgaagctcaaattttaactttagacagagaagatagaaaaatgtctcttggaattaaacaattacacccagatccttggacagatatcactactaaatacccaattggttcaacgcacacaggtactgtaagaaattacacaaattttggtgtatttgttgagttagaagaaggtattgatggtttagtttatatttctgatttatcttggacaaagaaaattaagcatccatcagattttgtaactgttggtcaacaattagaagtgcaagtattagaattagatgtagaaaatagaaaattaaatttaggtcataaacaaactcaagataacccttgggatgctcatgaagctacatttaaaataggttctactcatacaggtactgttaaagataaaaatgataagggtgctgttgtaacttttgaaggtgatgttgaaggttttgcaccaagcagatttttagataaagaagaaggtggtaaacttgcaaaaggtgatacagtagactttattgttttagaattttctaaagaatacagaagaatagttgtatctcatacttctatatttagagagcaagaaaagagaaatataaaagcggctgctaaaaaatctcaagatgctgaaaaaactacattaggtgatattggtggtcttgcagcattaaagaaaaaaatggaagctggtaacaaaaagtaatattttttactagttgatatttatgtgacgtccagaaatagcgttacaaaattaataatttaaaggcagtgattttttatcactgccttttttttctaaagaatttaatcattattatttaggttctacaattaaaaaaacagctgtagaatcaccaatatttatagctttatgccattcaattttttctttgtaataattatatcctgtaggcacatctacttcacgtgttccttttgcatcggttattctaaatttaccaccagataatgtgtatccaaaatgagatgcatggaaatgtttttcatgcccaattcctggaggaaaaacacattttaaagttctaattttattattttcttctaaaatggtacaaacttttttacctttccaacctgcttgtaaagggtctgctaaattatttttttgagtacatgatagaatttgtacaagaagtaaaataaaaaagaataaaagtggcaattgtttcattatgataagtttggttagttgtaaaaattttgttcatttggtaaaaaagtacaaattactattagatgttaatctaatagaatatcaatttcgttatcaatctcattaatcatcttatctactaacttgagagattcatttacattttctaaataatcagttgttataacaattttattttttaaagcgttggttaattctaatctgttttttggcttctcaagttcttttaatatatattgttgaacctcttcatccttaaaaagtaaattttcatcttcaacaaactcaaataaatcaatttctgaatatttatttaaagttttatacacttcaccataaaatacttgactctgatttactttaaaaacgttttcaatttcgtctgtatacaagtaaaaatcaataatatttaaaactaaactatcgttttcaattaacgaaacttgtcctgaagaaagtaattctctataagtattatcaatgtttgggtagctatcagaacgcattaatttgttaatctttaatgataagctatctatacttgtataactcatactttgtttaaaatcgagtaaaatatttttagctgtggttagcgtttcagtataatattcctttaaatttaaaagaccatctttttgattaaacatatcattggcaatattatcaagataccaaatctcttttttggtttctgctcttttttggttccaattgctaaattgaagtgccagaattatcccaataacaactagcaaaatttcaccaacagcataagctaaatacttacttactctattttcttttataagtttttgtcttaattttctaaataaatgaatcatagaatttatattgtagtttttaaagatactaaaaatggaaattattctaaatgattatattataatgaccaagaaaggtaagaactaatactaataattttaaaaaaaatcaatcgaaaaaaattatatttgctaacaaataaaatatcccaatgacattaataaaatcaatatcaggcattagaggaacaattggtggtaaaactgctgataatttaacgcctgttgacgctgtgaaatttgcctctgcttatggagcattcattaagaaaagaaacgaaggaaagaaaaaaataaaagtagtaattggtagagatgctcgaatttctggtaaaatgatatcgagtttggtagccaatactttagtaggtttaggaatcgatgttgtagatttaggtttatcaactactccaacagttgaggttgctgtgcctttagaaaaagctgaaggaggtattattttaacagcttcacacaacccgaaacaatggaatgctttaaagttattaaatgaaaaaggtgaatttttaaatggagaagatggagaacaaattttagctttagcagaaagtgaagattttacctttgcagaggttgatgatttaggctcttacaaaaagaacaaaaaatatttaaaaaagcacattaaagaagttttaaagctagatttagtagatgtaaaagcgattaaaaaagcaaaatttaaagtagttgtagatggtgtaaattctactggtggaatttttatcccagctttgttaaagaaattaggggtaaaatgtattgaattgtattgtacaccaaatggacaatttcctcacaacccagaacctttaaaagagcacttaacagatatttctgaattggtagttaaaaagaaagctgattttggaattgtagttgacccagatgttgatagacttgcaattgtatctgaagatggttctatgtttggtgaagaatatacattagtagcctgttcagattatgttttaggacgtctaggaggaggaaatacagtttctaatttatcatcttctagagccttaagagatgttaccgaaaaacatggtggtacttatacagcttctgcagtaggagaagtaaatgtggtcataaaaatgaaagaaactaatactgtaattggtggagaaggaaatggaggaattatttaccctgcttcacattatggacgtgattctttagttggtgttgctttgtttttatcacatttggcacataaaaaaatgtcttgtaaagaattacgcgattcttatccaagctattttatgagtaaaaataaaattcagttaacgccagaaattgatgtggatactattttagaaaccatggctacaaagtatgctaatgaagatgtaaatacaattgatggtgtaaagatcgattttgctgaagaatggattcaccttcgtaaatcgaatacagaaccaattattagaatttatacagaagcaaaatctcaaaatgcagctgatgtattagcagagcgttttattacagaaataaaagacatagcaggtatttaataaaccttattgtaattaaaataaaaaagtaggctattgcctactttttttgctcttgtctttttttcatgatttctttccattcttcaaaacgatctttgtgcttaaaacgcttgtgagaccataaataaaactctggctgttcctttacatttctttcagtaatttttaagaacttttctgtaatgtcataatctttaaaatcattcggattttcagcaatcaattcaaaatcagtttcataatagccgcgttttattttttttgctctgtaatttattacgactaaatcgtgttttttagctaacatttctgctcctgtatgcacaggcacttttactccaaaaaattctgcccaatgaaatgttttttcaacatgaggagattgatcactcaataatatataagaaccttgagttttggttttaaaattttgctttattaattttataaaattagcagtagttgcaccaacaacaccaaatttctctctattttctttaagcgttttctcaaaagtttcgtttcttaatttgttgtaggctccgaaaacgttaccatctataactaatggtaaactaaaagaccactcccaatttgctaaatgtgcacttactaaagcaacgctttttccttcttttacatatttattaactagttcagggtttttataagtatatctttttaaaatttgtttttctgtgatggcaaaagattttaaactttctgcaatcatatctgtaaaatgcttgtaaaacttctttgcgattaattttctttctttatcagttttttcaggaaaagctacagaaatatttcccataattacttcttttctgtagccaaatatataatatactaaaaaaaagagaaaatcggatataagatataagagaaacattggtaatctagaaatcaaccaaattaaagggtaagtaagataaaacacaattgaattcatatactttatatttaaatgcaaatatcgtatttctgttttaaaacctttattttttagatttttttgcagcttttaaagttttccattcctcaaacctgtctttgtgtttaaaacgtttatgagaccacaaatagcattcaggctgtttttttacagtttcttcggttagccttatgtaagcatcagtaattttataatcgtcaaaatctttaggattttctgctattaatttgaattcagtttcataaaaacctctttttacttttgtagtatcacaatatactactgctaaattaaattttttagccaatgtttctgcacctatatgaaatggcactttaataccaaagaacttttgccaatataaagtatgttctaattgaggagattggtcgctaattaataaataaataccttgttttttatttttataatcttttaaaatagccttaactgttttagaagattcatagcaaacaaacccaaaacgttctctagattgttttacaattttatcaaaatatttattacctatacttgtataagctccatttactttactgtctaaaaccaaaggagagttaacagaccattcccaatttgcatggtgtgcacttacaaaagcaatactttttccatcctttaaaagattatttacgagttcagggtttttgtatttgtagcgttttaaaatttcttgttcactaatagaaattgctttaatagtttctataaataaatctgtaaaatgcttaaaaaaatagcgtgcaattttttttctatcttcaatacttttctctggaaaagccaattttaaattttctaaaactacttcttttctatatccaataacataatatatcaacaagaaaagtatatctgattttatatttaaaactttcataggtagcctagaaaacaaccaaaaaaacggatatgtaaatacaaaaactaaaaattgcatgttctaattttagagtacaaatatcaatatttatatttaaaatgagataggtaaaacaaagagatttcctatttttgtgttatgctacaagacataaatcctatagttttagtaattattattgtaaatgtattattctctttaaaggggtttgatgactattcttttttagataaatacaaatttcaagtaagtagagttaagggtgatgaaaaaataagaatgcttacttctggttttttacatgtagattggatgcatcttattttaaatatgtatgttttttatatgtttagtggtattgtaatatcaatacttggtagcctaaactttttgattatctattttgggagtttgttagcaggtaatttttatgctttatattaccataaagatgaaccttattatagtgcagttggtgcttctggagcagtttctggtattgtgtatgcttgtattttattgtatccaggtatgagtttgtatttgttttttataccaattcctatacccgcatttatttttggagtagggtatttattatattctatttatgggatgaaaaaacaattgggtaacataggtcatgcagcacatttaggaggagctattggaggttttgttttgacacttttaataaaccctgttttatttaaaacaaataccttatttgtattaatgttgtcaataccaatcgttttattacttctttttggtgataaattaaaaaacctttaaacaaaaaagactttattaaataaataataaagtctttagagcgaaagaccaggttcgaactggcgacattcagcttggaaggctgacgctctaccaactgagctactttcgcatggtaaagagtcgtaaatataaattcatttttgttttttacaatgaattatttttaaaaataatatttaaaattgtaaagtctttatctttaatcgataagaattttagaaaactagtacaaacaaaaaagcgagaatcgaaattcccgctttaaatgttttcacaacggaataatccttattgtgaattgatttcaaattgtattctacaaatatatataattaatttcttaaatatttacggatttccataattatatttgatttattttcaataatttaggaaaaactaaaaattaaattgattatgaaaagaatattaggattggatttgggaacaaactctattggttggagcataatagaaatacaaaaagaaagagatattcatacaattcttggggcaggttcaagaataattccaatgtccaaagctattattaaagactttgaaaaaggtgtaacaaaatctcaaactgctgaaaaaacagatagtagaggcactagaatactttatgaaagaagtaacttaagacgtgaaagattacatagaattcttaatgttttaaattatttaccagaatcttattcaaaatatgtagattttgaatacaaaaaaggtcaatttttgaaaggttgtgaaccattactagcatattcagataagttagatggtaatagcaaacgcatatttttgtttcaagattcttataatgaaatggaaaaggagtttagagcggttcataaaaatcttccccaactaaataagaaaggtaaaccatttaaattaccttacgattggactttgtattatttaagaaaaaaagcacttactcaagaaatttctaatgaagaattagcttggatattattaaacttcaatcaaaaaagaggatattatcaacaaagacaagaaaaagaaataaaaaccaatgaaaataaaacggttagattttcaattttaaaagtagctgattttgttgaaacagaagataaagtagaagataaaactttatttgatataatatttaaagatgataaaggaaatatttatggtgatagtaaaaagaaaactacaaacccagaattgtggaagaataaaacagttaattatattataacttctacaaaaaagaaagacgaaactttctctaattcttatagagaagtaaaatcagaagaagattgggaggcaattaaaagaaaaacagaacaagatttaaaagaggaagataaatttgttggaaagtatatatacgaagctattttaaaaaatccccaacaaaaaataagaggagaattaataagaactattgatagaaatttttattttgatgaactagctcaaatcttaaaaacacaaaaaaagtacagacaagaagattggaataataatgaattattcaaaaaagctgttttagaactttatcctaataatatagatcatcaaaaattacttttaaatcagaaaaatggttttacttatttgtttttaaaagatattatttactatcatagacctctaaaaagtcaaaaatcactcatatcaaaatgtacttttgaaaaaagattttatattgataaagaaacaaatgaaaagaaaactgtaaatatcaatggaataccaaaatcgcatccattgtttcaagaatttagaatttggcagttggctaacaatattcgtattcaaaaaagacagcaaaaaattgacgaaaaaataaaattaaatatagacgtaaccgattctttcattaagacaaatgaagaatttaaagatttttttgaatttttaatcaataaaaaggatatcaatcaaccacaattaatatcatattttattaaagataaaaaagagaaagaaaaatatagatggaattatacagatgatgataaaattaaattagaatgcaatcaaactcgtcaaaaactcaaaagtaaattttccaaagatgatttaaataaatattcagatgaattagagataaatttatggcatattaattactctgttacagatgcaactgaatatgataaagcaataattcgattttgcagaaaaaacaaactttctgaagaaacacaaaaaaatctacaaaaattaccaatgcttaaaaaagaatatgcttcttattctgaaaaagcgattagaaagttattgtctttaatgagatgtggaaatttatggtctcaagaaactattcatcaaaataccttaaacagaattgataaacttcttacaggagaatttgataaaacaatttcaaatagagttcgagaaaaatcgataacattagatgaaatttcaaattttcagggattgccactttggttggcttcttacattgtatatggtaaacattctgaagttgatgttacacaatggaaaactacaaaagatttagacgattatataaaaagttttaaacaacatagtcttcgcaacccaatcgtagaacaagttttattggaatctttacgggttacgttagaaatctggaaatattatggagataaacttaacatacaatttgatttatttttaaacgagaatactaaaaaagaagaaaaagtatatgctcgtttatttgataaaatccatatagaaattggtagagatctaaagaatccaaaaaaagtaagagaaaaaatatccaagagaaatacgaaacaaaaagatactaatcaaagaataagagaattgttatatgagtttaaaaactttgatgatgtaaaggaagttataccaacatctaaaactcaatttgataaattaaaaattttcgaacagacaattttagcccaatattctgaaaaagaattaaaagatgaagttttagatggaaaatttactgttgaaaaatttatcaataaaagtcaacctacaactaatgaaattttaaaatataggctttggttagagcaaaaatataaatcgccttatactcataaaacaatcatgttatcagaactatttactgataaatatgagatagaacacgttataccccaatctaaatatttagataattcttttaataacaaagttatatgtgaaacagaagttaatagcttaaaagataatacacttgcttataattttatccaagaatatcaaaatgccgatgttccattaagtaatggaaaaaaagttaccatagtaaatcaatctgattatgaagactttataaaagaaaattatgatggattaaaacaagaaaatttattaagagaagaagtcccaaaaaaaatggttgaacgtcaaaaaaatgatatgcgttacataagtaaagttgcactaaaaacgtttagcaatattgtaagagaagatggtgagcaagaatcaactgtaaaaaatgttttatcagttccaggaaaagtaacctcaatattaaaagcaaaatggggtttaaatgctatttggagttctcttgttgaacatcgctttaagagattaaatagattaatttgtggcgaagaaaatgaaaacaatggcttatttggtaaatatatcaaagatggtggatattttaaaccagaagttcctttagaattaagagatgattttcaaattaaaagaatagaccatagacatcatgctttagatgctttagtagttgcttgtgtaactagaaatcacattaattacataagtaataacaatgcaaaatcaaatataaaaagatatgatttaggaaaaatattaagaaacacaaaagagattgaaaaaacacatcctattacaaaaaagagaacaacacatgtagtacttgcaaattataaaaaaccatgggatagttttacagttgatataaaaaacagtttagaaaaaatagtaattagttataaacagaacttgagggcaataaataaagcgactaattacaatttaagatacaaagatgaaaatggtaattttttccatgataagaatgggaaaaagattaaaaaaagagtagaacaaactaaaggaaagaaaaattgggcaataagaaaacctttacatgaagacacatattttggaataatggaaagtggaaaatataaaggagatttagtaaaaagagaatatttaaacagttcttttacaacaaaaaaaataaaagatgttgttgatgatactgtcaagataattcttacaaaccatttaaatcaagagaaattcaagtaccaaaaagacgaaaaaggaaaaaacttaaaaccaaatgaagtagctttttcaccacaaggcgtagaagatttaaacaaaaatatagttgaattaaataatggaatttcccatcatccaattaaaaaagtaagagtgagatttgctaaaggaaagcagttttcaataagaaagtggacagatgataatgataatttaatcaaagagacaaaatttgtaaaatctgcggcaggtacaaatttatatttctgtatttgtgaaaaaaatggaataagaaaatactatgtacctacttttgaagaaattttagtaacacaaaagttagaacaagatttaaaatttgaagaaaagaaaaatgtaccacaaaggcatccagattttccagattttaatttaaaatactatttacagcctaatgatttagtttatttaccgaaagaaaatgaagaagttaattttgaaaatttatcaaagaaccaattagaaagaatttatgtttttaaagatggaagtggtacaactgcaaattttgcacctatgttatcagccgatgttatttataatatgaatgataataaaaaaagaaaatcctttgcatctgaatatggattaaatatagataacttgataaaaaatgaatatggtttaaatagtccacaacttaaaaatcaaaactcaatagaaggtgttcagattaaatctatatgttggaaactaaaagttgataaattaggaaatattataaaagtcattaaatagatgataaaaagaactatctacatcagcaatccatcatatttaaagttaaaagatttacaattagttgtacaagaacccaaaaccaaagaaatcaaaggaactgtgccaattgaagatattgcgttgttgatgctcgatcactatcaaataacgatctccaatcaagtattagtaaaattacagggcaataatattgctgttattacttgcgatgagcatcatctcccttttggtttgatgttgcctttctatggtcattcagaatattcagaaagaataaaatgtcaattatcagcatcagaaccactaaagaaacaattatggaagcaaactattgagcagaaaataaagaatcaagaaagtttactaaaactaaacaataaagtttcagaacctttagctgaatacaaactgaatgtaaaaagtggtgatacctcaaatagagaaggaatggctgcacaatattattggaaacatttgtttgaaaattttaatagaacacgttttggggaagaacctaataatttattaaattttggttatgctattttgcgaagtatcgttgctagagctctagttaatagtggtttgttgccagttttaggtatttttcataagaataaatataatccctattgtttggcagatgatattatggaaccatataggccgtttgtagataaaatggtatacaattatattcaagagaattattcttttgaattgaataaagataccaaagcatatttgttaactattgctacgcaagatgtactaatagatgggttagaaagacctttatttgtggcagtttcaaccacaactgcgagtttatacaaatgttttacaggagaattacgacagattaaatatcctgaattagattgaaatgtctcaaaacagatttagtgcttacagaattatgtggatattagtattttttgatttaccaaccgaaactaaaaaagaacgaaaagccgctaatttattccgtaaaaaactgattaaagatggttttacaatgtttcagttttccatttatttacgccattgcccaagcagggaaaatgcaaaagtacacaccaaaagagtaaaattgagtttaccaaaacatggaaaagtctgtattttagaaataacagataagcaatttggaaatatggagttatttcatggaattaaagaaatcgatttgccacaaccaacccaacaattacagcttttttaatctccattgtcattgcgaaagaggaacgattgaagcaatcttatgtttttagacacatcttaaagccattatttcgagcgaagtcgagaaatctcgtttaagaaaattagaattaaaaaaaatagaaaatttaataagtaaacaataaaattattaaactttcgtaatccaaaaaaacaatcccaaaccactgattttattcaatattttgggattgaccttgtgattcctcactaaaaatacaattttgaaatcaattcacaacggaaattctttactctcttttttaattctacttgtgattcctcactaaaaatacaattttgaaatcaattcacaacagacataatatctaattatagtacaaaggtcttgtgattcctcactaaaaatacaattttgaaatcaattcacaactatcatagaacttttggagagtatcaaacgcttgtgattcctcactaaaaatacaattttgaaatcaattcacaactttctatgtctatacaactactctcaaacacttgtgattcctcactaaaaatacaattttgaaatcaattcacaacacgtttgacatttttaaaaattaattgagtcttgtgattcctcactaaaaatacaattttgaaatcaattcacaactccaattaccttgatacctcttggcaaccccttgtgattcctcactaaaaatacaattttgaaatcaattcacaacataggcatacttactgtttgcaagtctgttcttgtgattcctcactaaaaatacaattttgaaatcaattcacaactagtacttgtacgctaataaatctattctgcttgtgattcctcactaaaaatacaattttgaaatcaattcacaacgctgatagcttcttactgtataaccaatcccttgtgattcctcactaaaaatacaattttgaaatcaattcacaacattacagtgtcgaaccatgccatttggtctcttgtgattcctcactaaaaatacaattttgaaatcaattcacaacacccaagacaacccctctaatcatgaagaaaacttgtgattcctcactaaaaatacaattttgaaatcaattcacaacaaagccgaagacgtatcaacacctattgaacttgtgattcctcactaaaaatacaattttgaaatcaattcacaacaatgaacgttaaagctactagctggtcgtacttgtgattcctcactaaaaatacaattttgaaatcaattcacaacactacttctatcattactaaactataattacttgtgattcctcactaaaaatacaattttgaaatcaattcacaactgattgcagatattgacaatacagctgtttcttgtgattcctcactaaaaatacaattttgaaatcaattcacaactggattaactaactatatgtggttacttatcttgtgattcctcactaaaaatacaattttgaaatcaattcacaacgttgtaatccttgcttatgtgctttccaaacttgtgattcctcactaaaaatacaattttgaaatcaattcacaacgcttaagtatctaacaaaaattgaaccaaccttgtgattcctcactaaaaatacaattttgaaatcaattcacaaccagctgttgtgtcattctccttaatagcatcttgtgattcctcactaaaaatacaattttgaaatcaattcacaacaacattattttagcttctaaacctgattgtcttgtgattcctcactaaaaatacaattttgaaatcaattcacaacaatagcccacttcaactaaaaaaatcattacttgtgattcctcactaaaaatacaattttgaaatcaattcacaactagttaacagtacatataggtttaattattcttgtgattcctcactaaaaatacaattttgaaatcaattcacaacacaaaatcgttcttctataatttcatctaccttgtgattcctcactaaaaatacaattttgaaatcaattcacaacgaggtactggaggggatatagaaaaagcgtcttgtgattcctcactaaaaatacaattttgaaatcaattcacaacatgtcagcatggaaagttacgaatggtgtacttgtgattcctcactaaaaatacaattttgaaatcaattcacaacatagtattaaatctatattaaaatctccatcttgtgattcctcactaaaaatacaattttgaaatcaattcacaacatattgatggtagtgaaatactaggtcatccttgtgattcctcactaaaaatacaattttgaaatcaattcacaacaattcaattggtttatcttcaaacttatagcttgtgattcctcactaaaaatacaattttgaaatcaattcacaacactcgcttggctatgagcaagggaaagagacttgtgattcctcactaaaaatacaattttgaaatcaattcacaacaaaccaaaagaatagaagctaatacaaaggcttgtgattcctcactaaaaatacaattttgaaatcaattcacaacacacttttcgctaaatcatcaggatctaaacttgtgattcctcactaaaaatacaattttgaaatcaattcacaacataatgcagagtggtatgaagtaagagcttcttgtgattcctcactaaaaatacaattttgaaatcaatttataactagaaaatgctagtaattttgagagataatatccaagaacaaacttatagagtcaaatctgacgaagagattaaaacaaacaaataatcaacttaaatattgcatttcttttttgtttggataaatgaagaaagaattctaaaataataacttaagcttaacaaaactacaaataagaatagtaagtaaattaaaaaaagccatgttagacacggcttttttcatagcgaggagcagatttgaactgccgacctcagggttatttatcaaataaaccttttacttggattataacaaatttgaattgaattactttttaacttaaaattaacgtctacatcatttttactttagaagtaattaatagttttacactaattgaattgctaaaatcacaaacatattaaattttcttaagagataggataaattttttcacggatgatatttgtcatttttacaaaagaattctttatttaagtttgttcaaacaaattgctaatcttaaaaaatatatctatgagaaaaataattttttcttgcttcacaattattttgtgtagccaattttctaatgcacaaggagatggttattatggagataattttaactcaaatatgtacactgctacaacagttattggaggtactccacaatctcctgatatcacagcgtttcaaaaagtaaattttattccagtaagtaactatacaggtagagcgaatatatctattcccatatataccatttcttcaggtcagattagtgtccccatttccctttcttataatacatctggtgtcaaggtagcagatgttgcttctagtgttggattaaattggagtttgaatgcagggggagtaattactagaattgtgaagggaatggatgattttaaaaagcctaatggaggttcatatcctggagcaccacacgaccctgcaggttggttagggtataattatccaaatcttcaaagtactgccgctcatacaggttctccaaatccatatggagatccagagcctgatctttattctgctgaagcgcctggtctatctactagatatattcataaaaaggatttggatcccatagagttagaacaccaaggaaacataattgatgagacattaggctatgtgtctagaagctatataaaaggaaatggttcaacggacaatgtatcaagatttggttttatagaaactaaaattacgagtattaatggattggtatatacttttggctctcctgaaataccatttggtttttacagtcaaattaactcttacaggttagataaaattgaagatcctagtacaaatcaaatgattgactttgaatatgaacaatattcaaattacaatactgtcagttatatgaataataagcatccttatggtggaggagctgactctgatgtttcttctacatcttatgactcttcattttatgtaacgcatcgattgaaaaaaatcatccatgaacttggagaggtggagtttatatatggaataaatagattagataaaacaggagaaaaagctttaactgaaataaaaattaaagatcaaaatgggtatactgtaaaacatataaaattggctcatagctattttcaatctccagtagatatcaatacagaacaaagtaaaaggttacgtttggatagagtttacgaagttgctccagaccaaactgaattaccaggtcatacttttacttatgagaataattcttctttttcaatgcctcctagaacttcttatgcacatgattttttaggatataataatggctcttatagttctggtaatagtaatccagttccaaagtattattttaaaaataacaagattactcctttttatgatagttctgcaattgaattgacaggtaattattcattagaagcagatgttaattacgcaaaaacatattcattaattaaaattaaatttccaacaggtggagaaaatgaatacgagtatgaattgaatgaatttaattttaatggaattaagcaaggaggtggactacgaattaaatcacaaaaattattggatgataaaggaaatactcaaattttagattatacctatgaaaatgggggtatcattcaaatgcccacttttgctattttcaagttaaaaacaggtgcaacaggaagtggagctaatacattaagtcaattaacatcaagattaggaattgatactttttcttctgcattatctcaagttgaatttacacaaggagcctttgttgggtatggtaaggtaactgtaaaaaataggatagacaacggatatgttgagtatgtctacagctcaccaattacaacgtataatgttacgtcaacaaaaacgtatgatcatcattttccttatagtaattcatggcagcaactagctccgtcaatgttgttttatgatagagatttcttgaggggtaaaatactttctgaaacaacatatgccaaatctggaaagaaaagatcctcgaagaaatatacctatacgactaaagaatttagtaaattaagtttagaatatttaaataagtcttctaatgaacctttagccaattgttataatttaaacggaacatataaacttaatcaagctgggactacttgtggaggatttacagaaaatatagatttaaaagtacagagagatttattaactaaagtagttattaaagactatcaatctgacgaattaaatacttcttctttttattatgataacgcacttcatattctacaaactattaagaaatatgaatttgatcaagaaaaccctttattggtaaaagagactaaagaagttgtaaaatgtgtttcaaacgatcaaagtggaatagatagtcaagaatgttattgggttgtccaaaatatggatagagatcataaagtaattaaagaaatagaatatcccatagttgacgggcaagtaaatcaacttcctttttcaaataatctagttcaaaaaaatagactatcaacagctttaagaataactgtcaaaaatcacgataatgaagtcttggcaaaagaagatcacctatacaaagattttggaaattctttatatgctttagaaaaagtaaattttatagcacgtgatggaagtattacagaatcagataaagtaacaattcgtgatagtaaaggaagaattgaagagtatgttagaaaggatggagtttatgttacaagaatttatggatatgattcagcataccttattgcagaaattataaacgcatccaattcagcagtgaattttgcactacaaaacaatattcaatcacaatttaatcaaggcacttttagtaatgacactagtataaagcaagtaatgagtgagttaagaactgcattacctaatactcaaattacctcgtatacccataaaaaattagtgggagtgatgaatattacagatccaaggaatagaacaataaactatcattatgatcaatttaatagattggagaaagtaacagatcatgatggaaatataataagtaaaaacgaatacaactataaatactaaaaacgctatgaaaacaaaaataataatttttaccgtatttgttttttgttcatgtcttttatcggaaaatagttttggtcaagaagtagagcaacaaatcactacagaggatttaataggaaaatggaaattagacttcaataaaacaattaaaaaagtaagaattgaagaccctgaaataagtaataaaattttatcaaaatcgttaagaagaaatcgtttatctaaattttataagaataaaaggttagtttttacagataacggcacattaatagaaaagaataaaattattcccaataaagagtttaagtggtttttagaaggcaataaattaaatctcacagatgagagagggaaaaccttaaaatttaagatcagaaaaatatcttctgaacaattggttataaaagctatttataaaaataaaaaaaggaggccattatttttaattcaatattttaataaaatttaattgctaataagatgaaaaaactaggaaaaggaggttataagaaaagtttgttttttggagtattgttttttacactacatctattctctcaaacaacaacagaaagttatacggatggagatattactttatctggaccaacaaatattttattgaatactagttattcctataatataggcgacgctgtctacaatggttgggtagcttctgcagatattgaatggacaattactggaggagatattgtagataatggtacaaatattaatacgactaatgactattttgaggattactatgggcaagaaatggcaaatattaatattatatggagagctacgggtctcaaaagagtacatgccatttttatagattattttggacaaactatgtatcaattagcaatcgatatcactgaacctccaaacaatggtactactatactcaatattaatgagaattacatatatacagtgactccaactgtagcaacaacaaacgtcacaagtttaaacaattcagagaaaatagaaaacataacttattttgatggtttaggaagacccattcaacaaataggaatccgacaaagtgcatcgcaaaaagatattgttacacatatgacttatgatgatttaggaagacaatcaaaacaataccttccctatgcttctttaagtaatgatggttcatacagaacagacgcattaatcaagacaaacgcctattataatactaacgaatttcaaaatacaatcaatccatattcagaaactttatttgaagaatctcctttaaacttgccaattgagatagctgcaccaggaaatgactggaaagagggaattaataacgaacataccattaaaaatgaatacaaactagtagaaaattcagataatgttcatgttttagaagctaatcatacagtaagcggcaatcttaatttggtaatgaaagggatgtacactgtttcttaccaaaccaatcaggtaggtgatcaatatgcaaagacacctacattacataaatttattacaaaaaatgaaaattggaaagcttcagatggaaaaaataacacagaagaagtttttaaagattatagaggaataacagttcttaaaagaagttataacaatggaatagctcacgatacttataatgtatatgataaatacggaaatttattgattgtcattccacctaaagtaactctcaataatggagtttctgcaacagaattatcagaattatgttatcaatataggtatgatgttaaaaatagattagttgaaaaaaaaataccaggaaaaggctgggagtatattgtttatgataaagtaaatagaccaatcttaacacaagatgctgttcaaagagctaaatccaacaaagaatggctatttactaaatatgatgcttatggaagaactatatatagtggtttatataaagataatcgctctagaataaatgtacaaaattcggcaaattcttctaattcagttatagaaagtattactactggttcagggttgtattattacacaaataatgcttacccaatcaatgttccgtggtatgacgtttatacaattaactattatgatgactatgtatattgggggggagatacacacaacccacaaacaaactattatggaaaagcactaacaaacaatactaaaggattgtctacaacttctaaagagtttatattaggtggacacggatggataacaaccataactggatatgatgaaaaagctcgccctatatatatatggacaaaaaatgactatttaaacacaactgatattgtagaaagcaaactagatgattttactggaaaagttctagagattagaactacccataaaaaagtaggtaaatctgatattataattacagataaatttacttacgaccatctagatcgactattaacacaaacacaaaaaataaattcacaagctgaagaattaattgtgaataatgaatacaaagagctaggagaattaaaatcta

SEQ ID NO: 809 - DNA, 24614 bp, synthetic construct
  misc_feature 1..24614: note = Synthetic
  source 1..24614: mol_type = other DNA
tttcaagggcttaaaaggaataatcacatatgtagtttttggttatttaggaagccagtctatggggggaatctactttctctactttacgatttttattgcggtaatggcgctggtgggaccatttatcaattattggttcttcaagtttcatatcgagaacgatgaattcatcattaacaaaggttggctcaataaggagaaaaaagccgttcctcttgagcgcatccagtccatcaatatcaatcagaacctgatccagcgcattttaggcattgccgccctggaagtagaaacagcagggtcaaaggctaaagagcttgagataccaggattacagcgcagctttgcacgcgagttgaaaaattatctcaatgagaaaaagcagatcgtagtagatgaattagaaataaaaacggaagactctcaatcgtctgagaaaccagaaggagatataaaccctgatgctactgaatcacacgtcagtaatcaccagtctagtatggagaagaagacagaaagtctcgagattttgatgcaactcgactttttagatttgctaaaagtaggtttcactcagaatcacctgcgtagcggctttgtggcgctgggtgttgtatcgggattctggtttcaaatcaaagatcttgcagaagattactttaaggaatacacagatcaggtaagtatcgagagtgcggtgcgggctgccaccctgcaattgttgattgtgacactcgtcgcgtttctgattatatctgttttagtgagtctggtcacggtgatcaataaattctggggattcaaaatggttaagcaatatgattatcttgaagtgagtatggggctgtttaatcgcacagaaactaaagtaccgctcaataaaatccaattgttagaatttcattcaaatccgctacgtaagcttttgggttttcacaccggtaaaatttttcaggctcagagcgagaacaatcgcacaaccagcattcaggttcctgcttgtaagcgagaacagatcttaaggcttcagtctctgatatttggaaaacttgttatggaaaatgcgcccgtgcagctgcattctaatccatggtcccatctacggttgcaattttatattactggagttatcagtattgtggctatgatctgtggatattattttgatctgttatggttgatcgtagcagctggtattttcttaccctatactttgttcatggcttatcagtacgggaaatatagccgggtaaatcgcgatgatgagtacatcgttttctataagggttggctcttcaacagtattatcatttcgcccatctataagactcaagctgttgagaaatggcgcagtatatttttaaagcgtcgtcgggagtgccacattaatatccatacggcagcaggttctcgcggtttgaaatatcttaaggacaatcaagtatcccagtttatcaaccaagtgaataatcaggtgcttgtggaaaataggccctggatgtaaggttgagtggcttgtcgctgtaccgctttcgcgaaagcggaaaaattatagagaatataagtgcataacaactttagaatacccatcagaaacgtgagaatatttagaattaatagccacgcgctcaatgccaaatcattttacgaaattcaaactcgtatctaagctctaatctatacacctaatctacccaaaaaatgttctcaaaagaggaagcaaaacaaataaggcaggatttctggatcatgtttggtaaacggtaccagcacaagtggatgttgtacaataccggaatcaaagatgtgaatttcaaattctcatttgaaaagggtagagcgatggtctcaatagacatcgagcatgctgatgagatcttcagagcctattattttgaaaaattcacctccttcaaatcgattatgtttgatgagatttctgaagatctaatatttgatgagcattaccagctagattcaggtaaggaaatttctagaatctatcttttcatggacggcgtaaaaatcatgcgcaaaaccgactggccacaggtttatgagttcttttatgaaaatatgatggcatttgaacgtttttatctggagtacagggatttcataaaggaataagtctagtcttttaagagttttggcttaaaggatttttttgtaaatattgtaatttatcttataagttccagtcatctaatttatcacttaaattaaggctgcaagcccaatgtttttcattaagatataggtataatttctatatttaactatgttttaaggtttagggaatgcgtagaattggctcctcaacatttttattgttgatctttttattaataacaaccagcttggtaggacaggtaaccacaaaacctgactcgctgcgcgcagtaataaagagtttaccagagaataaaaaacctttggatctcatgcgcctatcattttattacgctgggatcaataacgattctgctttatatctggcggatcgcgctttaaaaatctccaaaaaatatcgagatagcattaacattattagagcgcatcgcattaagggtgttgcttattttgaaataggaaatacagattccatgatgcttcattataatagaggagcagagctcgcccttaagagtaatgaggaactacagtacgctcattttaaaaataatataggcaaccatcttctctcgagaagtgtctatgacaaggctatcgagaatttctatgaggctaagcgggtttatgacgtttatccagatctctatgatcgcgccatgattaataataatctgagtttagcttaccgagatattaatgattatgataaagcactcaaatttgcgagactcggtcttgaagtcaggaaacaaataaaggatagtgtggacatcgcaaactccctgagcaatatcgcatccatctatattttactcaacaaaccagaggaagcgaggaccgcagccgagaaagctatcgatatatcacatcaaataaatgatacgcgacacatccccaattcctacgttcacatagcatgcagctatcgtattgagggcgactgtgagaagggaatcgaagcttataaaaaggctctggaatattctaccgtgaatgaaaatcaggcaattgaagcggaaaactataattctattgcctacgccctctatgaatgtgatagatacgatgagtccattgaaaatgctgaactttcattaaaactaagcagagagctggatttaaaatatacgttgagcgaagtgtattacatcttagcgctcaatcacatccaaaaaggcaatagtgaacttgccattgagtttacggaaaaatggaaagaacaatacacattggtttacaataatgatcttaatgatgttattgctgaatctgaggtttcttatcgagtagatgactacaaaaggaaaatagagctcgagaaacttaaaaaggaacaagaggcttataagaataaagtactttggtatgccatagcgggaatactagtgattgtgagtttattaattttctttttgtaccaattcaaccgtcgcaagcatgaaaaggcccttgccgcagaaaaggacaagaactttaaggctatcatttatgcagaggaaaaggaacgtcagcgtatcgcccgcgagctccatgacgggattgttcagcaattgggagcgacggtaatcaaagctcaaaacacactcgtcaagataggagcggagcaaaatgcgcaagcccagtcgattatcacagatatagaaaacacgggaagggaagtacgtgatctatcccatcaaatgatgcctagagcactggagtcaggactggtaacggcattagaggaattatttgcaagtaccttttcaccactacaaatcagctacgattttgagcatcgtgacgtcgagaataagttgcccgataatgtggagataaccctgtatcgcatcgcgcaagaactggtgaataatatcatcaaacacagtcaggccacatccatccagattcaactgtttatcatggtcagcaacgtgatattcatgatggaggataatggtgtaggcttgaaaaagtcttctagtcagggcataggaatgaaaaatatcaagactcgagtagatctgatcaaaggcgatgtaaaatttaatatcttggaaccaggaaccttagctacgataaaaattccgcttgatgaaaactaaagtcctcattgcagatgatcatccgcttattgcagaaggcgttcagaaaacgatcgaccagagcgatcgttatgaggttgtgcaagtggttgaaaatggtcagttggttttggactatctagagaacaatcaggtggacatcattttactggacatagaaatgccggtgatgaacggtattgagtgcgcacgtaaagttttgcgagatcatcccgagcaaaaaatcgcgatcctctccttacatcaggacatctacacgataaaaaaagtccatgaatcgggtattaaagggtatatgcttaaaaccattccacctgcagaattattgcatgcgctagatacaatcacacgtggaggtagacattttgatgcggccataaccgagaaactgctagatggcaaaaaaggcaaagccgaaacccgatttgatgaacagaaaggactcatttctgaactgactgaaagagagttggaaatcatcaagttggtttgtcagggcatgagtactaaggaaattgcagaaaagatttttgtaagtttcaagacagtggacagccaccgtaccaatatcatgcgcaaactcaacctcaataacgtcgtatctctcgtacgttttgcacttgaaaacgatttatgttagaacataatctggtttgaaaaacccatttcaggtaattccctgagacgattcaggtaattcccctatttcaagggtatgatgatggttctagttttggtgtatcaacactaaaacacacatcatgaaaactttattcaaattcaaatcctacatttttctagcgctttgcctcactgcaatgcctgtaatgcaagctcaagacgctgcagatccagctcaggctgaactcgttcatggtttttcggaaattctcgtagaactattcaaaaatgaaaaatttaaactagttgctactgaaaaaggacagctgagtcctaaacaaagtacgggtgaggtggtgttcaaacaaaaaaagaaccgtcagtatgtatttgtacttgcctatcacgctgacagaccagtaactccgttaattgatgtttctaacgaagacaagtctcaaactactaccctcaacgatttcttttctccttacacaatgaataaccatcccttagttcctaaaaaagttaaaatgctcaaggcagaatttggaagtaatgtgaagggtaccttcacttttgaaatattcaacagttctgatgctggatatgcagaggttatggtctttgagaaaaagatgtagtgtatagtttttacgctttcgcgaaagcgaaacaattcacaaatacatttgaaaaaaaatcatgaaaccttttcatacattgcttttagctatactgatcttgtttccaacgctcgttgtaagtcaatcaatatctactgatcagaacaatttgatccaagctatcaatcagatactggatgaaaataaaatccctaacattaaaaacctggatcgcgatctgcagtcctacaaagacgattttgaatacattaaaacactttccagtaagatggaacctcattccaaaagtcttgctcagagcacgggttgggatcaatttatcattccagagagctcgctcacgggttaccgttgtgtcaagggcggctgccgggatggtgatggtatccttgaaatagaccgcaaaaacatttactatttgggacaatttgcagataaaaaagcacacggcgagggcgttctttatttcgtcgataacggttttctaaaaggaactttcaggaggggttttctacaagccgtgatctttattggaacaaaacttcaacttgcccaactcacggcagatagcggcgcgctcagaacggcaagcaactggtatcacaatgattttgacgccctctataccggtgctataaacaatcagctggaatttgcagaaaacaatttcaaaaataaactgcagagtacatatatggatttaaccctgagacaggatgatgatggtaaggttacttcattttttggaaaacttgctgatggtcaaggaaatatctatgaatctgattttaagccagatctcaaacctgcagatggaaagttcaagtggacgcgacccagcggtgagattgtagagtcaaaaatggtaggaggagagatgcagcgcttcaacgtaattattagagatgataaaaccatatattttggagaggtagatgaagagtggcggcctcacggcaagggatttgcgacggtagatggtaagcgcttgcctgacgagcaatggaatcatggcaatcctgtcgcctcttcaaaacctggtaaaggtccggaaaaaatttcttaccgtgagaaagtgatgacagtaatgaagatgctttgccgcaaggaaggctggagtaaaataaaatattgtaaagttcctgaaggcaactatgtagatgtccactctacaggtaataataaaattatgatggtcaacctgacagagcaaccccagaaattcaaaatcagactgttgtttacaaatatgtgcgatgaattctcattaaaaaaatggcagaccattacgataccggcaggtaatccaaatgatttaggtaaaagtggtagaagactttttaaactttgtctaccacctgattccagcaagagctatggtattgaaatcaaaggagaggatgctaagaatgtatattgggtaatcaaaaaatagattttctcaattcaccctatctcgctcaccctcactaccaccatcgcgatttctcaggtctttgacgtcactcatcccaaaactacaactcaagtaaaagcgcgcctgtctggaatcgccgcctccggcgccaatgatttgcaaacctgggaattcagtggtggcgttccagtaagatgtataaagcgcatcgttaaggctcagttttgcggtccagttttcccattttttctgcaatcctagggtcagggatcccagcggatcggtctggtaggttcctccctatacggtagggccgctataccatccagagatttctgcggtccacccgcttgtcgcgcctgccctgagcgaagtcgaagggaaagcgtaattcaattgagcataaccaccataggtagtctggtcgatgctgatgaagcttgagtcagtagagttgtactcatcgtgcgtaaaataagcactggcatatccattgagttgctcggtaattttaaagggtgatcccacgctcaggttatagatttcttgatcggctacgtcttgactgatcaaaaagttcctgccatcaggtatcggctctgtaatccgggcaaaggaatcggtaatataactgtagctcaagctggttgtgagtttgtacttaaaagtatgcgagagcttcaatttgtccgtatattgaggttgcaaaaacggatttcccctacgactgctcagcgcaacgccccaaggtaagatgaatagtgctatatgttttgaggttttgatttcggttctatttagtttgaaagccccctccctgcatccggcgaggaacgagaggaatgcaaattgggggtgttcgctggattccgtttatgtttttagaagagctcataagaaaaagaaatattgaaaaaagtgatcatggtagacgacgaagacgcgggtcgcaagctgatctcccaatacctcgcgcatcatcctgagatgatcgtggtgggtgaggcgaataacggtgtagatgcggtcaagatcatcaataaattctcaccagatctagtctttatggacgtgcaaatgccgggcatgactggctttgaggttttggggtacctggatgaattgcccaatatcattttcagcacggcttatgatcagtatgcgttgcaggcttttgaggttcatgcattggactatttgctcaaaccatacacacgagagcgatttgatacggctctggcaaaagtcaataaaagcgacaccgtaaccgtacttcctctggctgaggaacaactcgccgctaaaaaagactatcccgatcgtgtcatcgtgcaaaaaggaagtaaatatattacgatctcaacatctgatatcgagtacatagaagcttatggcgactacgccaaaatcttcaccgcagaggatcagctactcagtaataatggactcggagcattggaggataaactcgatcccaaagaatttatgcgcgtacaccgcagcaccattctcaggctggaacatgctcaagagattagtaaaatagggaagggctttgtgatcaccaccagcagcggtaaaaaagtacgggtaagccgcagctatgcgcaaaagattaaggatttgatggtgtaagattgaatagggtttgctccataatttgtgtatgaactcttaaagccatcaagcttttgatcacattcaaattgcgtcagaaattcaatgcaagctgactcaaggtttcttcttcttgttaaagattctgtagaaaataaagagtcccgcatagaaccccatgatgaaaataagaaatgtattgtccataactgcgtcttttatagcatacgtgtcattatgaggaaaatgttacacttttagccaactaatatttttgaaatcagcgtgttacccacgttgatccaaaatcccatccagcaactttttcacctgtacatcgccataaccgtagataggctcgcgtttgcagaattctctgaagatagttccaaaatcagtagtgttgagatcgtccatgatctggaggagcgactgagtgggtcttccttgatttccagcagtaggaatgcgggcgatatgcgcctccaccgcagcgggtataaatggatgactgttttttaagcggtgctcggttttggccaggttatccagatcattcttttggtagaactcccaaattcccgccaggtcatccagtgcagtcagtcctgttttacgctcaaaaacttccaccaattctgctgtggtcaagcctccaaatccataaggcgtatgcgccgcagggcggatcaagtagagttgcctatcgcgatgcgattgccttaaaatatggatcacaaaccaaaaattcacttggcaaaacaaatcatcttcaaaccacaaatacaccgccgccggctctggaatgttttggatttttacgaattctggaacagtgttttccaaataatcctgctcagtaaaatctgcataattcttgctaatgaatgccgcccgctgcttaaaaatgcgctcaggctgtcaccctgcacaggcccatctaccagacattcccgaccaacgatgatcttccctggaatcgttttgggaaattgctcttttaaagcatcgccgttgaggatgtggtagtgggtgttcatttactttctaggtaaaattttgataattaaagatagtgcaaactgttttttcaataaccaacctttaaaatgaatgaggagagcataaatactaacaatttgattttattaagaaaagctttacatttatgcgaccattaacgaaatccccctttaaaaaatggctgaactgcattcgtgaatgtggtaagcttagttttgaaggggtttttgtttagcgatgggtcaaaaaagaaagcgacccgtaaaggccgctttaaatgttttagttcgcaatttgctattaacgatttgagctcatgaaacatttaagcaaaaaaaatgcctcccagttgaagtcgagaggctaacttaaatgttttcacaacggaataatccttattgtgaattgctttcagattgtaaagatataaaaactaactaactacacataatatgaaacgaattttaggactggacttagggacgaactcgattgggtgggcattactcaactatgagtttcaaaataacaatagctatataatcgattctggatcgagaattatcccgatgtccaagagggttcttagcgatttcgaaaaaggagttacaaaatcgcaaaccgctgagagaacggatgacagaggcacacgtcgcctttacgagcgaagcaatgtcagacgggagagattacacagagtcctaaatatattagactattttccaaaccattattccaaccttgtcgattttgaaagcaaaaaaggtcagtttaagaaacaagaagaacctttgattgcctattcaaatgaacgagatgaaaacggaaaacatattttcctttttatggattcatatcttgagatggagaacgagttcaggaaagtacatccttctttaccaaaactgaataagaaaggtaaaccattcaggttaccctatgactggacattgtactatttgaggaagaaaggattaacccaagaattaactaacgcagaactagcttggattttactcaatttcaatcagaagcgcggttactatcaggctcgaaacgaacaagagatatccatagatgaaaataagactgttgaatacaaggttttggtggcgtctgattttaaagagaccgaagaaaaagtggataacaaagttttatataatatcatttttaaagatgaagaaggattggtatatgatgattcaaaaaagaaaaccactaaacctgaactatggaaaaataaagaaacagaatttatagtaaccagcaccttaaaaaaagatggttcgttatctcgtacctatagagaagtaaaaactgagcaagactgggaagccataaagagaaaaactgaacaagatttaagtgaccagtttgtaggaaagtacatatatgaagccattctaagaaaacctactcaaaaagttagaggggaattaatcagaactattgatcgagaattctattttgatgaattagaagcaatacttagaactcaattaaagtatagaacgaatgaatggctagatgatgagatttacaagaaagcagtagatgaattatatccaaacaatcaagaacacgcagaaaaccttttaaagcaaaaggataaattcattcatctttttcttcgtgatattcttttttatcatcgcccgttaaaaagcaagaagtcgcttatatcaaagtgtaattttgaaaaacggttttataaggattcagaaactggggagaagcaaacggtagccattaatggcatgcctaagttacacccattgtttcaagaatttaggatttggcaattaacgcataatctcaagattcaaatgagagaaacagaatcaaatggcaagatattgctcaatgttgatgtcacaaatcaatttcttaaagccagaaaagactttgttgctttttttgaatttctctataataaagaaacaatcactcaaaaacagttggtcgcctactttatcaagagcaaaaaagatcaggcgagttatcgatggaattattccgatgatgacaagctgaaattggattgcaatcaaacaagaccgaaattactctctaagctcagtaaggcagacaaacctaaattaacagcagagttagagttaaaattgtggcatatcatatactcggtaacagacaagaaagaatactatactgccatagagaagctttcaaaaaagcaccaatttgaagaggaaacgttcaagagattagaacgtagcccaatgctcaaaaaagaatacgcgtcctattccgaaaaggctatcaaaaaactactggctttaatgcgcactggccaaaactggaaagaggataagattgataaaaaaaccttagataggatcgataaactaattactggagaatttgatgagtccttgaagaacagagtccgtgaaaaggctattcatcttaccgagataagtgattttcaaggcctgccgttatggcttgcctcttatgttgtttatggcagacacgcagaagtggacgtgacccaatggaaaaattcaaaagacctacgtgattatattaaaggttttaaacaacacagtctgcgcaatcctattgtagaacaagtattgcttgaatccctgagggttaccttggatatttggcaagtttatgctgagaaattcaacataccatttgaaacctacaaggatgaaaagactaaaaaggaatataaaaactatgaacgattattcgatgaaatccacatcgagataggcagagacttaaaaaaccctaaaaaggtaagagaaagaatttctgactcaattaataaaaacaagaatacgaatcagcgagtaagaaacttactttatgagttgaagaactatgaggatgttaaagaagtacgaccaaaatccagaacacactttgaaaagctcaaaatttacgaacagactgtcctgtcactttttacagacaaggaactggccaaagagaccttagaaggaaaacttaccgtagacaagttcataaaaaaggatgtaccaacatctaccgaagtactaaaatataagctgtggttggagcaaaagtacgtttcaccttatactcaaaaaataataccgcttagtgacctgtttacctcaaaatatgagattgagcatatcattcctcaaggcaagtttttagacaactcattcaacaacaaagtaatatgtgaaaccaacgttaataaactgaaagataacagaacagcttatgtctttatccaagagtttcaggaaaccgaggtgccattaggtgaaggtaagagtgtttttattccaagccaatctagctatgagaagtttgtaaaagataattatgacagtaagaagctatcaaatttgctcttagaggaaatacctcaaaaattgagtgagcgcgaaaaaacggatatgagatatatcagcaaagtagcgcttaagatattcagcaatattgtcagggaagacggtgagcaagaatctactgttaaaaatgtattacctgttgctggtggggtaaccgcaaagttgagggcaagttggggtcttaatgcagtttggagtgagctcgttgaagatcgctttaaaagactcaaccgattgatttgtggtgaggagaatgaagagaatggtttatttggtagtattaagaaagatggaggattcttcaagcctgaagttcctcttgaactcaaacctaactttcaacttaaaagaatagatcatcgccatcacgccttggatgctatcgttatagcttgtgctactagatctcacgtcaattacatcaacaatcagcacgcaaaagaaaatgcaaaacgatatgatctaggtagaaagcttagagaaacaaaagaaattgaaaaaaccgatgttcttactggcgagaaaacaaaacatacagttttagcagactacaaaaaaccgtgggataattttaccgcttccgcgaaagcgagcttacaagttatcgtaattagctttaagcaaaatctacgtgccattaacaaagccagcaattacaactggcaatacaagaacgaaaaaggagagtacctctatggcaaaaatgggaagaagaaaaaacaatggatagaacaaaccaatggtaaaagaaattgggcaataaggaagcctttgcacgaggacacttattttggactcattgaaaatggtgagcataaagaacatttggtcaaacgagagccacttaatacgtcattcaatgaaaagaaaataaaagatgtggttgacccagttacgaaacagattcttcttaaacatttgaaacaagaaaaattcttgaatcaaaaagacgaaaatggcaaggcgttaaagccagaagaagttgctttttcgcaggcaggtattgcagatatgaacgacaatattttggagttgaataatggaacatttcatcatcccattaaaaaggtccgcttaaaattcaataagggaaaacaattctctatacgaaaatggactgatgaagaagataatcttatccgcgaaacaaaatttgtcaaatcagcatctggcactaatctttacttctgcatttacgagaaagatggggaaagaaaatattatgtcccacgttttgaagaaattatagaaacccagaagctagaacaaaatttacgactatcagagaaaaaaaatgtaccagaacgtcatcccgatttccctgatttcaaactcaaattctatttacaacctaatgatttagtctatgtgccaatagaagaaaatgaggatgttaatttttcaaatttgtcaatgaggcaactgcataacctatatcaatttaaagatggaagtggtacaacggctaatttcattcccatgtattcttccgatactatatacaatctaaaagacaattcaaaacgaaagaattttgcaaaggagtacggattaaattatgtggacttaataaagaatgaatatggtcttggcagtcctcaattaaaaagtcaaaacaccgttgacgggattcaagtcaaatctgtttgctggaaattgatagttagtcgcttaggtgaggttatcaaaattgaaagataatgatcaaacgcaccctgttcttcggcaacccagcctacctcagtactaaaaatgaacaattggttgtcaattatccagatgatgataaagatgaacgcacgacgcccattgaagatctaggctatatcgtattggaagatccacaaatcaccataaccacgagtttattacgtaagttgatcgataataaaactgccgtaatcacctgcaacagtcagcatttgcctacgggcttattacaacctttacaggggcacagtgaacaaacggtgcgttatagacatcagctagatgctagtgtgccgctcaagaaaaacctgtggaagcagactgttattgccaaaattgataaccaagccaatcatctattgagaagaggcaaaaacgctttacggttaaaacgatatgtaggggaagtgggcaactccattcatgacaacgaagaggctctcgcggcagcttattatttccaacgcctgtttgatgacttagagaattttagccgtaatcagaaaggcataccgcccaataatttactcaactacggttacgccattttaagagccgttgccgcaagagctcttgtttcaagtgggcttttgcctagtctgggtatttttcatcacaataagtataatgccttcactttggcagatgatgtgatggaaccctatcgaccttttgtggatatggtagtttatgatatcgtcatatcaggagttgaaatagaagaattgacaaaagatctcaaaagtcaacttctaatgattccagcgatggatgttgttatggatggtaaaaacagtccactgatgaatgcgatgagccgtacgaccaattcgctttgggaatgttacgagggaagtagtcgtaagattctatatcctaaatttcagaaaactgttatgtaaatgattaataaatggggaatttcgatcgacttaatcaataccgaagtatgtgggtaatggtgttgtttgatttacctacagactcgattaaggagcgtcgagccgccacaaaatttagaaagcaattgctggatgatggtttcaacatgtttcagttcagtatctatctacgtttttgtccaagccgtgagaatgctggtgttcatattaagcgtacaaaaaccaatttgccgaaaaagggaaaggtctgcatcatgcagattaccgataaacaatttggcatgattgagctcttccacggtcaaaaggaaactgatactgagccaccaccccaacaattggaacttttttagaatctatccaatatcatgctgagcttgttccctgagcggcgtcgaaaaatgtcgaagagctactgtaggcatctccttacaatcactaaaatgtcagttcgagcgcagtcgagaacgatttgacccctaaaatcatgattctactaaaaggcataaaacaaacatacccagcattttgtgctgggtatgttgtcaaagatcacatcttttggaattctgaaagcaattcacaacatttgagctaatttgcgctctatgataagagttgtcaaagatcacatcttttggaattctgaaagcaattcacaaccacgtggtcagattgatgtagattttgccggttgtcaaagatcacatcttttggaattctgaaagcaattcacaactgattcagaaagtggatcaagaattacttagttgtcaaagatcacatcttttggaattctgaaagcaattcacaacatttaagatgttattaattacatgcagatcgttgtcaaagatcacatcttttggaattctgaaagcaattcacaacacttctgaacttatgatttcttaccgatgggttgtcaaagatcacatcttttggaattctgaaagcaattcacaaccagacccacctaccgaatagctgtactactgttgtcaaagatcacatcttttggaattctgaaagcaattcacaactctaccgcgatgtcttgattttcagtaccgttgtcaaagatcacatcttttggaattctgaaagcaattcacaacattggtaacgttttattagttagtagtttagttgtcaaagatcacatcttttggaattctgaaagcaattcacaactcataccgataggataagttccgactctatgttgtcaaagatcacatcttttggaattctgaaagcaattcacaactagacctgtagatacgacggtttgcattcagttgtcaaagatcacatcttttggaattctgaaagcaattcacaaccgtggtgaaccttacgtttagttcaaaggtgttgtcaaagatcacatcttttggaattctgaaagcaattcacaacttgacgggcgcacgaatggctctacgacaggttgtcaaagatcacatcttttggaattctgaaagcaattcacaacaaatgtcctcatcgaggacattccctcgttgttgtcaaagatcacatcttttggaattctgaaagcaattcacaacaggacagacaacacactacctcaggtagaagttgtcaaagatcacatcttttggaattctgaaagcaattcacaaccctaattctgaagtggtgttgttaggaacagttgtcaaagatcacatcttttggaattctgaaagcaattcacaacgcgttctcaccgtccttggtcagtaataaagttgtcaaagatcacatcttttggaattctgaaagcaattcacaactcaaaaaacgccatgatacctgaatcgtcagttgtcaaagatcacatcttttggaattctgaaagcaattcacaactaatgtcctcatccaggacattccctcgttgttgtcaaagatcacatcttttggaattctgaaagcaattcacaactcgatgttcaacacggtagggttgaaaaaggttgtcaaagatcacatcttttggaattctgaaagcaattcacaactactaacgatagtgctgcctatgggttgcgttgtcaaagatcacatcttttggaattctgaaagcaattcacaaccaggtaatgcctacgatgggactcctgccagttgtcaaagatcacatcttttggaattctgaaagcaattcacaacttgatagagcagctccacgtcccagccatcgttgtcaaagatcacatcttttggaattctgaaagcaattcacaactttgagttttatggatctattttgtggcgagttgtcaaagatcacatcttttggaattctgaaagcaattcacaacgctgtgcgctgcatgcagcgcttccattcgttgtcaaagatcacatcttttggaattctgaaagcaattcacaactcagggtacgtgtggagcaggatgctgatgttgtcaaagatcacatcttttggaattctgaaagcaattcacaacagttgaggtttagtggatcgggcaggagtcgttgtcaaagatcacatcttttggaattctgaaagcaattcacaacaccctctcatttttggtctgtgaaccggtgttgtcaaagatcacatcttttggaattctgaaagcaattcacaactttacattaggtctatctttattgcttgtagttgtcaaagatcacatcttttggaattctgaaagcaattcacaacagcaatccagagcataagcaggtagttgttgttgtcaaagatcacatcttttggaattctgaaagcaattcacaacacggcaatctttagtatgccataaacacagttgtcaaagatcacatcttttggaattctgaaagcaattcacaacagaaggttgtctcgcatggatttgcgcacgttgtcaaagatcacatcttttggaattctgaaagcaattcacaactctttcataccacatcacttaagaattgatgttgtcaaagatcacatcttttggaattctgaaagcaattcacaactactgccgctgattgataaaaccacgatccgttgtcaaagatcacatcttttggaattctgaaagcaattcacaacttaaagactcattcattttttgatctgaaagttgtcaaagatcacatcttttggaattctgaaagcaattcacaactggatacatgtggcatgcccagtcgctcaggttgtcaaagatcacatcttttggaattctgaaagcaattcacaactcagaattccgtttcccttagaacgatggtgttgtcaaagatcacatcttttggaattctgaaagcaattcacaaccagacagatcttggaactgaaaccgattcagttgtcaaagatcacatcttttggaattctgaaagcaattcacaacaagaaaagcgatcgtgaaactacgcttgaagttgtcaaagatcacatcttttggaattctgaaagcaattcacaactttaccgagggacttgttaagattgtcaaagttgtcaaagatcacatcttttggaattctgaaagcaattcacaactatctatggatgcgtcagtaaatcccatatgttgtcaaagatcacatcttttggaattctgaaagcaattcacaacgcaaaaacccgtattccctttaattgaaacgttgtcaaagatcacatcttttggaattctgaaagcaattcacaacctgtggtctatgataatatcacaagccttcgttgtcaaagatcacatcttttggaattctgaaagcaattcacaacatcgcgatcgagaatttgaagcgcttaaaggttgtcaaagatcacatcttttggaattctgaaagcaattcacaactaaattttgcgggatatcgatatcctcgtgttgtcaaagatcacatcttttggaattctgaaagcaattcacaacattaccaatgcacactgcagggcgagctcgttgtcaaagatcacatcttttggaattctgaaagcaattcacaacctataggtaaatgaagaatttaccggtacggttgtcaaagatcacatcttttggaattctgaaagcaattcacaacatcaccgcatgccagtcggcatctggataagttgtcaaagatcacatcttttggaattctgaaagcaattcacaacgttttaataaatactatgtgcgcgcctatagttgtcaaagatcacatcttttggaattctgaaagcaattcacaactttatgcctgggcaaaaattgtcctctggtgttgtcaaagatcacatcttttggaattctgaaagcaattcacaactaggattggattttcccataatgggaaaagttgtcaaagatcacatcttttggaattctgaaagcaattcacaacaggatagtagcaagaccgcaaccgttgaaagttgtcaaagatcacatcttttggaattctgaaagcaattcacaacgacagattataacaccgtggaatccatcgagttgtcaaagatcacatcttttggaattctgaaagcaattcacaactagtcatacgggtaccaccggagacgatgggttgtcaaagatcacatcttttggaattctgaaagcaattcacaacggttcagctccctcttccttggatggttctgttgtcaaagatcacatcttttggaattctgaaagcaattcacaacagatgcgatgattaagcaccgagcaaaattgttgtcaaagatcacatcttttggaattctgaaagcaattcacaactgaaggttggatatcctaccgcccaaggtgttgtcaaagatcacatcttttggaattctgaaagcaattcacaacacggtgcaacaggtgcaagtagatccagtagttgtcaaagatcacatcttttggaattctgaaagcaattcacaacaaagtccttgcgctcattcccatttcctttgttgtcaaagatcacatcttttggaattctgaaagcaattcacaacgttgtcaacctcataaaaacctttatgcttgttgtcaaagatcacatcttttggaattctgaaagcaattcacaacaccgttctaacgccttgtttttttaccagcgttgtcaaagatcacatcttttggaattctgaaagcaattcacaactagccccttgcattattgtaaacgctaccggttgtcaaagatcacatcttttggaattctgaaagcaattcacaaccatgatacacgccagtcaactgcttgagcagttgtcaaagatcacatcttttggaattctgaaagcaattcacaacggcgcgtcatcgtttgtatttgtgcccttgttgtcaaagatcacatcttttggaattctgaaagcaattcacaacggctttgttggtgttccgtttcttatcatagttgtcaaagatcacatcttttggaattctgaaagcaattcacaacgtgtggtattagcttgcgtccgttattgctgttgtcaaagatcacatcttttggaattctgaaagcaattcacaacttaattgccaagaccaacacggaatatgtagttgtcaaagatcacatcttttggaattctgaaagcaattcacaacggcactagatttggtgatcctacctgaatcgttgtcaaagatcacatcttttggaattctgaaagcaattcacaacactgtcccatgctacatatttaaaaattcgttgtcaaagatcacatcttttggaattctgaaagcaattcacaaccggaggcaagcaaaatcttgtttccaccatgttgtcaaagatcacatcttttggaattctgaaagcaattcacaaccgcatctcaactagagtttcaagatgttttgttgtcaaagatcacatcttttggaattctgaaagcaattcacaacttgatggacgtaccaatggctcaaataccggttgtcaaagatcacatcttttggaattctgaaagcaattcacaactgcagctcgcaggcatactgttccaccaggttgtcaaagatcacatcttttggaattctgaaagcaattcacaacatcaatagccctgtttaatttatcccttaagttgtcaaagatcacatcttttggaattctgaaagcaattcacaacgtaggtccataatacttgcgccatcgtggagttgtcaaagatcacatcttttggaattctgaaagcaattcacaacttgataatcgttatgggtgcggtaagtgctgttgtcaaagatcacatcttttggaattctgaaagcaattcacaactactttatagagacggtactcgatctgaaagttgtcaaagatcacatcttttggaattctgaaagcaattcacaacaagtccagcatcgagctggccaagactgatgttgtcaaagatcacatcttttggaattctgaaagcaattcacaacccaaaaaatcagtttggaactggaacaggtgttgtcaaagatcacatcttttggaattctgaaagcaattcacaacagcagagtacctgtcttaaaactcttagggttgtcaaagatcacatcttttggaattctgatcttatatcgtggataatttgaccggagcaagaacagtgatcgctaccagcgctccaacaaattatacctttcaggtttcttctggcgatgcgattgatgtcagtagtagatttaggatagagtttgaagatgttacattgagtgttgaagattccgctttcgcgaaagcggtaaaattatatcccaatccctctgatgggaatgatctttttatcagtttcaacggtattactggacagaagaaaattaacatctacaatttattgggtcagtccataataagttatgaaacagataaaaccggaacttatgagctagaaaatctaggtttgattaatggaacctatctggttgaaataagcactgaaagctcacagaccgttcaaaagttgatagttgaataaataaatgaaattcactaaacaagctattttaaagggttatgaacgatgtaattttaagtaattaactttactggtttagcaggcaggtctcgttgtcaagttctgtttcaatggtgtagtgatggaattcataattttctaaaatctctttcacctcttttttgaccgtaagtatttggtcaaaatcactgatgtttttcaatttgacatgggtggtgaaaacgtggttttcgccctcttgcgaccataggtgcgtgtggtgtaaggacgcaacattcttcaaagctaatattttaatttttatagtcttgaggtctacatctttgggaataccttgaagaaaaataaaaagtgtttctttcagtcgcttgaaaacattgtaaagtatataaagggtgatcagtagtgataaggctgggtcgagatagtggttgtcataaaagtataacacgatggcaacgacgagcactgctacccaacccagaacatcttctaataagtgcaaggagaccacgcgttcattcatagattttcccttgcttactttccaggctccataactatttacagcaaccccaatgatcgcaaaaatgatcatgccctgtgcatctgagtgttcagggtgaagaattctttgtgtcgcctcgtagatcacgtagctagaacctgccaaaagtatgatgctattgatcaatgcacccagcagcgagaagcgtttgtagccataagaaaaactatcgtcagcatcttgtttagacttgtggtctagataccaagatgctcccaaagaaaagctatctcctaaatcgtgaacggcatctgaaacaatagcaatactatttacatacataccaccgatgaattcaaaaatggtaaagcctaagtttaaaaagaaggcaattttcaaattactggacgagtgatggtggtcgtggttgtggggcattgctattttttattaaaaagctcttcaatatccctcgggataggcatttttttcatgggcggcacattagacccaccagtatttcccgtaggaacgtggttgatgaatgatttccatccacccaccagtaatctcaggatctgacccagtatttctttaacgtttttctgcatcagcccaaatttgagcatcagccagtgcgcgtaggtatgttctatggggtaggactggcctatgatgtgggttctttctaaatgatgccaagcatttgtataatggccatgtcgtagatgatggcgataagactgcagctcttcatgataagcaatttttagatgttctggtattttcaggttcagtttcataatcgctcattttatagaataaataatagaataaaagtagctattatccatgggaggtactagtttatcagtttttaaaattaaacttatggggagtataaaatccaagtttcgagcgtttcaagttcgggactcccttatacccaccattcctattaatcatttgccatatatttagtaggttgttacgctttcgcgctgcgcggtcggcaagccttgccaactgcgccgaagtggttacgaaggctgtatggcgaccgaggggaagcgaactcaaaaacaagctcgatcaataattgaacaagctctcgatattagaaaaaatgaggttcgatcccaatggaaacgaagatcttactaaaagttgatcattaacttacctaagaatcaggttcaacatggatcaaaatattgccaagattagggatggtctcctgcaggtaatcttttaattcgtgtgcgatttcatgaccttctctaaccgtaagctcaccgtcaactatcgcgtgcagatcaatgtggtacttcatacccgtcttgcgaatgtagcatttctctgtagctatgaccccatctacctttatcgatttctgtctgatctcttctagcaggtcgtcgtagcgatgctcgtccataatctcccctagggcgggcctaaaaatcaaatagctattgtaaagtattaataaggaagcgagtagtgcggcccagtcatctgcggtttcaaatcctttaccaagccataaggcaatggaaattcctataaacgccattattgaagttatggcatcgctcctgtggtgccaggcat

SEQ ID NO: 810 - DNA, 23528 bp, synthetic construct
  misc_feature 1..23528: note = Synthetic
  source 1..23528: mol_type = other DNA
aaacccagaagtataaaaagcgcccctaaagtctcagcggtagtggccaaaacaagggaaagctcctgccctatacctattggatctaaaaattgtacgggttcgttactggtcaattttagaattttgcccatcccgtgaccaaaaaataaaaaaagtgataaggctactcgcaacagtaaaacggctacacccccctcaaaaggtaagggtatatatttcttgaataatgcactcatagtatgttttctaaaggtttaataactgtgaacctatatataaaatactatgtatgaaagaagaacctggtgaacgacccaaacactgctgctaaatacattactaatcctctaaatgcaaggcccaaaccttcttagagtaagccaaacaggtatttttgctcaggctgcaacaacaaaaaaccacgtatttttattaaatacgtggtttttgcatccaattatttggatcttttgtgaccccggagggattcagtatttttaataaaaccctagaaaacagcgtctctaagagattttcaaaatttttgcttgtcggatcgctaccttacgttttgatgctatttgtctgacattcaattcaaaggtagtattttcatctaaaacaacaagactatcagtaaaaatgctctattaaaattacctttcaactagttcttcaaggtccaatttgatcagttcccagattttacctctataacaattaggcgtaaaatcatcttctgctaaagaaaaatcaacaatcttattcatcagttcctctgttgataagttgtaaggatatctctttaggtaaaaaccaatcagttcattcaatgtataactttcgagaagctcatgaatatcccaaaagtccttcttgcggcctccttgccctacaacttcaagtttcattgcagctatttcttgaacactagcaaaacgaaccttttgttccataattaatggaaatacaaaaggatctgtatagaataaatccaattttaccaagtcatcctcggtattccctataaaataagatttaccgattcccacaagctcagaagagctactaaaatatggaaaagtaactctaagaatagattcaattttttcaaaatctatgcttccatatggggcatcgctgaacaaatcaatatcaatagactctcgatgaccccgttgaagacttaatgaggtacctcctactaatctaaatgaatgtaattcttgaatctccatcaatttctggagtgtattccacagcaattcagataccgtatttaactgaagttccattgctactctataagattataattcttgagattttcttcaaaagagggtaaataacttttcttgatcgattgagcaatcttcttaacagtctgtctcccataaaatgaaagaagctcttgtatttcttttccgtttccgcgctcaagtacgcgttgtattacagcacgcttgtttttatcccaatctatccgctctaattgagtatcccaaaagagcgcttttctaaaatgattgagattgggaattctcccatagtttgccgcaacttgttgctgcacatcatagctggcttgcaggagcataaagtaatctgcctctacgctaaaaacctctccaagcttaatagatagtttcgcgtttactgctcttcgccggtttaaaattgcgctaatggtttgtttatgctcatcaatagttcgcgctaaatcacttccggtaataccgcgtttttttaaagcacgttttaaaacagctccgggatgtacgccctttattttatcaagatcaggtaacatggcaaaaactttcagcaaagatagcaaataaagtaaacaaaaacgtttactaaacctttctaaagttttacttactactctaaagggctttaatttggaaaaccgtaaataccaagcactaaaatattggtcataggttcatattttctagaggaaaggattgttgtgttatctcaagtttggctttcaataatgattttaaatgttttccgatttagtgaaaaacttaattacctctttgttatttgtcataagactttcaatatgatcgtccatttcctctgaagacataattggtgcatctaattgtaatgaacacaacgttccgtccttttgaggtgcgatcaggattattcgtccaattcttaagtcgaacagtcgcatgttgacgattgcatagtcatttctgtccgctgtcaaaaaggaaatgaaatctatttcatttccttttgtcttgacaaacccttgtccgacataatgcggatgatttcttgatgtgatgcttacatctgtgtgtgaatatctttttaaatcgatgctatcagtcaaaaccgcaatggtgaagaaaacttcgtttggtttgtcatctataaatttttggttaactgcatttttatttacatacaaagaatgatagattattttcttgtcttttaaatcaattccttgccaacttccggaatatccaagcccattaaaggtgctatcagtcaaatcataatcaggaactggaaaaactccatttatcatcggttttccactaacttttatgttgtcggtgtcagctttccagtttttagaactccattttgttgaatcatttctattctcgttatggattttttcgttttcaatattccatacaaatccagtttccttttcttgggctttacaaccaaaagaaagaattagaaaaatgtatataattgctctattcataaggattttgtttaattacacacaacggcagtgggtctacaaaactacccgtttatattttaaaagtagttgaagtagctgcgacatccaacgaaagctacatataagatgtatgcgtttttcgctgatagaaatgaaatgagtttacaatttcaaaaaacctcaatttcaaccaaaaacaagtgaaaagcggagcaggaatgctcgcttccttttttttgctgaaaaacagactaacaaacagcgatacatcggttttaagcgttctgaatttggtctaaaaccaagttgatccaaaaaagaaaaaccgcttagagcggcttatttatgtttgtaatgttacattttacagtcttgtgcaacggttaccggtgttgtaaaacgtttttttatctaatttgccaccattttattttcttggatttaatcaatcgttttgtcggaaaagttttggttttaccgttcgttttttcaaaatccatttgttttaatattgaagagcttacaaaatcccaatttgatgtataaccaaatactatttcagaatttttagcgttgtatttcttttggatttcaaatttaccaatgggttcgtatatattgtttttataattgtcaggtaaataccaagaccaagctgtacttttttgccaatctccaaaattatttatcaaaacttcacttttttcaacatcttctagtgtcggtttggttgattgatttaatcttgtagttacgattaaattatatccatatccagtctccaaatctgaactcaaaactattgcacttccataatttccattagccaatttaaaaacaaggcaagttccagtttcaaaaattggttgtttgttcttcttcctttttcttgctattggtttggctttttcggattctaattttgctaaaaacttatctagaacaacttttctttttttaatatccgattcgcttgcgtcgagctctctccatatttttaagtcagattcgttttcgattatttcacgaactttttcaagaatatcagtcgataagcttttagtttcccaaagagctagtgccaaagcaaaccaaaaatcattttctccgtttggattgtccgaaattagcttctttttgatttctgtcggttcttttccgtcgttgtataaatcgaaaaattccgcataaatatctgctgaagtgtcattactttttatggctgttccccaagttcccaattcagttcgtggttttgtttaaaatgttttacaacttgttatatcaatactaaatatatacatatcccctcaaagtttaccggatatcaacacattagagttctgtatataaatctagacatttcctttagaaacggattacagaattccttaatctcagttaagcgtataaccattccaggattaaataaccaaaatgtataggtagataaggggtaaaccctacattttttttaagttataatgcgctcagggcatcagcatagcatcccctaggcaaagcccactcaaaggccatgatagagtatgaagttataaaaggtttattctccgattttggaaaagaaatccgataattttatttgacgtgcatcacaaatcctttttagagtttcgacaggaatacgatattccttctcgtcaagaattcttcttacaattttctcatcaatatcatgattaagtccgaaatctcggtttgatttggcatctttaatccattcggaaatggctttacttatgagaaaattgatgttcatacttaacaaaggaagaatatcaataaaaatttaatgcggaatttcttccgcattaaacagaagaatactatatttgattcataattatatatttgcgaaacttcttagcataacatattagaagcattcgctttgaatctcgaatcaaaaactggtaatttttagcaacgagaggataagcagggatgctcacgacccgggcgtgggctctcgcttattgttgcgcggtataccagtaccttgattcaataagttgagacctgcgcctttttgtattaggcccactacttcacgttcagagcctttgtttcttctctttatcaagcttcgcacccttttccccctacatcatataggccatagtggccggcaacttgtatgagttgtagttaacgaacagtaaaagcactactgcctatgcacaaagcacgtgtttacgggtaaacatcataatccgttaagtcacccgtgggttatgggttgcttccctacgaagtaacctgtagttgggtgggaaatgccgctgtaacagcggcctgggcttataccggctaggtttaagcacaccggtgaattagccataaaaaagtgctgcagcccctaggggctgcgaaaaagagaagctgttaagttcaaaaaccttcccggttgtgcttggagtccggcgggaaggcttgagcttaaccaaaacaattggtttacctaatacagctatgaagtattaaaaaacgatgctacgccaggtatagaggatgcgttaccgcgccataaagcattttcaggagccaaaatacctagaaacacgattcctggcacaaccttgatagcctaaaccgaaacgcccttaaaaagaatagaatgtaaacgaaatacagaacacttagcttatgaaacgatttcaacttgacacctactacaatgccttcaaaaaaggttgtccacacgcatttgaagcgatttacacgcagtattaccatagtgtctactggatgggcagaagcatacttaaggatgtctatgcagttgaaaatattcttcaggatacctttcttatcttatgggaaaaaagggatcgcatacaatccccagaacatctaaatgcgttcgtacactttgtaatgaaaagcgagtgtatttatcagtataacaagccccggaatgcgtttcaacgaaacctaagcagattagactatttagagaattatcaggattatttaggcggctataacgaggatgaagaagctgctcacctacaaagacaggaagcagatcagaaggctttagaccaaattcaaagggtacttcccttactaagtagtgagagaaagcttctggtggaactgtgcttaaaatacggctttcagtataaagctattgctcaggcaatgggaaccagcaccgccaaaaccagtatcgaagtaaaaggtgctattaaagatattaagaatatcattactaacggaagtacaccggaagctaaaaccacaccgatccgggagttaaaggctcaggctaatatgacccgcaaacagaaaaaagtcttgcagcttcgtacagaaaagcagtattcctttgcagctatttccaaggagctaagcctttctatacaggaagtacatcagcaatttatggctgcctataaactgttacagcataaacaaaatcaacaataatccgcttagtcatgggaaaagaaacgataaaactcacccgaaagatccagctacaggtgaatgcgcctaccaaagtggaaaagaaggaggtctacgacacgctctaccgctggcagaacagaagctttagagcggccaatctcattatttcacatctgtacatacaggaacgggtcaaagaattcttttacttatcagaaggaatacgctataagttagcggatgaaaaaaaagcggaagacggcatgctcaataggtcaaaaatgaactgcacataccgggtggtatccgatcgttttaaaggggaaatccctactaacattttagccaacctgaacaataccataatcaataactttcgtaaccacctgtcggaatatagtaaaggagaacgtgcgctagccaattttaaaaggaatatcgcgtttccttttgggccggtagccattcatggattatcctataacgaagcgcaaaaagcattttgttttcgcttgttttccattcccttaaaaacctatttagggaaggatcataccgataaacgaaaattgctggaacagttagtcgcgggcaaaatcaaactatgtacttctagaatccaattgaagaagcaaaaaatatattggttagccacctttgaatttgaaaaagaaatacataacctgaaaacagaagtaattgcggaggcttctttatcccttgaatatcctattactgtgaaatccggaaaagctacacttcgtattggtaacagggaggaatttctatacagaaggctagccctgcaggctgctcaaaaaagagcccaaagcggagccgcctattgcagacctggaaaaggctttaaacgcaaaactaaagcagtagaaaaattttacgaactggaaaaaaactacgtaagtaaccgcttgcatgtgtacagccgaaagctcattgatttttgtatcaaacaacaagccggcaccttaattctgctcaatcaggaagctaagatcgaggccgcacagcaagaacgttttgtgcttagaaactggaattattatgaattgactaagaagatagaatacaaagccaaaaaagcaggtattgaattactcatcgattgatgcgaaaataattggcccttagggtctgagggtgcttgtacacccgtaaggtgaggtattttaatagcactcactaaatgcaggcagcatatacaacccttccctaaaagattaaacaaacagggagtgttatgaacagataaataacataaaatgcaaaaacttgtacaacgaacatgagcgaactatccatttaaaaggttaaattatatactcagaacaaacttattcctctacctaaatttccgttcaacaaacttgggttgtttctcttcctgttgattaaaaagtctatccaatagttctttggtcggtttggtctgttcggtttcaattcttcttagaatagcttctaccccatccatccgtttattaattagtgtctccaatcgttgtttagaatcatcaaagggctcaaatggattaatagaattctgctcgaaaaagtctaaaatagcctctagggtttctgtataattggcatcatttactatggcgtactttttaaagcgctccactgtttcggtgtgaaaatttattcgggaaaatcgtttaggcatcactagatttttaaagattaggataatcaatcgccctatttataagggtttagaagcgtttcacggaaaatcgctataaaacagttattttaaatacttcatgaaacaaaaataactcacttaaaaacaggtgtttacggacaaaaataagctttataacctcgcgcagcgggttatcctcttgcttctcatttttgtccgcttcgctactcaaaatgataacttctaaaccctaagttatcaattaaaatccgcattaattttgatgtcaaatgctttcaaattttatgtaagatcaaaaccatttacttggtatatctggagcgtttttcttgaagtttgatagaaaaacagaagctctatattagatagatttcaatattcacccaaacgaaaattagctgcttctaagcatccatttactttccatagcgccatcgcgttttcttttcgattacctccatttaaaatttagtattgaggaaagcttttataaaaagagcgacagcggagcctgattatgcaaagcggctcaaactaaattttagttctttcaagaaaaggaaatcagcgtttgaaaaaagtgtgttggtagaattttgagtttgactcagcctctttttgagcaatcattttatagtgcacttgaatcaagcgaacgtaatcctcccgaagtttcgggatcaggattgggttcaagattttttgaatgaaccgcttttcccgtcaccaaatttcgggagaagctcttttagaaaatgaagggaaatggggtttattccccttacattttaaatcaatttataagatactggaatgtaaatataacaacgttgataaggaaaaactattgaatcaaaaaaagcgacccgtaaaggccgctttgaatgttttcacaacggaataatccttattgtgaattgctttcagactgctaatataaataattgatttttaatgaaattatagatttcctcattttaaactaaataagtatatctatttttaagaaatcatatagaaatagaaatgatgaaacgaatattaggattggatttggggaccaactcgattggatgggcattgattgagattttagaagatggtacaaaaaggattataaaacttggaagtaggattatcccaatgtcaaaggaagttttaggaaacttcgaaaaaggtgttacgaaatctcaaacggccgaaaggactgatgataggggagtacgaagactatacgcacgaagtaggactcgtagagagagattgttgagaattttgaatattttagactatctaccagataatttttctaatcaaatcgattttgatgaaaagaagggacagtttaaaaaaggttcggaacctttaatagcctattcatataaagttgacgaaaatggcaatagaattttcaattttatggattcttacgaagaaatggagaaagaattccgaatgcgctatccaaacttgccaaaactcaacaaaaagggaaaaccttatcgattaccttatgactggacgatttactatttacgaaaaaaaggtttgacccagaaaatttcaaatcaagaattggcttggattttattgaatttcaatcaaaagagaggctattaccaagaaagagatgagaaagaagtagaaattgatgaaaataaaaaagtagaactcattgtcttaaaagcggaacaatttaaaataacagaccaaaaagttgacgataagccactttacgaaataatttttgataatggctggatttatgacaatactactacgaagcctgaaatttgggaaggggtagacattgagtttattgtaactagtacaataaacaaagatggttctattaagcgaacgttcaaaaaagttgattcagaaaaagattgggaagcaatcaagagaaaaacagagcaagatttaagaaaatcacaaaaaggcgcagacaaaacttttgttggtaaatacatttacgagacactcctagaaaatccgaaacaaaaaatacgtggtgaattgattcgcactattgaccgcgatttttattttgacgagcttgaggtaatactaagaactcaacttaaattccgtgaagagcaatgggggataaaaatttgtacaaaagaacggttcaggaattgtacgcacacaacattgcccatcaagagaatttgttaaaacaaaaggatacgttcattcatcttttcctaaaagacattttgttttatcatcggccgctaaaatcgcaaacagggcttgtttccagatgttcatttgaaaaaagagtgtatgtagactctctaacgggcgataaacacgaagtaaaaataaaagggatgccaaaatcccatcccttgtttcaggaatttagaatttggcagttggctcataacttaagaattcaaaagcgagaggcagaagaaaatggaaaactgaaaatcaatctggatgttactaaccagttcatcagaaacaaatctgacttagccaagtttttcaactttctttataataaaaaagacatcaatcaaaaacaactcgtagcatatttcataagagataaaaaggagcagtcactatatagatggaattttacagatgataataaaattaaactagattgcaaccaaacaagacctgctttactttcaaaactatctaaagaggataaaagaaaatttgatgagcaatttgaacttaaactctggcacattatctattcagtcacagacaagagcgaatatgataccgcaatcggtcgctttggggaaagcaacagtctttctgaagaaacaaccgaaaagctgaagcgagctccaatgctcaaaaaggagtatgcgacctattctgaaaaggctgttaaaaaattgcttgggttaatgaggtgtggctgtcattggagcgaagtgtcgattcatccatcgagcattcaaataattgataaattattgactggagaatttgatgagagaattgaaaatcaagttagagaaaaagctatcaagcttgacaaaatcgaacattttcaaggtttaccgctatggcttgcttcttatatcgtgtatggcaaacattcagaggtggatgcaactcaatggaaatcatcaaaagatctggccgaatatatcaatacttttaaacagcacagtttaagaaaccctatagtcgaacaagttttacttgagtcattaagggtgacattagatatttgggagtactacgctgaaaaatttggtctgcagtttgaagaatacattgatgaaaagactggaaaaaaagttaagtcttacgatcgcttattttctaaaatacatattgaaattggcagggagcttaaaaaccctaaaaaggtaagggaaaaaatgaccaattctaacaataaaaataaagacaccaatcagcgtatccgaaaattgctttttgaactgaaaaatgtaaaagaggtagaaaatgtaattccaaactcaagaacacattttgataagttgaagatttttgaacagacggtgttatctaattattccgaaaaagaattgaaagccgaaaaattagattctaaactaactgtcgaaaaattcataaaaaagaaccagcctacatttagcgaaattctcaaatacaaactttggttagagcaaaagtatatatctccctatacaggaaaaattataccactcactcaactgttcacaagtaaatatgaaattgaacacgttataccacaatcaaagtttctagataattcctttaataataaaataatttgtgaaaccgaggttaatacattaaaggacaatcgtactgcatatacctttatacaagagtttcaagaagccgaagtcccattgagcggtggaggttcagtatctatccttaaaaaggaaacctatgaaaaattagtaaaagaaaattacgacggccgtaaaaaagaaaatctccttagggaaaccatgccacaaaaaatgagtgagcgtcaaatgaatgatatgcgctatataagcaaagcggcactgaaaatttatagtaatatcgttagggaagaaggggagagagaatctacggtaaaaaatgttctgccagtggctggtaaagtgactgctaaattacgtagagaatgggggttgaatcaagtttggagcggattagttgaagagaggtttaagagactcaacagattgatttgtggtgaggagaacgaaaataatggtctttttggtacttgggtagatgatggtgggtattttagaacagaagtgccattagaaattcgtgaagattttgatataaagaggattgaccatcgccaccacgcacttgatgcacttataatcgctagtctaacgagtaatcacgttaattacataaataacgaacacacaaaatcagatttgaagcgatatgatttaggcttaactttaagagataccaagcaaattgaaaaaacgcacccactcacagaaaaaaaaaccaaacatactgttcttggaaattacaaaaaaccttgggaaacatttactcaagatgccaaaagcgcactacaggaaattgtaatcagcttcaagcaaaatttaagggctataaacaaagcccaaaattacaattggcgttataaagataatgcaggcaaagtggtttataccaaaaacggagtgcctaaaaaacaatggatagaacaagtttcttctaaaaccgataaaacttccaataacaaaacaaattgggcgataagaaaacctcttcacgaagagacggtatatggcatacttgaaaatggtgagtataaaggagacttagttaagcgtgaaccactcaatatttcttttgatgaaaagaaaattgaaacagtgattgacccagttgtcagaagcattctattacggcatattaagcaagataaattcaaaggtcaaattgacgagaaaggtaacatatttaaaccggaagaagtcgctttctcggcaaagggaattaaagatttaaacgaaaatattttgacattaaacaatggagtgtttcatcatcccataaaaaaagcacgtttgcgattcccaaaaggcaaaaagttttcaatcaaaaagtgggaagacaaagaaggaaatctacttagggaaacaaagtttgtaaaatctgccacaggcaccaatctttatttctgtatttatgaaaaggaaggtaaaagaaaatactatgtgccaccttttgaagagatacttgagatacaaaaattggagcaagatttacctttagaacaaaagaaaaacgttccagaacaacatcccgattttcatgattttaaattaaagttttatctgcagcccaacgatttagtatatatacccgtcaaaaacgatgaagatatgggttttgaaaatttgggtcgacagcaacttgaaaacatttacctgtttaaggatggaagcgggacaacagccaattttataccaatgttttctgctgacgtaatttacaatatcagtaataaggaaaatagagaaaaatttgcagatgcttataatctggataaaggtgaacttattaaaaatgaatatggactcggaagcccacagttgaagaatcaaaattcggttgatggtattcaggtaaaatcagtttgttggaaattacaaactgaccgacttggaaatatcacaaaagttctaaaatgatcaaacgcaccctcttttttggcaacccagcttatttaaatacccgtaacgagcaactggtggtcaccttccccgaggaagataaaaaagaggtcaccattcccattgaagatttgggctatgtggtgttagaagatccacaaattactattaccaatggactaatgatgaagttagttcaaaacaaaaccgccataattacatgtgataagcagcatctgccctgctctttaatacagcctttagtaggacattccgagcaaaccgaacgtatgcggcatcagctcaatgccagtcttcctcttaaaaaaaacctatggcagcaaacagtaagtgcaaaaatttataatcaagcattacatttagaatccagaggaaaaaatgccaagaaactcaaacgctggagtaccgatgtcaaaagtggtgataccggaaacttggaggccgttgctgcggctcactattttcaaaatctatttagtgaggtattcggctttagtcggaatcaaaaaggaatagcccctaacaatctactaaactacggttatgccattttacgagcagtagtcgcaagagcactggtgagtagtgggatgataccttcagttggaatctttcaccgaaataaatataatgctttctgcttggccgatgatattatggagccgtatcgtatatatgtagatgccttggtttacgaaatcgtagaaaccggctgtaatattgaagaactctccaaaacacttaaagcagagcttttacgtattccggcaatggatgtctatattgatggtaaatggagccctttgatgaatgcggtaagccgtacaacaagtagcctgtatgattgctttttaggaactaaccgtaagatactctatcctgaatatacagtcaacagatcgcttgaatgatgcaggaaagcaatttttcaagacttaaccaataccgttctatgtgggtacttgtattttttgatttaccaacagaaacgcgcaccgaacgtaaggtcgcagcacggtttaggaaaaacttactcgatgacggctttgcaatgtttcagttcagtatttatatgcgtttttgcgcaagccgtgaaaatgccagcgtacatataaaacgcaccaaaaacaacttgccaaaaaaaggaaaagtctgtgttatgcagatcaccgataaacaatttggtatgatggaactttttcacggtcaaaaagaagtagaaccggaacaaccttcccaacaacttgagcttttttaaaaccttagaaactaaattatctggttgaattcagtcgagtccctttttacacctccagtttttaaatcctaaatcacctcataaaaaacaggataccagctttttagaacgggtatcctgtgaatcatcactaaaattagtattctgaaagcaattcacaacacgaaactcctaacgtacatcttcaagaacctgtgaatcatcactaaaattagtattctgaaagcaattcacaaccattatccgctacataagtaacgcctagtacctgtgaatcatcactaaaattagtattctgaaagcaattcacaactaatctaggtgttgatatagacggtggtttcctgtgaatcatcactaaaattagtattctgaaagcaattcacaacgagggtcacgtattctggcgacaacttaaacctgtgaatcatcactaaaattagtattctgaaagcaattcacaactttgaatgatcaaacctttagaattcattgcctgtgaatcatcactaaaattagtattctgaaagcaattcacaacgaaaaatactttatattttgcttttgggcacctgtgaatcatcactaaaattagtattctgaaagcaattcacaacctgatgtaacatacacaggtaatccaagttcctgtgaatcatcactaaaattagtattctgaaagcaattcacaactacagtagatcagcagacgaaactctaacccctgtgaatcatcactaaaattagtattctgaaagcaattcacaactcataatcagtttttttaaaattttcaattcctgtgaatcatcactaaaattagtattctgaaagcaattcacaacttgaatatccggcaagataaagacattaatcctgtgaatcatcactaaaattagtattctgaaagcaattcacaactgacactaacggaacacctacaattggttacctgtgaatcatcactaaaattagtattctgaaagcaattcacaactcctcagtatgaaatgcaaatgatgattgacctgtgaatcatcactaaaattagtattctgaaagcaattcacaacaggctgcaccggcgaatacagcaacgacttcctgtgaatcatcactaaaattagtattctgaaagcaattcacaactggtcttctagccagtcttcgccgccgcttcctgtgaatcatcactaaaattagtattctgaaagcaattcacaacagatctgtatctgaatctcgtgattcaaaacctgtgaatcatcactaaaattagtattctgaaagcaattcacaactatgatgagaaaacagaaaaatttgcgcacctgtgaatcatcactaaaattagtattctgaaagcaattcacaaccagaggagagcgcaaggcaattcaaaggacctgtgaatcatcactaaaattagtattctgaaagcaattcacaacggaatatctcttgcatcaataaacggattacctgtgaatcatcactaaaattagtattctgaaagcaattcacaactcaatatgatgtgatcgcgttttaagacctcctgtgaatcatcactaaaattagtattctgaaagcaattcacaacaaaattatccggtaatatctcaatgaataccctgtgaatcatcactaaaattagtattctgaaagcaattcacaacacgagtgtaaccagttagtttataaggcgtcctgtgaatcatcactaaaattagtattctgaaagcaattcacaactaataatccatccaattgcaaaaggtttttcctgtgaatcatcactaaaattagtattctgaaagcaattcacaactatcaataacaccacccacaagagtaaccgcctgtgaatcatcactaaaattagtattctgaaagcaattcacaacgcattgcataattagcctgccatagtgcacctgtgaatcatcactaaaattagtattctgaaagcaattcacaacatttcgccctcaactatgtaaacctcatctcctgtgaatcatcactaaaattagtattctgaaagcaattcacaacaccgggtaaagaatactttgcagaccctgacctgtgaatcatcactaaaattagtattctgaaagcaattcacaacaagaacgtgtctaacatataaccattaatccctgtgaatcatcactaaaattagtattctgaaagcaattcacaacggtagttttcataacaacaaaaagaatgtgcctgtgaatcatcactaaaattagtattctgaaagcaattcacaacctaattggtatgcttccgtttgaagctgttcctgtgaatcatcactaaaattagtattctgaaagcaattcacaacttaaagaaagaatagtagtcagcaggacgcctgtgaatcatcactaaaattagtattctgaaagcaattcacaacgttccccctcttttgtaattgaatctgcaacctgtgaatcatcactaaaattagtattctgaaagcaattcacaacgaaaaaggcgaacggaaatgtcgttcgtaccctgtgaatcatcactaaaattagtattctgaaagcaattcacaactctagtaggccggtataggtgccttgttcacctgtgaatcatcactaaaattagtattctgaaagcaattcacaactaatattaaatggttaattatctaggcacccctgtgaatcatcactaaaattagtattctgaaagcaattcacaacagtcaaacgcttatttacagaagggcgttacctgtgaatcatcactaaaattagtattctgaaagcaattcacaactcaatctctgcaatggctgcgttttgctgccctgtgaatcatcactaaaattagtattctgaaagcaattcacaaccaattgggaagctcttcaaaaccgtagcttcctgtgaatcatcactaaaattagtattctgaaagcaattcacaactgagcttctgcaatttcctgggcttcttctcctgtgaatcatcactaaaattagtattctgaaagcaattcacaacacagtttatcttgtggctttccttcccctgcctgtgaatcatcactaaaattagtattctgaaagcaattcacaacgtttctccgattcatacataaaagctactcctgtgaatcatcactaaaattagtattctgaaagcaattcacaaccagctccggtgttgctattgcctcattactcctgtgaatcatcactaaaattagtattctgaaagcaattcacaactgcgttccgctagcggttgcagctgcaaatcctgtgaatcatcactaaaattagtattctgaaagcaattcacaacaatgtgccgcgtatttgcgtctgtgatgctcctgtgaatcatcactaaaattaaacaatctaaatatataaatatcaaatcgttatagtttttaaattggatagtgtactacaagtctttactaatttcagtttcactgtacagatatctataaaatcaaatatctgaatagttgtatttttagatttctagccaaattagattttcgatgaaaaaatatatacttttagttttactcttttgttctttcgcatccttttctcaacaaaaagaacttatccttgcttcctggaacattcaagattttggaaaaaccaaaaacacagaagaacttgagcagattgcagaaatactcagagatacagacataattgctattcaagaggttgttgcaggttatgggggagctcaggcagtagctaagctatcagacattctaaaccgcaaaggggctaaatgggattacgtaataagtgaccctacgaatagttcgaagtacgtaactgagcgctatgcgttcatctggaaaacttctaatattaaaattaagaatagaggtaagcttatcgctgctctggattcaaaagtagatcgcgaacccttcacgataaacttttatctggactcaaaggttttacaggttataaactttcattccagacctcacgataataatcctcaagctgaaataaaagcaatatctgaatacattgtcaatgctaaaacgggatctttaatttttgctggagattttaatactatagtacaagaccctgtatttagcacattaaaaagtaacggcttcgttcctgctttagtcgagcaaaaaaccactctaaaacgatcgtgcaccggattagactaccttaaccacgcgattgacaatgtattctattcaaaggacctaacatacattgatagcggagtgctcgactttgtaatgtcttgtgatcagctagataaagctcgtaaactttcagatcacttacctgtttatatcaaatttagtctgtattaatttattcatcccatataaattcttgaataattgcattcatatctgaaggtagcagtgcttgtttgagctcatatgtttcaattcccatcttggcaaaccagtcttcccaatacttgaaaattacatcctcctcatacggatttttagggtcgggatttatgcctaataccagaacctctagagtatttaaatttttatttgctgggatgaagccataattcttagcttctatattttcctcccagttactcgtatttaatttaaatcctcgtatggtctgtggggtaaggtaagatgttaagccgttttcttttagcacagtgttcttatgataaatatatccgtcagtaagaactactaagatgttcctatgatcttcttcaatgcaaaaatcattaatcttatttttaaaaaacctccagacgtcagagcctacgtaggcgtcatctaaaattgatgcttcataaataagcctaggaatactgtcatatttttcagtaactgtaagaattttatctttagttgcattatctctggtaaacttcaattttaaatctgccagctttttattaagcttactatctgcaggctccgggtcgatgtaaagctgtatttgatcattgatttttatcgatcgcttatttctcaaatgaatttcaaaagcatttgctattgaattgatataccccaaatctctttcataaaattgcatagcttcatctggatacttatccggattgattcgatctgagagatcaagtaaaatacttacatttaagtcgggcctttctggagacagtctgtccacaggctcgttagattctgtaatggctttatgagcttctttaggttcacttttgcaagcaactattaaaaaacttaataatattagattggcaattattttaattctcattagttaatcagtttatacagacgtccttcatagtcttcgttgtcaatattgtattttaccagatgtagcttttcctgctcttcgcagcttctgtacaattcttcttggcgtttcctcccatcaaaattgtctgctattgctaaaaaccaacctttcacatattctgcgtgataggtgaggtaatgtttatttgaaaagacaaagccatcaatagtacgctgtaggtccagtattttcccttctatacctgaaatctcttctttaattggcggaagtttttctttggccttattcaattcaagttcctcgttcttaatctcttcctgtttggaccggataaaagatttgatcatgtcaaaattttcatactctttcataatgaaatcaaacaccaatccccaaatgatgtaaacaatgaagccagcaaaaataatcccccaaaattccacagatgaaaaagctatagttaaatcaaatggtggtgaatctggtgtcttataaaaatcatagagcttttgttcaatgagataagctaaaatggcatcaaaaataaaggtgatcgtaaagagcatccctattttaacaaagctcattatacccttctgcttttgaaacatatggatcaaataacccaatcccataaatgcaaaaggtattgttgccacaaaaaccccttcaagccatccatctgcaatagctttagaaaatgcttccgcatcaaaaatggcttcacccagtttgtctgaatcaaaattcttgaaaaatgctgaatacgaagctgaaatgtaaaacaccaacaagtaaagcgttattggtaacaatacaaaaaggcctatataaaactgggcctttgggcgcttgtctacctcaagaccatatacttcagggttgcgcttaacctcgaccatatcatttttcaacgatcttattttgtgctcaatagcgctaacagtttcttctaaaagcccaagtgctgttttgcgctttttcaattcagtttcctgtcttcccttttcatcgaggtaaggagccttaagctctttttgcaactgctcattctcacggcatttgcctttataatccatatagacttcttcaagacaagttctaaaaactcgatgatttccctctgcttgctttgacgagccatagccactttcaaaaaaggtaagtttcacttgcttaacatcctcaacttgaggtttctcatcaggaattttctcattcttttttactgtaaaaatgcttttcagactactcataattactcttgtattaaattcatcaactgttgtttaggcagtttttttcctgcgttctctaacaaaaaagaggtgagctctggaatattctcatctaaaaaaccaaactttagacagtattttttgagcgtgaccaattcgtctggatctactttgccatctgcccagatcataagggccaaatcatagaggtaagatattttctcctcggtggagtctgggactgtcgagttgtgcgagggattgacaagtatagcatccagctcagccctgcttaccccgcgttcttctgcaaaatggtaaagcattttcatctctaagacatcgaaattatcgtcagagaaagccatttgataaagcctaagaaaatggctctttaattcggtagatatcatagtttaatttttaggtaggttttcacaaggaatcccgtcattatcagaatctaggttttcaaggcaagaaggattttcattgaattcttgttgagcctgagcttgactgttataatcagagcattttctagtaggacaatccgattcaggattacaagcttctattcccaaaatagaaactagtgctagcattaaaaggaagcatcctttttttgatttaaccttttgcttcgagctggtcttgcttatataatgaccttgaacataggttccatcttttcgataatatccttttcggtatcccataattaatagttgaaatagtgatctaaaaaatctcttcttttatatgatgattgtcaaagctttttccactagcagatataagtagctgttcttctttaagtatgtaataacctggcctacagtttttatacctaaaattcaaagctttcaatccctcaaaaaaaccctcatctttagttatatcaaagacataatgggagcaacttttcttaaataaacatcttctacgtttagcctttggaattaagacccagtaaaatttgataagtagaattagaaaaacacgcatcagaaatcacgagaaaacacaaccatttgatgcgctgtagaatagccttgttcacctccaaagctaaagcatccctgagtgggctgcacatagctacttacactttcgagtctttcataattccatccatccgcagtttgattttttatcaatgcctctaactgctcggcaacttgcttcgtattttccttactacgatcaattgaagcaataaagggtataactttgtattccattcattaagatttagattaaaaaaatagtagatcatcagtattttcagtttttttcatcaagtagaattagattattttaagtaatctctatatacataacctgtattttgactacttaaaactttcactttgcaccaggaatctaacacctccataacttccacttcctgatccactttcagtttcccaagtatttttgaagatgcagaaggtgcttctctcaagtttaaaactggtgaggatacatgtaaccgcatcccctttttaaattttgccgatacaggtgtagtctttgaagaaactgacctgaccggagttgttctcacccgcctacacaccccgcaggttccaccatttttagcgcaatgtttacagcctgagcaattcttgcaagccgtgcaataggaagatcctgtgcagccgcgtccctcttcacaacaaggggtttcaacaagggtgtcctgaggtgcagactgggcttgtatttcaaagaaagacattaaaaggatcatcaaaacaaatatgtttttcataatactagaaccagaaattaaatagcaataaattcactagccttaactgccaccgctttttccagtacgacagaatacatttgacaaacagattttaagtcctctaaagcttggctagaagacattttggtgtgccataaagtagtattgggcaaataataagtttttgatgctccatgatatttaaaatggtctaggtatcctttttcttctaattttctctttacctctgtgtgcgatctattaatgtcataagagatcaagatgtgtccaattgtgtttcccataattttcaaaatttattactagcgaatttttcgtgaatatttatactttacattttgatttatataactattcaatccagaaccggattcagctaactttttcatttgatcaattgatgtttttcctgctgttgcataagtatattcat

SEQ ID NO: 811 - DNA, 23273 bp, synthetic construct
  source 1..23273: mol_type = other DNA
  variation 14747..15820: note = n is a, c, g, or t
  misc_feature 1..23273: note = Synthetic
cgcgtcgtcttccatgggcctcaagcttgcatctatcgttattttttaaacacaccccaatgatttccgggatcagccttgtgaccgattcccttctggtgtgccggattgtgaatgtagcgatctcgactggggaagtacagattggaaatgaaaacggcgccacatcgggcgccgtctcaataacatgatccagatggaaaagagaagattactcttcgctttcgctttctgtctcaagaacttcttctacttcagcttctgcttcagcagcttcagcatcacgggaagaaacaggtgcatcggttttcacctgaagctttgcttcttccagagaacgtgctgcgttgacgacgatgccaacagaaacttctgggtgcagaacgactttaacatcgtgcagaccaagagttttgatgaccttgtcgagaacgacctggctacggttgatggtgatgcctgcttcggcaacagcgtcagaaatgtcacgtgtgttcacggaaccgtacagctggccggaatcaccagcctgacggatcagggaaacaacgagaccttccagtttcccggcaacctgctgtgcttcatcgcggagctgaaggttagttgcttcaagctgagcacgttgagcttcaaactgtgcaaggttgcttttggttgcgcgcattgctttccgctttggcagcaggaagttacgtgcgtagcccggcttaaccgaaaccacatcacccatctggccaagcttttcgatacgctcgagaaggacgacttgcataatactatctccttccttaaccgatgatgtatggcagaagagccaggaagcgggagcgtttgattgccttggcaagttcacgctgctttttggcagatactgcggttatgcggcttggtacaattttaccgcgctcggaaatgaaacgctgcagaagacgggtgtctttgtagtcgatctttggtgcatttgaaccagagaacgggcagcttttacgacgacggttgaaaggacgacgggaaccaacgccctggcttacgatctgaacggccatgtctgttctcccttagttagctgctggagctgcatcgcgcggagcgcgatcgccaccacggccaccacggtcaccaccgcgatcgccacgatcaccacgatcaccacggtcttcacgaccgccacgaccaccacgaccaccgcgttcatcacggctgccacgattctgcatgataacggaaggaccttcttccagttcatcaacgcgcagggtaagggtacgcagaacatcttcgttcaacagcatgatacgttccatttcgaggatcgcagcagcaggtgcatcgatgttcagaagaacgtagtggcccttgcggtttttcttgacgcggtaagccaagttacgcagaccccagtattctgtttttgcaacagaaccaccattttcagtgatgatggtggtgaactgttcggttagtgcatcgacctgagaggacgagatgtcctgacgtgcgatgtatacacactcataaaaagccatagttactcctcacggctttgtggaaagggctgaaaacccttatccggagctggcgtcctcatgatccgctagaggtcaccagcaaggagttgatttattgcggatagacgaagcggaatatagcgatcctgcggaacgggtcaagtcccgtgagtcatgcgggtttttcatgtgctttgtctctatgttatttgactgatatatatggtatattcagagtttgtccgaattgtttttcaagggtggcgcagcagggaaagcagcttgccggacgatttgctgcgcaatttattgcatcttttgccggacagggctatttctgggccagaataatatgggccagaattgaacccgtagagaacgacgcttttgctgccctttttatgcagagggttattcagaggccgtcgggctgggaacagggcaggaactaaaatcggcgctggtttcggatgtgtatctgttttttgcctacaggcttccgggcagggtttgaaatgattgcagtagaggaataacaatatgaaacgtgcttttgtctttcctggtcaaggatcacaggttgtcggcatgggcaaggaactggccgaagcctatcccgttgcccgccaggtgtttgaggaagttgacgacgctcttggtcagaagctttcaaagctgatgtttgagggacctgagggagatctgaccctgacagaaaatgctcaaccagccttgatggcagtgagtatggctgttgtgcgtattctccagagcgaaggtaattttaacctggcagaccgcggtatctgtgtcgccgggcattccctgggcgaatactcggcccttgcggctgtgggcgcactggaattgtcggatgcggcaagattgctgaagttgcgtggccagtccatgcagcaggcggttcctgtagggcagggggcaatggctgctttgcttggactggattttgaggaagcccaggctgttgccagggaagccgcacagggtgaagtctgttctgctgccaatgacaacgcgccgggccaggtggtgatcagcgggcatcggggtgcaatcgagcgggcgctggatattgccaaggaaaaaggtgccaagcgggcattgttgctgccagtcagcgcgccattccactgttctcttatggcacctgccgccgatgttatggccgaggcgctggcgggcgtgaccctgcgcgcaccgtctctgccggtcatcagcaacgttgccgttgattttgtcagcgacccggaagcgattcggaattttctggtccagcaggtaaccggcgtggtgcgctggcgcgaatctgttctctttatgaaggagcagggcgttgagcagctggtggaactgggtgccgggaaagtcctgagcggtctggtgcgtcgtatcgacaaggaacttgagtccgccaatgccgggacaccggcagaaatcgaggaactgctcaaggcgctttaaattgaggcgggctttgatgcccgccatctttaatacccgccgcctttaataatcgtgcacaattttcttgccgcttggtctgtgtacccggattgggtactctttcccggcgatatatatttctaggagttactgatgtttgatctttccggcaaaactgccctggttacaggtgcctctggtggcatcgggcatgcaattgctgctgccttgcacgcccagggggcgacagtcggcctttccggtacaagggtcgaggccctggaaaaggttgcggctgaccttggcggggaacgggtttttgtcctgcctgccaacctgtccgaaaccgatgctccggctgatctgatcaaacggtcggaagaggcaatgggccaggtggatatcctcgtcaacaatgcgggcctgacccgggacaacctggcgatgcgtctgaaagacgaagactgggatatggtgctggcggttaatctgactgcaagtttccgcctggcaaaggcctgcatgcggggcatgatgaaacgccgctggggccggattatcggcattacctctgttgtcgggacaactggcaatgcggggcagaccaactatgctgcctccaaggcgggcctgatcggcatgagtaaatcactggcccaggaaatcgcgtcgcgcggaattaccgtaaactgtgttgctcctggctttatccagacagccatgacagatgttcttgcagacgagcagaaagcaaagcttctgagcacgatcccctgtgaccgtctgggttcgccggaagacattgcggcgtctgttgcctatctcgcgagtaacgaggctgcctacgttacaggacagaccttgcatgtgaatggcggaatggccatgatataatctgtaattgaccccttggcgtggaatctttatgaaggatatacgtcaagggcgttggcaagccgctgaaaagtgtgttatgaggcggcgcctctctgcagaatgcagggaaataataggaattcaggccatacggccataaagaaactccgccgaaaggcgataattagttaagggctaagttttatgagcaacgatgtcgctgatcgcgttaaaaaaattgtagttgaacacctgggtgttgaagagtccaaagttgtaaattctgcaagtttcatcgatgacctcggtgcggacagtctggataccgtcgaactcgttatggctttcgaagaagagttcggttgtgagattcctgatgatgcagccgagaaaatcgtcacagttcagaacgctgtcgatttcatttcggaaaacgtttaatcgtttttacgccgggacaacgtcccggcgttttcgtctttaaatagtatagagacatcacagtatcatgcgtcgtgtcgtaattaccggtctcggtatggtttctccactgggaagtggcgttgatcacatctggtcacgtctcatcaacggggaatccggtatcaacaaaatcgaaggtttcgaggtttcggatcttccttcccagattgccgggcaggttcctgtcggcgaaaccgcggacggaaaattcaatgtcgaagaattcgtccctttaaaagatcgccggaaactggatccttttatcgtttttgggatggctgcggcacagcaggccattgaggattccggttgggaaccgccaaacgaggaaagccagtttcgcaccggtgtcatgatcggctcgggcatcgggggactgcaggcaatcgccaacggggctctgcttctcgaggaaaaaggcccgcgcaagctttctccctttttcattccttcggccttgatcaatctggtttcaggccaggtttccatcaagtacggctataaaggcccgaaccacgcggttgtgacagcctgttctaccggggcgcacgccattggcgatgcggcgcggctgatcatgctcgacgatgccgacgtgatgattgctggtggagctgaggccgcggtttgccgacttggtatcgctggcttctgtgcttcgcgtgcgctgtcttccggctacaacgatgcgccagaaaaaggctcgcggccttgggatcagggacgtgacggttttgtcatgggcgagggtgccggggctgttgtgcttgaagaactcgaacacgccaaggcccgtggcgcgaccatctatggtgaagttgtcggctacggtctctccggggatgcctatcacatcaccgcgcctcctgcggatggcaatggtggtttccgggccatgtccgctgcattgaaacgtgccgggatttccgcgtcagatgttaactatatcaacgcgcacggaacctcgacaccgctgggtgacgagatcgaatttggtgctgtgaagcgcctgtttggcggcaatgacaacctttgcatgtcctcgaccaaatcggcaatcggccatctgcttggggcggctggtgctgtcgaggcgatcttctcgatcaaggcgatcaaagaaggcgttgttccgccgacattgaacctcgagaatccttccgaagaatgccgtggcatcaatctggtgccgcttgaggcgcaggaacggaagatcgatattgcactttccaactcttttggatttggcggaaccaatgccagcctcgtgctgaaagcattccgttaatcgttggtcacgtgagcgaagaacctaaaaacacgacgaggcctgcttttctgaagtgggcctcgtttcttttggccctgattgttctgacctgtgcgattctcgcctatacggctcaggttcgttttctggcgcccggtccgttgcaacaggatgtttctgtcatgattccgcgcggtgccgggctggagaaaatctcggacctgctggtaaaagagggggtgattgatgacccgctggtgtttcaactgggtgcccgctacacccagcggtcaaagaacttgaaggcgggggaatatctcttcccggcccagatttccattgatcaggccatcggcattctcgaatctggcaagagcatcgtctattcggtcacgatccccgagggcaaaacctcacaggaaatcgttgaccttctgctggccgaaccgacgcttgagggcacaatcaacctgacgccggacgaaggcagcctgctgcccgagacctatcactttgttcgcggcgacagtcgccagtcgattattgaccgcatgcaggcggacttgagcaaaactcttcaggaactctgggacaaaaggcaggaaaacctgccgctgaagtctccgcaagaagccctgatcctggcctcgatcgtcgaaaaggaaaccgggatcgcttcggagcggccgctggtggccggggtgtttgtcaaccgtctgaacaaaagcatgcggctgcagtctgacccgaccgtgacctatggcattaccttgggcaaggcggcactcgggcgcagcctgacccgcgccgatctcaaggccctgaccgcctataatacctacaccatcgacgggctgccaccggggccgattgccaatgtcggcaggtcagcgctcgaggccgtgatgcagcccgcagcaaccaaatacctctactttgttgccgacggaactggcggacatgccttcgcccgaaccctcaaggaacacaacaaaaacgtccggatctggcgctcggtccagatgaagtagcgcaaagggcaggtaaagcttcggcaataatggcaaaatgtggctcttttgaatgattttaagtccaatatgcgatgtttgcttgaccttttgtaaatgttcggtaggtttgccaaacccgtgaacgcccgaaggaaaaggctagctgtatggctaaagaagaactacttgaattcagtggtactgttatcgagaaactgccgaatgcgatgtttcgtgttcagctggaaaacggccacgaaatcattgctcacactgggggaaagatgcgtaaattccgtatccgtaccatggttggtgacaaggttgacgttgaaatgaccccctacgatctgaccaagggccggatcactttccgtcacaaataatccttttctttctccgtccggtcaggctggagccgcagcgcgttttgtcttacgacggaacgcgccttttgcgtttggtatcggggatacctctcttatctggccgtatctggagctgtgtatcggagaatgcgcatctggcctcccgtaactgataccttgccgccaccccttttaactgcttcctgttaactgtgaccccgggccgctggccctggataacttcagggcagcccgtcctgggggggctactgcttttttggcaggcgatcggcgataaactcggtgatccacagcggcaaccaggaaaagaccagcaccgccagatacatcggcaggggaaaggcaatccggggcttgttccgtctcaggccacgggcgatgatcccggcggctttttccccggtcatgagaaacggcatgggaaatctgttggcatcggtaatccggctgacgacaaagccgggcgtgatcaccgacaggcggatgctgtcgcgcttcagggcaccgcgcaggccttcgccccaggaccgcaccgccgccttgctggcacaataggccggggcgctgggtagacccttgaaggacgcgagtgaagagacaatcgcaatctgcccgccaccgctggctttaaagaccgcaatcgcgggcaggaccgtgttcatgaccccgatgacattgatatccatgatctcgcgggtctgggccgcgctttcgccctttgctcccgttccccctgaaatcccggcattggcaatcaccagatccagtctgctggcgcggttggcctcttcgatagcggttgcgcaggcatcggcatcgcgcacatccagctgcagcgcctgcacctttgcgcctctggcctgacagcgcgcggatatttcatccagacgcagcctgtcgcgcccggtgagatagagcataacccctgatccggcatagttttcggccagcgctgcgccaataccactgcttgcgccggtaataaatattgttttcggatcagtcattcttgcgcagccttgtccgctttgagtataacgcattggaaaccaatagcgcttgcggtaaaagtaaaacagcaagggcctttgcgccagctggtttatactgaccagcctctatcgcaccagagccagatttgaaccagatttgaaccagatttaaaaaggacctcttcatgggtaaagctatcgccagtatgaccgggtttgcccgcgctgagggggaattcgcggggaccaactggtcctgggaactcaaaagcgtcaacggcaagaacctcgagctgcgctgccgcgtgcccaacggttatgaagctctcgatgccatcgcgcgtagtgaactggccaaacatttcaagcgcggcaactttcacgtcgggctggtgatcgacaacgcgcagaaggcggtcaagctgcaggtgaacgaagatatcctgcaacaggtcatccccctggcaacccgggtcagcaacgatctcgatgcggtggccccctcggttgacggcatcctcaacctgcgcggcgtgctggaactggtcgaagaagaagagtccccggaaaataccgaacagcgtctgctgctgatcgaacagtccctgcagaccgccatcacccggatggaggaaatgcgcctgctcgaaggggccagaatggccgcggtcgcccagggccatgtggatgaaatcgagcggctgcagaaaaaggccggggagctttccgcgacccagcccgcagcccttcaggcccgctttatgaaacagatggccgaactgctcaaagacggcagcccggtgcccgaagaacgtctggcccaggaaatcgccattctggtgaccaaggcggacatccgggaagagcttgaccgcctggccgcccatgttgccgccgcgcgcgatctgctcaaccagggtggcccctgtggacggcggctggatttcctgtgccaggaattcaaccgcgaagccaataccctctgttccaagtcatccgacgttgccctgaccacgctcgggattgacctcaaggcgaccatcgagcagctgcgcgaacagatccagaatattgaataaccggccagaaaaaaccggaacacccaaaatccggaacactgaaaaatctgacgaataagagtacgatgagcgatatgacagaaaacaccttgcagcgccgtggcctgatgctggttctctcttctccatcaggggctggcaaaaccacgatttccagactgctgctggaacgcgaagacgacctgacgctttctgtgtccgccaccacccggaaaatgcgccccggtgaaaccgacggcaaggactacttctttgtcacgccggaaaaattcgcggaaatggtagagggggacgaactgctggaacatgccacggtgttcgataaccgctatggcaccccgcgcgccccggtggaacaggcactttccaacagccgcgacgtgctgttcgatatcgactggcaaggcacacaacaggtctcggccaaggccccgaatgatatcgtccgggtctttatcctgccgccgtcattggaggaactggaacgtcgcctctacgcccgcgcccaggacagcgaagaggtggtcaagggccgcatggccaaagccgccgatgaaatgagccactgggctgaatacgactacatcatcgttaatgaatctgtggaaaaatccgtcgccgacgttcaggccatcctcagcgccgaacgcctcaaacgcgaccgcaaacccggcctcgacggtttcgtgcgggggttaagaggggcttagaggaactggttgtcgccctaggcgcgactaataacacatccatttacaaacgaagaaggggtgcccgtaagcaccccattttgcgtaataaatacttattacgactcttgatccctgctaatcgatatctgctaaatatgattgaatcaatgcccataatatataaactgaagtagtgatagtcaaatagattttctactcgggggataggggatgggtggtttttttccatacaggttggcactagatggtggcatagcatcttttggctgggccatttatgcgcttgaccgcaacggagaaccttgtgatctcattgacggcaatgtgcttcttttcccgacggcgattggtgcttcgaacagaagggaaaaacgcagtgcacgaaaaaccaatgatcgcaagcagctcaggctgaaaaaaatatgtgaattctttgcctcagattttcagggttataatcgtgaaaaggcccccgcagatgtcctgaatacctcacctttcaggctgcgggcgaatgctctggatcggcaagtcagtttagccgaattgcaacgtatatgccttcatatggcaaaacatcggggctcttctgccatccggatgtctgaagatgaggagattgctaaagagggagcggcaatttcatccgcctttgcccggacacaggtacagatgctggaacgatctgctcgtacatacggggaattgctttggcggatagaaaaggcaaacaatcgaaagtctggacaagacacaacaaaaatccggatcagcaaacaaggtaacaaagcgggtgatgcctattctcattatccactccggtttttaatcgaacaggaatttgacaagattatgcttgctcagtcagcttttcacgacgaactgactcaggaaaaaatcaatgctctcaaagaaattctgtttttcgaacgtgaaacaataacaccgaaaccggggtactgtttatatatcgaaaacgaacgtcggataccaaaactcagccgcctgtttcaactgaaacgtatttatgaggaggtcaataaccttcggatcgatactgctgagggaatccgtattctaacctttattgaacgggatcttctgatcgatcagttaatggcaggtgtcacgcttggcaagaaaaacaccaaggagtttttgaaactgaagggtaaagataaactctatcttggaaaaaaagacactcttgtcattaaaccctatccctttgactgtctcctgggacaggacgccgttctgggggacagatgggcagagatgtcagagcagcagcaggatgagttgctcgatattctggcgactgtttgggatgatacacgcgcgcatatcgcgttgaaaaaactgttgaactgcaatgatgtgctggcgcgcgcaattcttgcggtgccacttccttcggggtatggcgcgattggcgcttctgcgacccgcgagattatcgatgtgctggaagcaaatatttgctctgctacagaagcagccatgttggcgggtttaaaggaacgggcaatattcgagggggatttgcttccccgtctgccgtattacggtgaaattctgggtaatcatgttagttttagcgacaatgctggtagcagccttccttatcaggaaaaagtgttcgggcgcattccaaatatggtggttcaccgtgctctcatccagcttcggggattggtaaatagcatcatcaaaaaatatgggccacccactcagattcatctggaactggggcgggaactgtccatgtctgaacaggaacgcgatgatattcagaaaaccaacgaaaataatcgcaaggttaatgatgttattcgcaacaagcttgtgaaaaatgaggaaaaacccaatcgatccaaccttatccgctataaactgtgggaacggcaaaaaggcacctgtatctacagcggggacaatataaggattactgatctgtttggcgcatccacacatgtggatcatgtgctgccctggtctgtaacctgcgacgacgggctggctaacaaggtggtttgtacggctactgccaatctgttcaagggcaacaatacaccgcatgatgctttctccggcgcagagggctatgactgggctgcaatcctgcgtcgggtagacaggatgattccagctatgaagtggcggtttacagccgatgccttggaaaaatttgaagatgaaaatgccggttcattttccgctagagccatgaatgacaaccgctatatcgcaaagttgatgcggttctatttatcgtcgatttgccggcagcaggatattgtcgtttcaaatggccgtattaccagcaacttgaaccgggcctggggtcttgataaattttttgtcgatcattccgaaatcatacaggaacagattggcaagggaaaaggccgatcaaaacgggctgatcaccggcatcattttgttgatgcggttgcaatcggcggcgtcacccggggaatgatccagaaaattcagaccgaagccgggcgcgtggaaagggagggagccgagaatgaatttttccgtcgggtctttgcgcctctggaaccaccggttcgcgaccttgaaaaaagggttttggctttattgcaacagatgcgtcctgtttacaaaaataaccacaagaaacaggggcaattgcatctggaaacccgtaatggcattatcgacgggcctgacaggcacggctattatatcaatcgcgttcgtaaaaagatcacagatcttcccaatcttgagaagctgaacgcgctcagaattgaacagacaattccggatcttgatgaagttgtcaaatccagagagcgtctgaaggcaatcaaaacaggaatagaaaactgttgggaagcggcccgagctaaattactaagcgaaaatcaacaggcaatcgtcgagaacaacaaacccaaagaaatcaccgatacggtggtttttaaagtcgcgcgggacctgtatctttctgcgggcggtgcaaacgaatatgtcatttataaacgcgagaaactgatcgtgcccgcacatgcgattgtgggtaatcgacctcggtttggttatgtctcgggtaataatcaacggattgacttttaccggaatcgcggtaccggaaaattgggctggcagtgtatcagccactatgaagccataaacgaagacagaaaagatgccttgttcatacctgagagcaaaaaagacgtcaatgaattgatcttctcgctgtttaaggatgaccttgtagaaatggattgtccgataggtgaggggacgcgggatctttataaggtcgccaaatttaccaagggtaaaatgatggtcgtccccgtccttgatgcccgcatgtcaaccgatgggcgtcaggaccttggtggcagaggtctggggttttattgcgatgccaaggcacgtaaaatcaaacaagataaaacgggaaaaatcatatggaaatcaagtcgcttacaatagaaagctgatctcttgtcctggcgcgttttggatatatctcaggacgatcgctttttgcatttcgaaagaaacgccatcgtgatctgttcagcgggggaggagttaggacgacttcatctcccggacatcaactctgtcattattcacgggcaccaatgttgtttgactgtatcgttgcttgttaagctggccgaggagggaatcccactaacagtgtgtagcggcaatcatatgcctgtcagtatttccctcccggttacagggcatcacttgcaatccaggcgggcacggttacaggcagactgtaaacggcctcttgagaaacagatctggaaacagattgtcgcacgaaaaatattggaacaggctgcgaccttgtcgctgcaaagcgatacaatggggcacagtcttgccaaacttgcgaaaattgtgaagtcaggcgaccctgaaaatgtagaggcacgtgccgcacggatttattggcaacaattgttgggaagaaatttcaggcgggatagaaattttcccggactgaacagccacctgaactatggttatattattatccgttctgcgattgcgcgggcattaactgccgctggtttgattccagcgcttggtattcatcataaaaatgctcaaaacgggttttgtctagcagatgatatgatggaagtttttcgaccttatgtggatgccctcgtctattttaatcgaacgatctggactgaagaattgtcacctgacgcaaaaagccagctggctgggctggttatgcagtcggttagtgtatctggtgaaaatacagatctttttcgggccatgacgctttttgtgcagtcatttgtcgatattctggaaattggtgatggaaaacttctgttcccggatcatacggctgcacactatctaaaacagcaggagcttcagctttgaatcaaacgacattgaccggacaggtgtttgaacttggctttatcaccttataaaatcatgtggttgcttgtactctttgatttaccgacgacgtcaaagcgacaacagaagcgtgcatctcgttttcgcaccatgttgattgaagaaggtttcatgatgaaacagttttcggtatatttgaaacactgtccatcgcgagaaaaagccttggcaatttcaaagcgggttggtgggcaaactccttcggaaggtgatgtcagtatcatgttttttacggacaagcagttcggccaagtactgaatttttctggaaagaaagagcaagctgttgaaaaaaaaccagaccagtttgcgttattttaaggaataacagatggaaattaccaccaaataccttgttaatcatttgaaagtaaacagatatttggtggtcgtagtttagcagatatcgattagcagggaagccgtaactcagcatccggcatcaaggatctactggttagtttagcagatatcgattagcagggaagccgtaacnnnnnnnnnnnnnnnnnnnnnnnnnnnnnnnnnnnnnnnnnnnnnnnnnnnnnnnnnnnnnnnnnnnnnnnnnnnnnnnnnnnnnnnnnnnnnnnnnnnnnnnnnnnnnnnnnnnnnnnnnnnnnnnnnnnnnnnnnnnnnnnnnnnnnnnnnnnnnnnnnnnnnnnnnnnnnnnnnnnnnnnnnnnnnnnnnnnnnnnnnnnnnnnnnnnnnnnnnnnnnnnnnnnnnnnnnnnnnnnnnnnnnnnnnnnnnnnnnnnnnnnnnnnnnnnnnnnnnnnnnnnnnnnnnnnnnnnnnnnnnnnnnnnnnnnnnnnnnnnnnnnnnnnnnnnnnnnnnnnnnnnnnnnnnnnnnnnnnnnnnnnnnnnnnnnnnnnnnnnnnnnnnnnnnnnnnnnnnnnnnnnnnnnnnnnnnnnnnnnnnnnnnnnnnnnnnnnnnnnnnnnnnnnnnnnnnnnnnnnnnnnnnnnnnnnnnnnnnnnnnnnnnnnnnnnnnnnnnnnnnnnnnnnnnnnnnnnnnnnnnnnnnnnnnnnnnnnnnnnnnnnnnnnnnnnnnnnnnnnnnnnnnnnnnnnnnnnnnnnnnnnnnnnnnnnnnnnnnnnnnnnnnnnnnnnnnnnnnnnnnnnnnnnnnnnnnnnnnnnnnnnnnnnnnnnnnnnnnnnnnnnnnnnnnnnnnnnnnnnnnnnnnnnnnnnnnnnnnnnnnnnnnnnnnnnnnnnnnnnnnnnnnnnnnnnnnnnnnnnnnnnnnnnnnnnnnnnnnnnnnnnnnnnnnnnnnnnnnnnnnnnnnnnnnnnnnnnnnnnnnnnnnnnnnnnnnnnnnnnnnnnnnnnnnnnnnnnnnnnnnnnnnnnnnnnnnnnnnnnnnnnnnnnnnnnnnnnnnnnnnnnnnnnnnnnnnnnnnnnnnnnnnnnnnnnnnnnnnnnnnnnnnnnnnnnnnnnnnnnnnnnnnnnnnnnnnnnnnnnnnnnnnnnnnnnnnnnnnnnnnnnnnnnnnnnnnnnnnnnnnnnnnnnnnnnnnnnnnnnnnnnnnnnnnnnnnnnnnnnnnnnnnnnnnnnnnnnnnnnnnnnnnnnnnnnnnnatccgggcagtatagtttagcagatatcgattagcagggaagccgtaactgacccctgatcagatccgtgacgtcttgttccctagggttatcgcctcctgtatgtggctggcttctagttcagcttgtccagtacatcaatggcctcggcgacccgcgcctgatccgcaggtttcagaggcaggatcggcaggtggggaacggcatcggtgagcgacaggatatttgcggcggcatagacaaccctcagccccccgaattctttgaagagcgcccagagcggttggaaaaactgctcaatccgttgggtttcaagcgcatcaccagcttgcgcggcttttgccagtttcagggcctgaaccgggaaaagaccgccgaccacgctgtaccagctgtctgctccggcaagaaggcctgccgcgcagccccagtcgccgctgtagccaatggcaaagccctttgccctgctgcttccctgggtatgctgacgcagccgcgccagatcggcctcaaaggcattatcctgtggcaagggcatcttcacggcggcaatggtctcaagctgtgagagacggcttaaaagatccagtgaaaaggtgaagcgggttgttgtcgggttgttatagatacaaagcgggaggtccgtggcccgggcaaccgcaacaaaatgctgatagacctcttcttcggtcaagggtgcataggaaaccggggccagcaacaggccatctgcgcccgcatcccgggcatccctggccagatgctgtgcctcatcggttctgagcgcgccaacgccgacgatcaccggtacccgacccccgacaaaatcaaccgccgcagcaacggcgctctgtcgttctgatcggctcagatagacatagccgcccgtactgcccagcaatccaatcgagttaaccccggctttcacaatccgatccagcaacaggcaaagctcagaactctttacccgtccatgaatatcggtcggtgtgatcggaaaggcggaaagcccgtgaaagaggttcatgatggtgtcctggctttatgggtaaggcggaggctttgccccggttatctaagcccggattcagtccgccttggcgatttaacaaaataccgctttgtcttacgtgcttttgtccgcctgacatagagccattaaattttcaggactagaaccactgcgggcttttaagccaaaacacgagagactgtgacgttcagactttgtatcagcacagatgtgagaaggacttcggggccgaggcatatagaacacagccagttcaggcgtttttctatgtaaaagcggtaaggcaaaatccggaaaggaaaacagctcaagagtgcaaagttcaaatttatcgtgtaatgattgaatcagattgaatgtttctcggcggttcagttgtttacttggcttttggtcggcaaatgaaattggacgaccaagccctaagagatttccatgaagtacattaccatttctgatgacgatattgactttacgacaagcaagtggctgctttattcactgttaacccgtggctgtacccgcttttcagttgatcttgttgatgttccgggggatagcagctccggaaggaaagagaagctcagagagtcattaaagccattttatatgggggtgtctgtacttgatagaatggtggcttataacggcgaaccattccacaagcctcaagattgctggaagctaaatcaagacagcttgatggttattcttcgttatatgggaagacatcttttggattgggatgttgaacttaattcaggaatctcgagttggcggttcttcttcggcgatacccttattgccgaagctgtttacggttctgatcattttctgttttttgagccgcctgactatttgctgaaagttctggcccaaaaaaacatccctgtatcttacggggaagaagcctgaagcgcctgtaatcaccagcccccacagaaaaggcaggaggtttgatttatgaatgatttgaagaacctgaacgaattactggctggagtaacttttgtcaggtcgatacgcattgatatcgaaccagttacctatgcttataatatgcttttggtgatggggaaacatgccgaccttgatgaggggatgatatcagtctgttttaaaggcgtgagcaatttaaacttgccggattttggtggaggattgacccagtttatgtggcttcagatatcgcatttggatgctggccttgatcgaataaaatactctttagccgatcttgagaacgaaagtatattttgccatttttattccgttactctcttaactgaacaggctgatagtgcgggagcataaataacttatgcatgtgaagctactgtaacgaggggatttcgcacctgacaggaactaccctcggaatggtgtgatcggggcagttttccctgatcaatctcttcttctttcagcccgagagacgtcaagcaggggacgccagtaatcccgaaggggacagtcgttattgtctctatttcttgtctcagaccagccgccggaatcaggaagctgttgtggggggtgttgttattttcagctctacgaaacaacgcgccagggtacagaattcctcaatgctcagttcttctgcccgcgcggtttcccgtacgcctgcgcgctcgatcagctcacccgtgggcacgcccagtgtcttcaggctctggcgcagcatcttgcggcgctggccaaaggcggattccgtaaccttttccagggcggcgacctctgcctgcgccagcggggcggcgaggggctccagccggaccacggtcgaggtgatcttgggcggcggaataaaggcgcggggcgggatgtcaaacagggcccgggccttgcacagccactgggtcatgacgctcagtctgccatagctcttggtgccggggctggcggtcaggcggtcgaccacttctttctggaacatcagggtcaggctggcatagactgtcggatcgacggcgatctgtttgagccagcgcagcagcagcacggtcgagatgttatagggcaggttggcgacaatgcgtcggggcgcactgcccagcgtgctgaaatcgacggtcagggcgtcctgctcgatcaccgtcagtttgccgtcataggccgcggtgacttcggcaagggcgttcaggcagcgctgatccttttccacggcaatgacctgctgcgcgccttccatcaacaggccacgggtcaggccgccggggccggggccgatctcgaacaccgtaccctgatcaagcgggccgccattgcgggcaatgcgcgaggtcaggttgaggtcgagcaggaagttctggccgagagacttttttgccgccagttcgaagcgggcgatcacatcgcgcagggggggcaggccgtccggggatctgttcatggggctgtctgcttcattgcttgttcggatttacggggttgttgggctcacaggtcctgctggggcaaggctgcaaggttctaggggctgtataatctatctctgcctattgggctatatctatcggggcttgtctatcggatagtgccagatcgtgaagccgtatcgtgtttctttatggttttggtttatggctcttgtttatggcttggcgcatggatcggtttgtcgacttctgccccatgcgattctgtttcgcactgccccgactgcaaccggccctttttgtctacgcctccgggaccgccatcagccagccagcctgccgccccgctctctttcactgttactactaacggcgaccaccgtcacggctatcacgatcatcgggcccgtggatcgtaccgccaccgccatccccaccgccatccccaccgccatccccaacgtcaacgccatcgtctccaccactgccacggacacttggatattgtcaccgagcgcagccgatatgccagttcctctccgtcttggggaggccgatcaaggagcggctgagcccgcccttccggtccaggaagcttctgcgtagggatctggggcagacggctgatgtcacatccgggagccaaataggggaaccagataggggagccggatatcggagccagacgtcaactccagagcgcgggatgtccatgtggggggaaatcgtgggctcggggagtgggcccggagcactgtagcaggggcggcctggaccggaagggctgttacggggccttcggtgcttgacggcggttgcccgccacctttgttgtcatctctgccgccatatcagcggccatatccagcgcggcgagcaggctgtcgggcttggcgatgcccttgcccgcgatatcaaaggcggtgccgtggtcgggcgaggtgcggataaagggcaggccgagggtgatgttgacgccgccgtcgaaatccagcgtcttgatcgggatcagggcctgatcgtggtacatgcagatcgccacgtcatagtttttacgcgctccggcgtggaacatggtatcggcgggcagcgggccgatcaggttgatgccttccttgcgcaggcgttccagcgtcgggatgatcagctcgatctcttcccgccccatggagccgttctcgcccgcatgcggattgaggccggagaccgcgaggcgcggggcagcgatgccgaagtcttcctgcagcgcgcggtgggtggttctgatggtgtggctgagcaactcatcattcaactgttttatggcctgtgcgagggcaagatgaattgtcaccggcacgacccgcagctgtgcgcaggccagcatcatcaccgacggcgtggaaatccctgctagatcagcgagatactccgtatggccggggtgtctgaagccgatatcatagagcgccgccttgttgatcgggttggtcaccaccgccgcggcccgctgctgctgcaccagttccaccgcccgctcgatcgaggcgagcactgccttgccgttcgccggattcgcttgcccgtaaatcacagcatctgacaacttctggctcagaaccggcagcgcctcggcaaagcagcctgcagcttcttcgggcccggtgatcaccttgatcggaacctccagcccaagctgtgccgccagcgtttccagccgctgcggatcatcgatggtgaaaaagggggaggctgtagtatgccgtcgctccagccaggccttgagtgtcaactcgccgccaatccccgccggttcacccatggtcagggccaggggaagcgtgggggcaagagcccgagaacgagccgagggaaggagaggagaggtcgcggcctttgtcacaggcggatatccacattggagctgcggcgcagatccagcagataacgccgcgccaggctatccagcctgtcatcggcaagcttctgctcaatcgccaggcggtcaatcccgccgctggcctggcggtcacaaaccgcgatcacggcaattccgccggaaacctgtatgggagcagagacttcgccgaccctgacagtgcgaattgcgtcgctggtcgcgggcgggagatctttggtgttgatcgtgcccaggtcaccggatccctgatcaccaagctccttggcaagggcatccatcgtgctacagctctcatatttgcgccgggcatccgcagctttggattggatcaactgacgctgttcaaatgtcgggttctcgggcagggcaaagaagaactgcttgaggtgaaccttttcctcgctacgcgtggatcgttcgtcctgtataagcagtatataatagccccgtgttgtatggattggccccaggatggttccaggcgtagccgaggcgacggcagactggagttccggggcgagctgactgctttgcaaccatcccagatcgcctccaaggctggcgctgttggactgggaaacctggcgggcgatagccgagaactgggcgccgccattaattgtcgcgagggcttcgtcagcctgttgtttcacccgtgcttcatcagaagcggtatcaatgcccaaaaatatctcaaagatccgcttttgtgtcttggctccctcggcctggaccttggcgacaacttcttcaatttcggcatctgtaatgttaatcgtcgaacgaaggcgggcgttgatcactgctctccaggcaagttctgcacggaactggtcatagagcgtaactggcagaaccccctgtttcctcaaggtgtcaagaagctgctcttgcgacatattattctgggctgcgaccttgccaaaagcactctgtatttcctgatctgaaataacgatattcagccgttctgcttcttgaagtttgagtcgttcatcaattagtgtacggacaacctgctgtaacatattacgccggagatccggggaatctttcctgcctgaggcgatgatggcgagctgggtcctctgggcaacatccaataatgagatgatgtcatcattcacaacagctgcagggcgcaggacatcctgagaaacagccggatttccacaaaggaacaggatactcatcaaggaggcgagaagtatgcgtttcatgagagtatctaattccttattgcttcagtagagtgggcatcaagcaggttatctctgtgactacagcggttgaatagtaccaagatgtttgaaggttagttcaaccgtgaatctgttatctggttcaagttccctatcgcggaaccaggtgcgtgtgtagagtgaatcaataatgatacactcatcctgataaatcattcccaagctggcttcgcgggaatcatcctcatcaagatcccgggtgtaacttgagttgagactccaatattcagtcagttggctattgagaccaattttgacttcttcacggtcactggtttcatcgtcgatattatcatctttcaggaagacataatccagattgaggttgaaggcttctggtcctattgtcacctctacctcatttcggtttacgctgaaatcgtcaggggcaattcggaagcggtagagggcatcaaaattatcagtggtgtagatgccgacatggccgacaatatcagagaggggatcgcgaagacccgagttctcttcataaagagcactctttccgttaaaccgataactctgccctaataggaaatcagcttgattccctgacgttgtgctggctgtccacttaaaaccgtaactgacccggctaccggaatcgacgcggtcagtccccgcaaaacgattgagtgaaaagagtgaggtatcatcgaactcaaactcctggctatcatcattgggaatttctccggggttcgatccgtttggtgctaggataccctgcacgatcggctcgaccgtctgggtgaaattgccacggtagcttgcaaaaggataacgccattccagagctaactgagggaatactcgcccggttactccactatagttattgtcgctggaacggacgtcagaactgtcctggttaaca

SEQ ID NO: 812 - DNA, 23414 bp, synthetic construct
  source 1..23414: mol_type = other DNA
  misc_feature 1..23414: note = Synthetic
gcatggtccatgaaatatccgaagagaccgcgtttgatccgaccggcgtcttccatgcggatcatcacttcggtcagccggtgttccaaaaccctcggaggggcgaagaaataactcggaccgatctcccgcaaatcggtggtcatggtatctgcgctctcgggacagttgacgcaaaacccggtccacgatgcctgaccgatcgaaaagatgaagtccccgacccaggccatcggcatataggcgaggacattgtcttcgcgcccgagtttgtcgaacttggccgagatgcgagaggcggagatgatattcccgtgggtcagcaccacccctttggagcgaccggtggtgccggaggtatagaggatcacgcagatgctttcggagtcgatcgccgcttctcgccgctcgagttcgtccgtgatcgccgatccggctttctcgccgcgctcgagcagcgagcgataagagtgcaagcgggtgtgatcgtagttgcgcaggccgcgagggtcgagatagatcacggtctcgagggtggtcgccttgccttggatttccagtaccttgtcgacctgttcctgatccccggcgatcacgaaacgggccccgcagtgatccaatgtccaagccatctcgtcggcgacggcatcttgataaagcggcaccggcaccgcccccgccatctgcaccgccaccatcgacatatagagatccggtcggttgcgaccgacgatggcaacgaaatcgccttcgtccagaccgagatcgatcagccccttggccagagtctcgacctgcgccgatacttgcgcccaagtccagcactgccaaatcccgaattctttctctcggtaggcgggttcgctgccgaattgcgcggcgttgcgacgaaagagcgcagggaccgatcgcgttcgtcgattctcggcggattcgctcaccgcttcgatttcccctcggatcgcttcatttctctcattcctctcgagcctccattgtttttttcaaaggtctgaacgccccttgtcataatggatcttgcacgattgtggcccgcatttgcgccaaatcatcagcgaaatcatcggagcgttttttcgattccggtatcgccgagtccatcgcggaaagtctaatctataaggatacctttctataaggataccttggccttgtccttgtccttaggatccttcgatcgattctttcgccttcgctgtgccatcgatcccgagccgatagccaatcgccaatcgccttgtccatcgccggtcggattgaatgggtagaggatgcgatcgaacgacgaagggattcgaatcgctcagctcgggggcatccgaagcgccccgtcgagtcggatgacgccgccgttgagcatggcgttctcgacgatatggatcgccaagtccgcaaattcctccgcctgcccgaagcgcttcggaaaggggaccgaagcggcaaggctttcgcgcgccttatcgggcaatccggccagcatcggggtatccatcagtcccggggcgatggtcatcactcggatcccgaatttggcgaggtctctcgccaacggcagtgtcatcccgacgatccccgctttggaggccgagtaggcggcttgcccgatctgcccgtcgaaggcagcgatcgaggcggtggtgatcatcaccccgcgctcgccgccttcatcgacgggttcgagtgtactcatctgcgttgcgcaaagacgcatcacgttgaaggttccgatcagattgatatcgatgacatcgcgaaaagcgtcgagcgaggccggtccgtctcgtttgacgatccgctcggcggcgacgaccccggcgcagttgatgcaaatgcgcgccgggccatgcttttcgaaggcccgatcgatcgccccttcggtttgcgcggcatcgcggatatcgcaatgcagccccatcccgccgacttctcgggcgacatcggcgacggtttcggcattggcatcgagcaaggcgaccttgactccggcggcggcaagccggcgagcgcaagcggcgcccatccccgagcctgcgccggtgatgattgcggattgtccttcgatcctcatggaagatctcgcaggtgaagtgttatcgagggtatcgggagatatcgatgccggttgcaagcggcgaagccgtttctttcgagcgcaaggaggaagatgagggcggttggctttgatcttgcaggcttcgatcgccggcgcccgatttccatctcttcgattttcatccccccgatttccatccctttcgagtcagatctgctcttggggagccggatccttttcgagcaggtcaaggagttcgtcgaggctgcgaatttccgcatccggggtgccgggcaggcgctccctcgcttgggaaaagcggttgcaccaagcgaccttaaaaccgaaacaggccgcagcggcggcatcccaggcattcgaagaggagaaagccgtttgcgagcggccgatatcgaatcgctcgatggccaatcggtagacatcgggagtcggcttgtaaagacccaaggcgtccacggaaatcaccgcatcgagcagatccccgatcccggctcggctcaccgccgcttcgagcatcatcggcgaaccgttcgagaggatcgcggtatgaagaccggcgtccttgatagatcgtagaacgccggggacctcggagtagcaatcgagggttaggtaagcgtcgaggagatcctctcgaagagcgtcatcatcgacggcgtgggcgtcgagggcgaaatccaatccatcggcggttatctgccaaaagtcgacgtagcgtcgagagatggtgcgctgccagctgtattcgagctgcttgcttcgccacaaagaggaaatcgcatccgccttctcccccaaacgccaccgatggcgtgcgaccgccgagtgcacatcgaaaagcgtgccgtaggcatcgaagacacaagcccgaatgccgatgaatctccccttcgccgccggggggatcgttcggccggatcgcagggtttggctcatgcgctttttcctcgggtattcgctcggcggcggatgcggcagcggataagacgcgcgtaagatgcgcaagcaccccgcctagcataccctcgatcggcgcgatctcgcacctccttggctgtcttgccccgcttgccttgcccccgccgggatcgaccgctcattcaagccgatggattcttcgatatccgatatgcgctccttcgaatgagggtcgaacggcggcaaggatgagatcaaagcagatcttcgggattgaactcgtcgatggaaatctgccgatcccggggcaaaggaccgctttggaaggcgcgggcatcctcctcgagatcgaagagctccaaatccgtgaccgatttatagcccccggcgatatattccttgaagaccagcatcgcgatatgccttctgccatcgcttaggtcttccaagtaatcgcggtagctaccatcgtggctcatcagcagtacatcgccctcgtgctcggcgatggctgcgagcattttctgaatcccttcgtcgaccacctctcgggccgtcccctcgggtccggtgagcaggacggtccgaaatccgatcgacttgagcgcttggatgaagggccatgggatgtaggaggtcgcattgtgaaaaaagaagggcttgacgttgcgaccgctccagagatttttggcgaattccaaaacccgatcccagcgggggcgatcctctccggtgggctggtgcccgatgatgctccccaaggtcccgtcaatattttcgccgtcgaccagaagatagagatccttcgaatcttggccggcactgatcgttatcatttcgattttctctcgctgaaagttagggatggatgctcggtcggcatggattcgagccggtcttgcacccggtatttcaatccgaagggaaaatccccttctcgtgaatggttagaccatcgatatcgccaaaagttgcgcactttgtgcgaataaaaagaattttttgaaaaacggaatcgtccaaggcccaagggttccggcgatggacgaaaggtttttagcgcttgttcagtgtacccaatgccgccatcggtggttggcattgctcccgatcgaggtggccggtcaacggcgtgaacaccctcggattgcttcttcttgccgatatcgctcgcttcgagcggcttcgagtctcgctcgcttttcgccgcctttcgaagaattgtcgttccccgccctcgccccgacgaaggcgggatcgtgcgcgattttccggcgcatcttcgagcctcggtgcgggtgtccctgacagaagatgcaatcggggatatagtctaccctttggcggtgcccgtgccatgggtccttcgatccgcttgggagtgcgcaaagcacgccttgccggctcatcgagctccctgccgagctcccacgggcgttgcatgaacgctttatcggcaggtcttcacgagagccggctgcttgtcatatcccgacaagcccatcgtccaatagggaggtttttcgagagatgatcgatttcgtggtgcacgacgaaggcgatagcgtcggtgtcgtggtggtcgagggggtcgaagcgggcgcggatctgaccggttggatcatggatcaggatcgggagattgcctttcgggcggtcagcgatatcccgatcggccacaagctcgcgatcaagcccctgcaagcgggtgataccgtgatcaaatacggggtggatatcggcaaggcggtggcgaccatcgctttgggcgagcacgcccatgtgcacaatatcaagaccaagcgttggtaagcccgtcatcgtgcgaagcgcgatatcgggaaacgcaggagaaaagcgaagatgagcatcgatttatcctctacatcctttcgcggattccgtcgcgagaatgggcgaatcggagttcgcaaccacgtgatcattcttcccgtggacgatctgtcgaatgccgcctgcgaggcggtatccaataacatcaagggtacgatggcgcttccccatccctacgggaggctgcaattcggggcggatctcgatctgcatttccgtacgctgatcggaaccggaaccaatcccaatgtcgctgcggtggtggtgatcgggatcgaggagggttggactcggcgggtggtggatggcatcgccgcctccggcaagccggttaccggctacggcatcgagatgcatggcgatcacgagaccatcatgcgcgcttcgcgcaccgctcgcgagtatgtgcaatgggcttcggagctcgtgcgcgaggaggccccgctttcggatctatgggtctcgaccaagtgcggggagtcggataccacttcgggctgcggtgccaatcccacggtcggcaacgccttcgacaagctctatcgtcatggagcgacgctcgttttcggggagaccaccgagatcaccggcggcgagcatctcgtggcggatcgctgtcggaccccggagattcgcgagcgcttcatgttcatgttcaaccgctatcaagagatcgtcgagcgtcataaaaccagcgatctctcggagtcccagccgaccaagggaaatatcgcgggcgggttgaccacgatcgaagagaaagccttgggcaatatccagaagatcggccgcgagtgcatggtcgacggggtgctcgacaaggcggaggccccgaccggctccggcctttggttcatggattcctcctcggcggcggcggaaatggtgaccttgtgcgcggcctcgggtttcgtggtgcatttcttcccgaccggacagggcaatatcatcggcaatccgatcttgccgaatatcaaaatctgcgccaatccacgcaccgtgcgcacgatgagcgagcatgtggatgtcgatgtttccgggttgctgcgtcgggagatgacccccgacgatgccggagatgccttgctcgacatgatgctgcgcaccgccaacgggcgattgacggcggcggaggctttggggcatcgggaattcgtgctcacccgtctatacgagagcgcttgattgtcgggcggatagctcctctctttcgagacatctcccgtccatcggatcggcgaggcccgttttttcgattcggctttcgatctggctttcgattcggctttcgattcggaaattcttcggcggaagacggtgatccgtcatccgcagatgatcgttccgctctcattcctcgtcggcgatggcgggcgctcttgcatgagttgccgccggcaatcgccccatagcactttttacaagcgcgaagccgtgggcgatcccctcgttgcatcggcgttttgcttatcgggaggtaagacgagatgtcttttcgcatcgatcgtgtggtattcgcatggtctcgtatggaagcgttggccggagcctttgcacgggtaggcctctctaccgactatggcggcatccactcgaacggtgcaacccatttctccaccttgggtttcatggacgggagctatatcgagatcgtctcggtgcgtcagccgggtcagcaggccccggtctggcaacgccatatcgaaaccgacggcggcgcctgcgcatggtcgatcacggtggacgacatgcatcggatcggcactcgcctggccaatctcggaataccgctcgacggccctcgggattccgctcgccgccgtcccgatggcgagagcgtcgaatccgaaatcatgttcgtcggggccgatggcatgggctcgctccatcccttcatggtcagtgaccataccccccgccgaaaccgggtgcaggtatccgaaagcgtgcgtgtcggcgaactcgagggaatcgactcggtgttgattgcggtgccggatgtcgaggccgcagctcttgagatgcaaaggatctacggtgccggcgagccggtcgatatcgattcttccgcttttcccggccgcatcatgctcctcgaaggcgaaccggtcagcctcgtctcccctgaaagcgccgacgatccgatcgccgatctgatcgatcgctacggtccgaccccctgcgggtgcttgatccgaagccgcgatatggccgcctcgcaagagcgcttgcccctttgcccgaccggggttttcgccaagcgcccgtttgcatggatcaagttcgagggctttgacaatctcaatatcggggtgatcgcagcggagtgaaggggggatttccacagggatccaccccacccatcgttacgatcgagcctcgaaatccggcggatcctcatgctgcgataaagggatgctacatacgaataacgtgcgaatacgagatagaagaagagactgatatccgcaaacctaggctgttttcacgccatcggccacgagctatcgttctccgatgaggcggggccggaggctctcgaggagattcgaaagcctcgcacgggccagcatcgcctttgccgaaaacagcaaaataaagcggcttgaaggcgcaagttttttggaaaaaatcgatgaatttagaggttgttcgttgccgaataaggtcgtcgttggtgatcgtggacggattagggcttggatgaatcggattgtgaagcggcacccgaagcggcgggcagcggtatctcgtgcacccatccgaagcgatccggctttttcgaggacgagttgtactggatatcggtcagcttttcgaagagccttttcgtcaactgcccggtgcccccgtttttgacatggtagacctttcctcggtattcgaaagaaccgaccggtgagatcaccgcggcggtgcccgctccgaaaacctcatcgagctccccgcttctttgcgcacccaatacctcgccgatggcgaggcgacgttcttccaccggcaccccccactgtctgagaagttccaaaaccgaggccttggtaattccatcgaggatcgtatcgccgggcgggggagtaacgaccgtgcccgacatcatgaaaaggatattcatcgaaccgacttcttcgatgtatttgcgctccgctgcatccaaccagagcacttgggaaaagccgcggctcgaggcctctttctcggccttgaggctggccgcgtaattcgccccggccttgatcgagcccaagccccccggcccggcccgcgaatagcgatcgcagacggtgatattcaccggattgaagccctcctgataataggctccgaccggaccggtgatgatgaaaaagagcacttcctgcgcggatttgaggccgatatagggttcggtcgcgatcatcgtggggcggatatagagcgaggttcccttggatttcgggatccattcgtgatccagttccaccaattcccggatcgctctcatgaagatctccggatcgacctgaggcagatcgacccgagatgcggattggttgaagcgcgcggcgttatcccgaggccgaaagagattgatattcccctccgggttgcgataggccttcaatccctcgaagatcgtctggctgtagtgcaatacgagagaggcgggcgagagcttgagatccgagaagggccgtacggtggggtcggtccatccgccttgttcggtccagcgcatcgtgaacatgtgatcgctgtagatccgtccgaagcccaaagcgctttcgtccgtaggcttggggcgccttatttcgggtggcgctatttcgattcgaaattccatcttgagtcgtcagctcctttgataaccgccccttgcccggcacgagccgccttggtccgaaccgctccatgatacgccggatatcgtacccgtatgccggtaggggcgagtcgattttcgatcgaagatccaaccgagaaccggtgcctttttccgagggagaaccgaatctttcattccccggagcctgccgacggatttcgcagacgacccaccgatgaggtcgatccagtaaaccgcctgcagccggataatagcctttaagcatacttcgttttaggcaaaaatcactttttcttatgggcatgcgcttttctcggcaagatcagcgccagccgatatccttatcctagtcacaatctcggcttcccgccgttcgcgccataagccccgagcccgaaataaagagccttagggggttgccccttcttgggtattgggtatgcgaagtgcgaaaaaaaagcgagcgcccgcgaagcgatgtgccatgcgctcgcaggttcgctcagcctaccttgtcagcctaccttggatgagtagcaaccgcgcccgatcgcaaccacctcgccgcgatcgtcgatgacatccacatcaaccacgccgatcgttcgtccggcgcggcgtaccttgccgatcgcggtcaaatcggtatcgatcgcaggacgcaagtagtcgattcgcagattgatggtcggtaaagggccgccgtaaacgatggccaaggcgagatctccggcgatatcgaccaccgccgccatcaccccgccgtgccactgcttggatcccgtcacccgctcgaactcatcgcgcatcggaacttttagggtcagcgttccggcgctttcatcgagcgagatcactttcggctcgcagaagcgatgaaaggaggctttagccagcatctcctcgatcttttcaggggtgatcgtctcgctcatggaagactcgggctctcgatggggtggatgatcgctgttgatgattcagtctaacgggcgcaaagggcgggggcgttcggagcgccccgaaccacggcgccgaggactcggatgtgcaggagatggaaagcgggaaggattggatggaatcccgaacgggcggcaaaaagcaagaaggcagcccgtaggccgccttccgaggtgtgcgaattctcgcttgttaatctcagcgaaaaccccattccctaacccgcagtatacgcaacgagctggcaaacgcaagccgacggtgtaatattcccgtcatcttaggtggtccctccatgacaagttgtttcagtaccccattccccccatcgtataatctcaaacgtgctcttcgtagattcgattggagatgaaacggtggaaacaaaagacgcgatcaaatatcgattgggcttggatgtgggcaccaattccctcggctgggcggtgatcgaattggatgaggacgatgcgccttgcgccattttggccgcgggctctcggattttctccgacggtcgcgagccgaagtccaaatcgacgctcgcggcggatcgcaggcaggcccggcagatgcgccgtcgtcgcgatcgctttttgcaacgtcaaacctacctgatggatcagatgcgaaagatgggtttgtttccgccaagggattcgcaagaagcacgggagatgcagaaaatcgatcccgtcgaactgcggggacggctgctcaccgaatccgcacagacggtccttgccgatatccgaagccgtagaaaccggctcggccaaccgctgctggcaccgggaatatccgaaggactcaagccccaatatctgatcggacgagccctgttccacctcaatcagcgccgcggcttcaagagcaatcgcaaggatcgcagcgatgaagtcaccagtggcaaggtacacggctccatccgtgaactgctcaaacagatgggattgccccaagatcgcatcgatgccatcaaatccttgaaagaaagagcggatttgacctacggctcgttcctgtggaatcgccgccgcaagggaggcaccacccgcgcccgcatgggcgaagatggcaagctctacgagatctatccccagcgggaactctacgaagacgagttcgaaaaactctggagtgcttgctcgcaagagttccccgagatattggatccgagcaatcgcgagaagatccacgaagtgatcttcacccagcgtccgctcaaagcccaggagcggggacgttgtgtctattgcccggatgaggatcgcacctaccgtgccctgccgagttttcagcgttatcgcatcctgcaagaggtgaataacctctcatggtccaccagcaagggtaccaatgaattcttgcgagatcatatcgatatccgtgatcgaatcatcggcgatctcgaggaaaaaaagtcactcgccttcgaaaagatgaaaaattatctgaaggaggcggagatcgtcgatgagaatatcgttttcaatttcgagtcggaaagacgcaaaggcttcgatggcaatatgacatcgttcgagatgcgcaaggataaatgtgtagggccgctctgggacgaatgggatttggatcggcaagatgcatttatcaatgcgatcttcgaacaggtacccgataaaaagcgctccggcgaatatcgtgagcaaaccgatgaggaagttctggaacggttggtatccgacttcggcctcgatccggaaaaggccgaaaattgtttgaacgctcggttagatgacggcaccgccagcatttctcccaaagcggcacgccttctgttcgaaaagatgaaaaacgagtgtttgcatcaaccggacgccgtagaggcgctatccgcagagcgggatgatttcgaaaatccctatacgcgtgccggaagagggaaggtgatcggccatctaccctattatggaaaagcattcgaagatggtcgccatattattcccggcaagcggaatcccgaggatgaaggtaatgacctgcaatactacggtgggattactaaccctaccgtgcatatcgccctcaaccagatccgtattgtcatcaacgaactgattcggcgattcggtctcccacattcgatcgccatcgagttgggtcgggatttgcctcaaggcgccagatataggagtggattcgagcgactccagtccgataaccagaacaagaatcgggagatcgatgagaagctaaaagagctcggtcaatacccgaatcgtgataatcgcttgcgtttgcagatttggcgcgatcaaaacgaatgttgcccctatacgggggagatgatcagcgtttcggatttattcaccgatcgcgtccaagtggatcatgttattccgttcagtagaacgctggatgacagtcgcgccaacaaggttgtttgctttcaaagagccaatgccttcaaaggaaataggactccttgggaggcgttcagcgaaagcccgcagaattatcactgggagtctatcgtggaacgggcgcgatccacgacctatcaaaccaagaggtataacagtagaaagaagcgatgggaggatatgacgctaagccaagggcgcaagtttcagaaggattcgatggatagatatgaaagagaaggtggctttcttgatcgtcatatcaacgatacccgttatatcgggcgagttgccagagagtatctggagaacatctgtgatttcaggaaaatcgatgttgttacgggttccctgaccgcgctattgcgcaaatattgggggctgaacagcatcttgaataatagagataatgatgaccagccgaagaagaaaaatcgagacgatcatcgtcaccatgcaatcgatgccattgtcgttggcatgacatcacgttcgatgttgcagagagtctccactgctaccaatctcggagggaaggtcgaatccgataaattgctcattcgcaacatcgatccgtgggagaagtttcgtacggatgttcgaaatgtagtgggagatattaatgtctcgcaccgcccgactcataagggatcgggaaagaccggtgcgagagtcactacggatggtcagctacacaacgatacggcctatggaattgtcggcgaacttgacgacgatagagtcgtgctgcgcagaaatatctctcaaatcaccgatcccaagaagatcgagagcatcagggataactatctgcggagtgtttttcaccaagcatatatagacggcaaagccaatggcgttgccagcaaagcgaaggaattgggtatccgatccatccgttgtatcgagaacctgagcgtcatccccgtccgcgatgcttcgggaaaagcctataagggctataagggggatagtaactggggactggaagtttacgaatatcccgccggacacgagaaagaggggaagtgggagggtatcgtgatcactcgtttcgatgccaatagcagcggctttcagcccggcgtgacccgtcgtccgcatcctgcggcgaggcttgttatgaggctgcgtgtgaatgattgtattgagatcgaaaaaaatcataccacgcagactcttcgaattcaaaagataagcaaggatcgtatctatatggctcccctctgcgaggccaatgtagatgcaagagatcgatcatcagaggatatttttaaatttctaccagcaggcttaggaacgctcaaaaaaataaaaacccgcaaaatccacgtcagcccgaccggcctcatcaactacgagaaacgctagtcgtcactcatcatggtcggtcagatcgtcgagatcaccaaaccgggttgctatttgcgcaagcatcgcggcttcatggaagtcagcgagaattccgaggtcatcggacaagttccactcgatgatattggctcggtgatcatctcggtattggggtgctcggtatccaccgccctgatcaacgagttggcggagttgaacattccattggtcatgtgcggcagtaactacctgcccaccagcatgaccctcccggtggcgggttatggtagacagctgcatgtcatgcaggcccagatcaatatgagcgaacccagacgcaaacgcctctggcaaagaatcgttcggggcaagatcaagaatcaggcggcggtcatcaagagcatcggcgaaagtaacgaacgtctcctacgtttggcggcatccgttcgctccggggataccggcaatgccgaggcacaagcggcccgcgattattggagaaggctcttcggcaaaggctttcgccgcaatcgcgagaacgtcgatcccttgaatacatcactcaactacatctacgccatcgtgcgatcatgcgttgcgcgcggcatcagcagtgccggactgcacccttgcttcagcttgcaccacaagaatccgcaaaacccgatcaatctggttgacgacctgatggagccctaccgcccgatcgccgattacttcctgtcgcttcgggtcaacctgcttagcggtaggctaacccccgaagccaaatccgagttggcggcaatcaccaacctcccgatcccgcaaggagaagaagaaccgcccctatccttggccgccgccaaaatgtgccgacaagtggcccgctactaccaagaggaagtcagcgaggtagtcctccccgaactaccctatccgctgcaggcaatggcaggatgagtcggcgtaccttcctgagcccttaccggatcatgtgggtcttcgtcatgttcgacctgccagtaggtaccaaaaaggaacgcaaacaggcgaccgtcttccgaaatgacctactgaacctcggcttcgagatgtcccagttctcggtctaccagaaatactgccactcgacagagaaagccgaaacggtcgacggacagattcaaaacctcctgcccccgggcggaaaggtggacatcctgacagtcaccgaccgccaattcggcaacatgcgccgcttctatgcccgaaaagacaccggaaaaaatgccggaaaaccaggccaactacacctgttctaatcaggttttctcgccacccaagggcaaaaagcccttggatatcagcgagatacgcgcaaactgattatacgatggggggaatggggtactgaaacaactccgctttggtcatggttcatctgtacgagttcaaaatttaagagcactatgaccagaaggctgaaatctactatacggatgtgctcgttctcactatgtcaaatctctcctcttgcacggacttcaaccgcagacgcaatgcgggtgcgaatttcctcatagatggcaatgtcaatgccctcggcgacttccagagtcacggcgattccataagctacgggttgatcaatttttccagcatcctttcggcaattgaccttgatggttagcgcgtcttcatcagttagtggaacggcttgatgcccgtcaaacacttcatgctgaacggtacctctcctaacagcgttccagtccgcattctgtcgatcagatgcgagatcttttcttggaacttcaaaccataagctcgcagcgcgatagcgttgggtgctggctactaccggagatagccaagccagagtcaccgtcagccgtcgccactctctgcgcgcacccaacgatggaggcaatggcaaattgaataagtgagcctctccatcgccgagttgcccaaagccaagcaatgttgcccgctgctcggtgcaggacagaacccgttcgctatcgggcacgccgtatccgagccaattactgatccaattccgaacctgccgagcattacttggtgtccgaagaatttcctgaagtcgatctccaactttgccccaagagcaaccatgaataaccatcgctttgagtaacggagccagatacgtattaaactcaatttcgggagattgctcctcaagtatgtcaagcagtgtgtcatgaaatacagctgccattctagaagtcaaagcggcggcgttactggttccataaagatagacggtcttgttcagttcgccagatatggcgctcgatgaggccaccttgtttccaagagcgccttgcgagactcgaagaacgtcaaaactcgcattcgtcgtgttatctaagggagtcctgtaaagagctcgacctccgttgaacagaaggtccggcttgatagcccttcggtaaccgcttccaaacggggacgcggggctgggcaaaaggctttgaaacagattcaccgcttggccaatgtggctgacgacggctgcatcattgtggagtgcacctaccgttacaccgttgatgctttcgcctggggagaaaatcttccggtgtcgcgcatctctgtacagtgctctgacgatactggcttctttatcgctatccgccaaggcattgaacttcgctttcggaatgcctgtatcaattctccttgagtgattgcccgcactaatgatgaatagaacgccatacttcacactgagccaatctagaaggcgagccaatggacttaatgcttgggtaaacggtcggtgcggatcgccaatggagaaattgataattctgattgttggtgccgctgcttcagccgagccctcaatctcgaacatgcggcggacggcccggtgaatatgatcgaccaacaagatatcgtctgggatctgttccgggtacggagattcaagcgatggggtgggtttcataattggtcgcacatagacatggcgtgccaacggcggctcgtcatcactcaaatcgccgcgaacaaccagagatgccatagcggttccgtgcgctcgttccggaatgttgtacgccgaggcgtaattgtccggatcgtcgataatcaaccgatcctgaagcaacgcatgattggtcaaaggcaggccgtcgagaattgcgacaatagggtcgcctgttgggagactcacctcttctacttcgtgatccaacaactcatcttcaaccagacgttttcctgctgccatctgcccaactggcctgaaaaacatcacactgtcgcacttgatcagctctacttcgggatgatcaataatttgttgagcggcattggcaggaatttccgcgagcaaggcgtggtaggcaatattggggatggtgcagtttctcaacaacgatccgccaagtccttcaatgagtgcctgaacttgcttttgagcctcttggcgcttatcgtcagcgcctcggaaccacaattcgatctcgaaacggatggcacggcccccgtcgtatttcaagtcctcgcaccaaatatcaagagcacccgtttccttgatccgatcttgaacaccccaccggcggatatccttgagatgcctaaatacatcgcggaacttggtcagtccatgctcgaaggtcatactcgggtccacttgatatcgcttccatagcgagagcatttcacgtaatgcctgctggttggtcatgacgaaatagagtcgcccgctgagttccttatccgcattctgttcgttgtagaaatcctcgtcgggcacgatttcgtcagtatccaattcgtccatccattcgagcccggcaatccgcttaacggcattggcgaaattctcgacactgccaaccgtttcgatcaccagcacctgctccggttcggcccctgcggcagtctgctgcagctcgacacgccgctcattgaactcggtttgaagtcgggtgaaaattggagaaagccgttggccttgcctgtcaatagacggtttgtggatatttggaaaacctgaacgccgccgagaccggtcggcggttaccggtgttggaaatagcaatagcgggcggtctgccattattcatcgccttcattttgcggtttcgccttgaccgtccgcgccgcccagttcttcagggtgcggtccacgatcttcttgatgtcggagcagggctgtccaagcacgtactgccggaagacacttgctccgaactcttcggcttcggcgaaattgactccatagagcttcttcgccatggtctctggcgtgtagccaagcggcaagttgattcgcttctcaaatttggcgaaccattcggcaagccgcgcgcgcgtaggttcgggcaatgtcatgcgaacttggaaccgccgccatacggcgcggtccagcagttcggcgtgattggttgccccgatgacaacgacatggctcggcagcgcatcaatctgcatgagcagcgagctgactacgcgcttgatctctcccgtttcgtggcggtcgccgcgttccttccccaaggtttcaaactcatcgaagaacaaaacgcacttccgcgtgcgggcgtgttccaagagccgatgcaagcgaaccgccgtttccccgagataggttccgacaacgccttcgtaacggacgatcaatagtggaaccatcagggcgtgagcgaatgcctcggccagcgaggtcttcccgttccctggagggccgatcaacaagaggcggttgcgtggctccaagttgtatgaacgcagcaaatcaatccggtggtgctcctgcgcgacctcttgagaaatctcaagcacctccttgggcaaaatcaggtcgtcgaatgatcgctcgggcatcacctcttggagcaggttggacaccttctgctccagcaccgtgcttgcaccattcggggcggccctatcggcgggcatggcgcagagcaagccctccagcttgttggcaaggacggtatgcctcttcgctctttcctcggcgatgatggcttcgacgactttccgaaatctcaccttgtcgccagccattgcaaagcgaacaaggtcggtcagcagatcggctctagccatgggtggcctccacgtggatatcgtcgtcggcaatcatgcctgaccctcgatgatcgaccaaactcgatggtagctagccccgcgctcgcccatcgccttcgtccactcgcttacgttggtcgctcgcagccgcccacgcacccggtgaagcggctcttccgcagtgacaccaagatgtcttgcgagtttcggcgccgcaattcgcggcactccgagaagccttagagcgacggcctcgtcggtgttgaccccgtagtacacacgggcaggaagattgcgcaggctgcgctgctccactgccgacatctcatcaaagtcgtctttgagcatgagcgactgcaatgcagatagcccccaagatgcggtttgtgtcagcctcccgaacacgtttcggcagcacttggttattgcgtccacggaattcgcctcggcatcgctgccttctttctcgtcaggctgaaagtagtcggtcgccatctcggtcagaggacgcccttggacccaatcgcagatgattcgggcgagcatgtctccgtttggacttttgcctccggtgacatccctgagcggctctcgaagctccggcacttgcagcagcaatcccatcatccgccggaggtcgtcttttctcccggcgaatagctcgggcgaccaaacatcgtcgggcaactgttcttgcccaattctcgccaaggtattgctgaccgattcccaagagaatccggttgcatctaccaaggcaagcggtttgcccttgattctttccgcgtaggcgtacacgccctgaaccaaagcgtctgcccatccctcgtggctcttgcgaagtgcttggaagccaagcgtgcctcgtagaacctgctcgacttgctctgcgaactgctcgtggttcccgatctgccggtacgtgtgtgccagatattgaacgaaggcggaccaacccggctgatacgaaagcgactccaatctaagcagcgaacctttgtcagccacagattgcaccatctcgataagcgtcgagttgagctccgcaacggaagagtcgatgaactgccccagtgcttgttgcttgttgtcatcttgcgcggcaagggcgatgacacccaagtcctcttggtccacacggcccgcacgaccggcgatattccagaagtcttggggaggcatatcgatgcgaaaggggaacttgcgcgtccggtactggtgacttgcaaatacgatgccggagacagggaagtttacgccttgcgcgatggtggtcgtagcgacgagaacgccaagccgaccggtttccgtcagccactcgacgagcgtgcgtgcgtcctcggacatgcccgcgtgatgaacgccgatgccatattcgagcaggtcagcgagggggaaatcctgtcccatctcatcgatgagaaactgctgcacatgtcgcaggtcgccgtcgagcgctctcctattctcgtcaacccgaaaagtgtcggcgatgcgccatgtcgacgccggcgtgtctgcaagcacaatgaccgtgccgcgcttttggaggatctgcgccgtcgcagcggcaatcttcccctgcgatccattcacttcggaccaagccaagcccaaaggacgcttttcctgaaagtcgatccgctccggaatatcgagggtgttgcgagacgtgtgccgtgagagaagcgatatgctgaaatcgcctttgctgtcaccgcgttcggcacgcgcgatggccacgacgcgatcattcggcgtccaatcgacaccgaggtcgatgctcttgttgctgtcgggcgacagccagcgggcgatttccgctccattggggatgaagggggtcagcaaaagaaactgagcgtagcggcattcgcggttgatggtcgcaagaaggagttcgagcttgatcccccgatcatcggaagccaaaccgtgcgcctcgtccacgacgacaagcgtgagggggcgaccaatcctctcctcccacccgccgcgcagcatgaggtcgagcttctccggggtggttaccaatatccgaaactgctgagcactgtcagcctcggtcagcattccggcttccaagccatccacttcgagcgccgggctgactttctccacaaccgtgccaagatgagagaaatcgcggcgcagtcgcaccgtcaactggttcaccagcgcgcgtgtgggcgccaaatatgcgatccagcccttttcttggtcgaactggttcagcgcttgaagaatgcgaaactccgcgatgaacgttttaccgctcgatgtcggcagactcacaaccacagagcgatgaccggatcccaaaaggccctcttcgcgcaaggtacgcctctgcggcggcagcatttcgaagattgggcggcgggctgaatcgcgatccatcaatgactcgacgaatcgagtcaccctgctattaactgcgcgggtaaccgtccagatactgttgtcgaccatcaggcgggaaactcgcgcgagccgacgagacatcacctccagctcgatgagccggccgcgagccgatgcgccgattgcccggtcgaactgagcttcgagctgctcgcggatgtcgtaatgcccatcgatagaaccctgcccgagataggttcccaacagatctgcggccttcgccagatggtattgggccatgagttcccaagccggttgaacgtcctggcgatcctcggccgcttgcaggaacgccggttcgacagattgctgggcacggcgaagagcgacgactcgctcttggacgatatcgagatcatcccatccctgttttcgcaaaaggtgcaaccaaacatccaagaccgacgaccaaacccgaatgccccaatccggtgaatcgagaggtagcaccggaaacggccgctccgtaacgatgcggcggaaatccgccgagcgatctccgatgaccgcaagacagcccaatcgcacaagccactgcgcagccgctaccggctcttgcggccatgcgagcgttcttgctatctgaaacgtcttcccggcaatgtctcgaagctccaacgtccgctcttcgtcatcgagtgcgtcgaacagctccagttcgagtgcgttcgtgacgaaccgaatctcccgatcatccagcttttgagttgcggagctcagtgctgcaaaaagccgacgccgactcgcctcggtcgatatctcgccaaggcgatctgcaccaaaggcggcatccttgacgaactcttcggcggacgaggacatcacagttttctccggcttgctgcacggtactgctccgggtcctccttgacaagattgacttcatatcgtcgccgatccagaacctccaagaatcccatttcatggccatccgctatggtgaccttgcctttcgattcagttaccgcaacacccgtttgtttgcaaagatccatgagaagtgatttgtcgatattcttgttctcaccatttgcaaggattgaagcgagatatcgagcagcgcggggacgcttggcggcatactccttgatgccgtcgaacacaacgaagttgagttcggattgaatcgcttcaatgttcttgggcacagcatcgagaattgcctgccggagttttccggcgaactcaaacccgctgggatgcaggatgtgaacgttcgccgaatccacgagaaaatcgaagtcgttgtccagcttgaaaatagtgtcttcgatgactcgcaacgtatcgtcaagtatgcgcacaagcctgttcttgctcttcagcatgcccttgaattttgatgccctacgcaaggctgttaggtgccggttctggtggtcggtaaagcgtgcgaaatagcaaaatacattggacggttcggccaacgctccagtgacgatgtctaggttcgccgcatcgtgcaactcacgaatggctgaaaccatttcatcatctttgggcaggtagagatactcgatgctgccgtgcttttcggatggctcatatctttttggaccatcctcgtctttctgcatcgcggcccatgtctcctgcaccatgtcgcgtaatgcggtcttcacattcttatccactggcaatgccacgaaggcctgttcgttgtctaaaccaacgccaaactccgttgtctgcacattcgcgagatcaaattcgagattcatgtgtcagcctccagatataccgtgttacttaggcgataagcgaccaaattctcgccagcggtcagaccgggtctgcgggtaatcaacacgtagtgtgtatttccggtgatcgaattgccatcgaccggtgaatacacagtgaagactcggtagcctcgcatggcaaagaataggttcatgtagtgcaaattcagatgccagaacaggaagacaatgagcacgagcgcggccaacatggcaaggagttcgcgcatattgccggggtcttgcgaataaagtggcagcagcatcgaaaacaaatagaccaaaagatgattgcgatggtcgtcggctccgccgatcttaatattgcggctgtcctgttgcttcttggccttgcagattcgcaaccataggaaagcgttcggcaacagaaaccccagcgcgcaaaatccgaggaaatagatatcggggatcaggctattcccgcgaatcgcccacagaataaacagcggtgaaatactgctaagaaccatcagcagacgggcaatcttcagaccttcgctgtggatacggaaggctggcttgggcatcacatagcctccggtttcagctcagattctattttgaagcacacggcgccgctcaacagactgggcagcaagcaatctcgaatcgcagcgagattcgaggattgttgctgcgatgccggcaacagatgaaaaatcgatgtaatgacggcttcgaacgctggcacaatatcgcctgccggtttgatcaccaacaacccatcaaaggttgcgcatgtgatggtcaggacttcgttcttggttcgagccatagagtggctcccg

SEQ ID NO: 813 - DNA, 23087 bp, synthetic construct
  source 1..23087: mol_type = other DNA
  misc_feature 1..23087: note = Synthetic
agcaccaatcccgctcaatgttgtgcctgcctaccggataccgggtgcgaacaatgtttaagcggcgcatcaacctgcatgaaagcttgccagaatgccggtaagtcaggtggttactgcgccgcgataggcagtacaaacccttccgcctgttgtgcttgtttctgagaaagtttgtgaaaaaagatggacgtgacccaagtcagccgattttgcgccccattggctttgaaaaagttgagtaatatcaggtatattgcgaagtctttttcggaaccaaggcggccaaaagccaccgcccaaagcctgcgcagctattttttcacaaactctctgattgacctccacacgaacttggtttaccgtcaaatccagagtgattactcggattctgaaggagcgcaccatgggattaccgaccattccgttgtcacataccgaaatcttccgccaacttcgtgcttttcaaatccgggacacacgttggtcgacaggacagacattcgggttgacgtttgtcggagacgaagcggagcgtggtttggttgaagaggcgtatcggttgtatcaatgggaaaatgcgctcgatccgatgttgtttcccagtttggtccaaatggaaaagcaggtgatcgacatcgcgcttgaccacctcggaggggggagccaaagttgtggttcttttaccagcggcggcaccgaaagcgttatgttggctgtcaaatccgcacgggatttcgcacgaaaagccaaccctggcctcgaaaaaccacaaatgctcgttcctgtgaccgcccatccctgctttcacaaagctgcccactacttaggtgttgagtcggttcccattccggtggatccacaaaccggacgggcggtggttgaggcctaccgcacccacatcacaaaccgaacggttctattgtgtgcgtcggctccctcttttggcatcggagccatcgatcccatcgccgaaatcggagaaatcgccctaagtcacaacataccgttccacgtcgatggctgcatcggtgcctttatgctgcctcttttacgcgacttgggagcaaaaatacccccctttgatctgtcggtccccggagtcacatcgatctccatggattttcacaagtacgcgatgatttccaagggagcatcggtcgtgctctacaacgacgccgaattgtggcgaaatcaaacgtttgtgtggtccgactggaacggatatgcgctcgtcaatccaactgttcagagttcccgctcaggaggtccgcttgctgcgacctgggccgcgttgcactacctcggtgctcccggatatcggtcgttagcaaaagacctcctgtcggcaacccaacacgtgaaagaacgtgtgaaaaacatgccttatgtcgatgttgtgggcgatcccgtagtgcctctggttgcgattcggggtaacgaacgtatcattttccacatcgccgaccgcatgaaagaacgtggctgggacatgcaccctcagttttcacatggaatgctccccgagtctgtccatctgaccattactccacgaaatattccacaaattggtcagtttcttgacgacctggcacaggtatcggaattgcccgacccgccgcttcccgctgcgctgtccacgctggcggcaatgctcccttatcttaccgaagatgcacttactccggcgaacgttcgcgccctgatggataccgccgaaatcaacgtcgactcgcctcagacaaaattcggtcacatcaatgtgctgctaaaccaactaaaaccggcacttcgcgaccgtctgtttttactcttctacgaacagttgttcgccgggcgcacttaggtgtgtggtgtgtgtagataattcccctaaaaaacaccagccgcctgaccgcctgtttccgcctcgtccaccaaagaacttgcggcataattttgtcggtgatggaccagtcatgaccaaaccacgacgtactccccagcaactgcgttctcgcgacaaagtcgaccggatcgtcgccgccgcccagactctgttggaacaggaaggtgcgtcgggatttaacaccaatcgtgttgcgcaactggcccaggtgggaatcggaacactttatgagtatttttccgacaaacatgaaattgtgcgcgcagttgcggcaaaggtggccgacgacgaagcagcacttgttctgtcctggttcgaaggtgtcgggagtaccgacctaccctcacatattcgcagtgtagtggatctagtgctcacgctatatgatcgacatctaccattatatgagtctatgtgggcgctagcagcccaattgcgtgagtccgtgcaacggccaggtcaatttgtcatcgtggcagaaattgaaaaacgcctcgctgccaccgcgactcccctcgctactcatgatttgcaggtagcggcctatctggtgtaccacattgtcgaagggctatgtcttcgtgttgtcagtgaaaaaccgttcgttcgccccaaatcagtctgggtagaagaaatttccatggtagtactgcgttacctgggactccataattgatccagatcatgttgtcgggatccgggggtagacaacgcgccgcagacgccttttctggaactgggggcggaaaaacggaaagataaggaggcaaatgagcaggataagggccgatggctgagagtgacggttgattgtccaatcaagtcaaaccaaaagaggaggtcagttttgggcgccctctcagccaaacggtctcggttggttttgtcttttgaaatcattgtgattcgccgcgttgtttgaagaagcgactaagctgtcggctaactacggcgacttccaactagcgtgagacctattggttctgcgcagggaggtggatcatgaagaccagcctcaaaacatcgcaactattcagttcgttatctgttgttgccattgcggtattgctgggcgcagccaattgtgaaccgccggtggaacccgacagccaaggaacagcgttgagtgtttgggttctggatggttccggtacccccatggcggatatgccggtgtttgttttagaccaaatgattccgaccgacgaagaaggttgggctcatttcgatggagtcgcgccggactgggtgtgggtcagcgttggcaacaccgcgttagtcaccgaatgggaaggaagcctggtaccgaatgttgaccagtggatgacggttgtggttaatgaatctgagccaccggttatcgaaccgccaatcggggtcaaacctccgaaaaccgttggcaacacgggtccaactgcaccggaagtgaaagaggagcacccgacaaacaaattggcaaatgacgacgtgctcactccgcgtccggtaaaacttccgtggccaccgtgcccaccagaccccagccaataagcgtctgcggcaaatgacaacgttggttttaacccgccttttgtcgacgctacaaagggcgggtttttttatcgggcgccaaaatcagccagcaccgacaatacgtaatcaatgtccgcaggtgtatgatcggcattgacctggaatcgtatttcctcatcccccctcggaaccaccggataagacaaacctgtcgccaaaatttgtgcctgaaacaaatggcgaaccatctgttgggtttttgtggtgtcgcgaacgatcagcggcactaccggatgcggccccatgatcacctcaaagcccaacgacaccaatccgctttcaaattgcgctgttaatttacgcaaggcggcaatacgctgtttcccctccgtgctgtcaacgatattcaatgcttccagcgccgctgccgcttctccggttgtgatcggattggaataaatatacatcggcgcggtctcgcggagataccgaatcaatgtatcggaccctacaacaaacccgccgttgacccccaacgcctttcccaacgtgccaatgagaatgtcgacaggctttgcactacattgctcctcggtccctcgtcccgtatcaccgaggcaaaataccccgtgggaatcgtccaccatcagcaccacattttcgggaaaatcatcgtccatccgctcgacaatgggtcctatgttgtgcaacggagccatatcgccgcgcatactaaacaccccgtccgttatcacaatcacccggtcggcttctccacgcccacccgccaggtgacgctccaactcttccactttgttgtgccgatacacctgtttggctttgggccttgtcaactttagcgcgttgatgatgcagttgtgattgagctcgtcgctgataaccaacgtatcctgggttgtcaaggccgccaatacgctaataactgtagaataggctgaactgaaaatcagcgcgctgtcccgccggaaaaattccgccaatcgctgttccagtgtgacatgtggccgataagtgccggaaatgaatcgtaccgcaccgggacccaccccaaactcccgaaccgctctctcgtcggccgccacaagccgcctatcccgtgacagcccaaggtacgagttgctgttaaatcgcagaaatggtttggttccatacccttccaaggttacacgcgggccgttggtgccggttggttcgatcatcgacgaaacaaccagttctcgaccttttgacacattgcgattttccagcgccgaaacctggtcatgtaataatttgtcaacgcgatgactgggcatatgcttcctcgtctagtaacttatgataacttaacttaaaccaaaattacacccgaatcacaatcgttttcgcaattgcgaaagcatatcgattaccatttcctgcaagccatatcgcggcgcccaaccccactccgttttggccgcggaatcgtccaacctctgtggccatgaatcagcgatcgcctgacgcactgggtcgacatcatagtcgatttcaaaatccggcagatggcgctgaatttccaatgccaactcccgaggacaaaactgcatcgccgttacgttgaacgcatttcgatggtgcaataagtcggcgggcgcctccatcaattcaatcgccgcacgaacagcatcgggcatgtacatcatatccagtgttgtatcctcatgaagaaaacacgtgtatttgccctcccgcagcgcgcggtgaaaaatgtcaaccgcatagtccgttgtgccaccgcccggcatcgcggaatatgagataagccccggaaaccgtaaaccacgtgtgtcgacaccatatcgagtatgatagtagtcacacagcaactcggctgcgacttttgtaatgccgtacatcgtggtaggccgctgaatggtatcttgaggtgtcggatcacgtggtgtacctggcccaaatgccccaatggagcttggtacaaacaacgaacatccaaatttatgtgccgcgtccagcacatgaagcaatgtctgcatattcacgtggtaagcccacaacggtttcgtctccgcggtcgccgacaagatcgccgccaagtgataaatggtccccacgtcgtatttttgtacgacttgattcaccctgtcggcatccaggcagtccagcaacacgaactggcccggcatgttttttccgccgccacgaatatctgcggccaatatccgctcatgcccgaatcgttcacataatgctgtaaccaactccgtcccgatctgaccgacggcacccgtcaccaatatccgtttcatctgatttgtcctgtagtccgcagatgtgccaataatccctcacaccctcgctgaatcgtcaaaaagacatcacggaacacgttgtgtccgcctccccacgggtcggggacatccgtttctggtgtattgtgagcaaaatcgagaagcaggccggtcacaacccgactttcgggtggtttgaccgccaaaatacgtttgaggttattttggtccatccccaaaatgtagtcgaactgcaaaaaatccggaggcacaaactgccgcgctcgatgggcggtcaaatcaatgccaaattcccgggcaacgcgcaccgaaccgggatcggcgccttcgccgacgtggtagtcgcttgtaccagccgatttgactaccagacgaggtcgcactccacggatttccgcgagatgaagcaaaatggcttccgccaacggagaacggcagatattaccaaggcaaacaaactgaattcgaatcgggatagaatcatccaaaagttcaaatcgatcactcatttttccacccttgtccaaaatggtcatcaaacacccaccgccccttccgggttggatgttgcaacgccgcctcaagttcttctaaataacgtatccgagaaatatgccttcctccaaatctctctacatgatgtgtatgtaattggctgtcgatcaatccgaaaccccatcgacatagttgttccgtcagggcagcaaacgccgccttggaagcatcggggaccagataaaacatactctcgccaaaaaacaggttcccgaggcttacgccatacaatccacccaccaatcgatcaccgatccaagcttccgcagaatgagcatatccctgttcaaacagttggatataagcacgctgcatcgactgggtgatccaggttccgccctgcccttgtctcggccgttttgcgcacagttgaatcgtttgaacaaaatcggtgtctagttgcagcgtaaatttcttttgcgtaagcactttggtcaaggatcgcggtatgtgtacttcattgaggtacaacacaaaccgtgggtccggagaccaccactggatcaattcgccgcctgaataccaagggaaaattccggaccgataagcaagcagcacacgttcgggtcgcaaatctccgccgatcgccaacaacccgtcgggaagtgcaagatgaggatccggaaaggtcagatcgttcttatttaacaaaaacaatggcataactttcagacgccagcttgagagcagcagccaataccaccttaccggtatgggccactcgcctatccacgtgttgtttatcctctctggcgtttgaccgcaaccgcggcccggtggacaacgaatccaggcttgccggcaaaaaaacgtccaccatgcccaaatcgattggtgcctccgcgcacttacccgcaagctcttgcaaagtccggactaaattttatcacatcaacaaaaaacaatagtcggcacccacaggtgggtgtagtgtgaaggtcgtttggagttgtttcgcagtgtggcctgacctggttggtcgtggtcgtagtcgaaaaacaccgccgaatcgcacgtgttcaggaggaatgtacaatgaaacattgggcaatcattggtttagtaccgtttatgttgttctcttcaattcatactgcatctgctgttccgaacctggttggttatgttggtgagttgttcggacccaccggattaccgctcaacacgaacattaatgtggatgtcgccttatatgattccgacgatggcatcactccgatttggtctgagtcattaggtatcgtaagcgtagacaaaggacggttcgacatcacgcttggactcgtcacgccattccctaccggtgcgttgtctttggttaacctcgacagcctgtggattgaatttactctggacggtgaaaccttaaccccacgtcagcaaatactcgctgtgcctttcgcacttgccgcgggagactccgagacgttgcaggggtattcggctgcggactttgttcaggtgggtgccgcgggagacatcgacgtgaccggagtctctatcgatggaaccccgattattgacgaaaacggccaatgggtaggggatcccacgggccttgttggacccaccggcccacaaggtccgcctggaccagccggtccaaccggtgctgtcggtgccacgggaccaatgggtccacaaggactccagggaccacaaggtccgcagggcattgccggtttggctggtccccctggagcaactggtgctaccggtgccacaggtccccaggggcccacaggaccagcgggatcgggagcatggatagacggcgtggggaccgttcacacgacggcgtccgtgggtatcaaaacctcaaccccgcagtcggcacttcaagttgccggcgctgtacaagtgggcaacgtggttgcgacatgtacccccgctcttgcgggagcaattcgatggaacggagtcacctttgaaggctgtaccggagcccagtggcgtacgtttgcgggcattgccaatgacggacagacacctgccggtgccggcctggactgcaaagacattttggacaagtcgttgtccttgggttccggcaactactgggtcgatcccgacggcgccggcgggttatatggaccggctttggaatattgcgacatgtcgaccgacggcggcggctggacacggatcgccgtcgatcaccccatccatggcacaacttggaatacgaatgcgctgaataccaaaaactttcgctacaccgaaatattggttcgttacaaatccggctccgtggtggccggccctacctaccccggaagttttttgttcgcaacgaaatccacagacttaccatactggtgggtaggcgggggctcgacgtgttctttgccgatccagtcgacacaaaacgtagttcaaatcccgtccaccaacgattatcggtttacaatcgcccatccttcggaaatcgtttcgacgttccaattgggctcggccgaaggggttgccaactgcacaaccagcgacaacagtggaaccgcctatgtggacgtctatgtgcgtcgatccagcacaccttttatgaaaaccatggccaaagcttcttgcaacgcggtcttaaccaactcacttagtcaaggcagcgggttatattggatcgacgtcaacaacgacggcaacacgaacgacgccgcattgacctactgcgacatgtccaccgacggcggcggctggaccgccttgacccccatcggcggccaccccatagcgggtcagtcctgggactccacaagctacaacggtggcgggatcggttatacccaggttcgatttcagcatctgagcggatcggtcgtggccggcccaacttaccccggatccatccccggaccgcttgcgtttaagttatcaacccaaggtagttggtacgccggcggtgggtcaacctgttcattgccggtccaaggattccccgcaaccacaaccgttggaaccaatgacttttacgtaacggtgggagcaacaaccgcccagattcaattgggcaccgtggaaggaattgccaactgcaccactagtgacaacagcggtaccgcgtacgaacacatctggatccgttgagaacggctgggagttccccattaagatgggtttacgaccatctgacgaagttgttcttccaactccctaaccctttgttcggccaggtcggcacgttgtttttcagctttggcatcctgcgcttcggcctctgcacgttgtctttcagcctcggcaacctcttgtgctttttgcgctttttcctgctgagtcgacaaccgttcaccggacgggcggaaccaccttgtagtctcgccgatcggtccaattttctttcagcgactgaatcagcaatatcatctgatcccgatgtcgactcgtttccatgggctccccatcgtcggtaatcaactcgtcgattcccgggagcggctccccaagatgaaatcgagccaattctgagttcattcgaacctccatgttttcccccaaacgaagacattccaaaaaataacaaattgttaaaatagcaataacgggaaagaaaatgggcgggactaaaaaaaaggcctgtcaggcggacccgacaggccaaattggtgaactttccgttcttgttaacggtgtctttcgaccaatggcgtgcgtttcctcatcggctaaaacggtgttacactcgccgagagaaacaaaaccaccaaacctggggggttgtcaataggtgtatcacatgaaactacgtttcggattggatttaggcacaaactcgatcggctgggctgtattggagttggataacaacggtgatcctaaaggaattatccgtaccggtgtgcggattttcaaagacggccgcgacccgaaaacgaaagtgtccttggccgaatcacggcgggttgcacgcggccaacggcgacgtcgggatcgttatttgcagcgaaaacgatatgtcatggcgcttctggtgcggtatgggctgttgccggaagatattgacgcgcaaacacaactcgttgacctcgatccctacaaactgcgcgccaaggcgctgtatgtgttgttgcatccccaccatttggggcgcctgttgtttcacctcaatcagcgccggggattcaaaagcaaccgcaaagccgaaaaaaaacagaaagatgccggtgtagtgaaagatggcgttcgtaggttggcggaaaaactcaaggaggccaaagcaattactttgggagaatacctgcatcggctgcactcctccggtcaacccgttcgggtacgacgaacggcggacaaagaccaagcctatgcattttatcccgatcgggcctccgccgaagcggagtttgataccattgttgcccgacaacgccaattgggacttcaattaaccgatgatcaagtcgcaacactccgaaacgcgatttattatcaacgcccgcttaagcccgtggaaccaggaaattgcactctggagccaaacgaaaaacgggctcccaaaggccatcggataacccacttgtttcggatttggtcagaaatcaatcatctgacctattcggtacccgggaaagccgcggcaacacttactttgaatcaagcccaaaaagcggtggagtttttgcagtccaaaaaagaaatttcgtttgaagaacttcgtgatctgctggaattggatcccgacagccgctttaacatggaatccgatgtccgtaagaaattgttgggtgattccattgccgatcaaatgtccaaaccaggtgtgttcggcaaaaagtgggcccttttggatgacgcggcaaaagacgaagccattgaccgcattcgtgacgaagaagacaacgaagtattatgccgctgggcacaagaacggtttggattatccgacgaagctgccaaaaactttgccgccgttcgggtagaggatggttttgggcgattgagtgtcaaagccatgaccaggatgattccttttctgcaggaaggatttacgtatgacaaagcggcaggccttgccggctatgttcacagcggaatcggacacgacggaaaccgggacaaattgccctattatggcgaagtgttgacaagatatgtggtcgggggaaccggcgacctggatgcccccgatgaaaaaaaatggggaaaactcgggaaccccaccgtacatattggcctaaatcaattacggttaattatgaacttactgattgaagcccacggccgcccccatgaaattgtggttgagctggcgcgggacttaaagatgccgccggacgccaaattacgactcgccaaaacccaacgggataatcaggctcaaaatgacaaagccaaagagttgatcgcccaagggggaggcaaaatctcccgcgatgcgttgttacgctaccggctatggagccgaatgtcgggactggatcatgtttgtttgtataccggcgaaaaaatccccgggagcaaaatcttttccgatgaattcgaagtcgaccacatcgtgccctattccgcgagcctggatgactcgtttgccaatctggcgttggtaacccgccgagccaaccgttttaagggcgaccgaaccccatttgaagcattcgccgggtcgccggcgggattcgactgggacgctatgttgagccgcgccaacacgctgagttccaccatggcgaaacgctttggtcccgacgcgcgggaaaaatacaaagccggagaggattttctcaacaggcaactcaacgataccgcttatttaagccgtgtagcccgggagtatttgaccgtgatttgtaaatcggtatgggtactgccggggcggatgacggcaacgctgcgccacatgtggggtctcaacaccatcttaagtgaccgcggcaaaaaagaacgaaccgatcatcgccaccatgccattgatgcgatcacgattgcctgcaccgatcgttcgctcgtgcaaaaaatgcagcgggccgccgggttacgcggagaagccgagttgggacgttcgggaacgttgggtcaattcgacccaccttggatcggatttcgcgacgaggtcaaagaaaaagtacgacggattgtggtatctcatcgagtcgaccatggaaaaggcggagcgttgcataacgataccgcgatggcagtccggggagacaaaccccatgccaaagggcaatgggaagtcacttatcgaaaagccattggtggtttgagcctcggacaaatcgaccaagtcgttgatagcacgctgaaaaaccgattgttgttggaagtagttcccggtccggaaaaggagttgacaaaacgacttaccgatttttccgaacgtacgggaattcgccgggtaaaaattgttgacagacaaggaaatatcgcgcagatcacaaatcatcagggtcagcggtataaggcctacaaaaaagacggcaactatgcactgtgggtggttcaactacccgacggcaaatggcgtgggttgtgtgaatcgatgtttgatgccaatcaaccacgaaaaatcccattgtggaaacaacaatggcccgcggggaaattgatcatgtgtttacatgaagacgatacgattttgatgcgccgggaggatgggaccgatgggttgtttcgggtggtgggaaccagcggggatatggtaactctggcctcaattcacgaagggggcgacctgcgagggcgagatcgaaatccaagtgaaccatttaagtatttcagtccacgagttgccggcctcaaagcacgaaatgccgttccagtccacgtcgaccccattggccgagtccgttctccccgaccgtttacggcattgacgccatgatgccgcgggtggtggacatcgctcaggatggccgttatctggcggttcatcgggggtttttggtggtccaattccacggcgaagaaatcacccgcatcccgctcgacgatctcaccagtatcgtggtccatgcccatggtactacctactccaataacctgcttgtacagttggcggaacgggggatttccctggttttatgcggcgccaattattgtccggtggcctggttgtggcccatcgaaggccatcatgtccaaggtgcccgaatggaagcacaatgggcggcaagcaaaccgttgtgtaaacggatttggcaaacgttggttaaagccaaaatcgaacaacaagaatcaactctggttgccgccggtaaaccggatttgggactaaaggggttggtgactttggtccggtccggagaccccgacaacatcgaagcccaagccgccaggagatattggacggcgttgtttggatcggattttcgaagacgccaagacggcgatggcatcaatgcaatgctcaattatggttacgcgattttacgttccgcagtcgctcgcggtgtagttgccgccggtttacatcccacagtcggcgtacatcatcgaaaccgtagtaatgccatggcgttggtagatgacgtgatggaaccattccgaccattgatcgactgggcggtattgcggttatcaaaagatggagtcaacgaagtcaacggggaatccaaaaaagcgctcgtggccgtactttcctacgatttacaaacgatccgcggaaccacaccggtagtgacctgtatttatgatctggcgatttcgatcgcccaatcgtttgtcgacggcgaagctcggttgtttttacctttgccgggtttgccgatagaaaggttggcacaaggatgaaccaaccaacgttgttaagtgggtatagactcatgtggatgatggtcttgtttgatctgcctgtaaaaacggccgacgagcgaaaaaaagcgaccgagtttcgccagtttttgttggactgtggtttcgagatggcacaactgtcggtttatgttcgtttctgttccggaaaagaccaatccgatacctttgttaaacagattcgcccggccattcccgttcgaggaaaggtccatattctttttttcaccgacaaacaatatgaaatgtcgttgatgttcaacggcaaaaagaagaaagaaagcccgaaaaaaccggagcaattggtattgttgtgatatgaaaatggtcggtttttgtaaaaaaaatgtcccagaacccgtgttattctcacaagttctgggacatggactttagccgatgaggaaacgcatgccaaccgcaactgctggaacactggggttccgtgcttccatactttagccgatgaggaaacgcatgccaaccgcaaccgcgcggttgaagccgaaaagcgatagtgtactttagccgatgaggaaacgcatgccaaccgcaacctcggtctgccacctacggagcgtggtcatactttagccgatgaggaaacgcatgccaaccgcaacacggcccgtgaccattcgacggccacgaaaactttagccgatgaggaaacgcatgccaaccgcaaccgaagagccgacggacggccaggggcaagactttagccgatgaggaaacgcatgccaaccgcaacgcagggcgtaggccgcaccaccgtaacacgactttagccgatgaggaaacgcatgccaaccgcaacaaggggatcgagttcacgcctgaatggtgtactttagccgatgaggaaacgcatgccaaccgcaactgatttgggtggcgggaacgccgcacatcaactttagccgatgaggaaacgcatgccaaccgcaactgatggccgcggcaacccgaatgctgatccactttagccgatgaggaaacgcatgccaaccgcaacaaatccggtgtcgcatccagcgtcgttgcaactttagccgatgaggaaacgcatgccaaccgcaacgagtgttcggatcgaatgtcgcctagtctaactttagccgatgaggaaacgcatgccaaccgcaactcttccaggctgccgtgcagttggccttgaactttagccgatgaggaaacgcatgccaaccgcaactgcatggtaggcactccggtggcgctgggactttagccgatgaggaaacgcatgccaaccgcaactgccggggacgtcgcagttgattaacgcctactttagccgatgaggaaacgcatgcctgtagtgtttcctcttttctgctctgatagcactctttggcggttagttaaatctttttgtgccctccttgcgctctggccaggttttcttcccggcgttgtttcggggtgctccaattaagtgcctgatgtggacgtatttcattgtattcctgatgccatttgttgagtgcttgccttagctcctcgacattgttccagtctctgggccagatacattcttctttcatggttcttatcacacgttccactacagcattttcggttggtgtgcctttttttgccaacgtatggttcaggttccatttttctgcccaatctttacaggtttggcttacatactgcgatccttggtcggttctcagttccagtgcctgtcttaagttggttgtatcgccaaattcttttttcaatgcggcatctaccgacgccaaaatcgattcggacgtttggcttttgactacttccacggccatcaatgttctgcatccacaatcgatggttgggacaatcgttacctggccatcttctttggtccacactttcgtaaagtcggtcgcccaccgttggttcgaatcgtcgaccactactcttttcgatgcttggtttgactccgagttatcattacgaaaagcctgtctcagatcccgcatcaacttccatacccttctggtgctcacccgcattccgtatgccggctgccttagcagtgcccacacttttcggactccccattgtggatatttcaacatgatgtccacaattcccgattttagacagtacagacttgtatattgcattattttcccacagagaatctttttagtctggttttatttccccaaatacaattccaagtatataactctttccatctttgcgccataccactcaaaaaagtgttgttggggtttcgacttgtcggaaagcttagggcataggctgccctaaccgttccggcttgccgtaaagcttagggcataggctgccctaaccgttccgacttgtcggaaagcttagggcataggctgccctaaccgttccgacttgtcttaaggcttagggcataggctgccctaaccgttccgacttgtcggaaagcttagggcataggctgccgttcgatttctcggtcgaagttgccattttgtaggcatggtaaagaaaccgctttctctttttttctgacgggcacatgaaaaaggtttggtcgcccgattaactatggtaacgtggcatcatcatcagttacagcgatgatacacaataaggagacatcacatgggttatacacttccagccaatttaggcgttgatgcactggacgaatattgcggcaatgtcaccgcaaatctcatcaaagcctccaaacggattcccgatatccttcccctgattccaccctgggaacaaatggaaatagagtttacgacctatctggatgaacgacgtcagttacgccgaaccctcaatcaggaacgagccggtgtgaaaatcaccgatgtatactgggacgaagacgtcggtgtcgtttcgtccgaatcctatcacgtttccggcaaaaaggccgaccaagatccttaccggtctttgtttggaaccacgaaggcagccgatgcacgaaagttgggccccgacgaagcaaccaagttcggcgattcgttgatcgaacgagccaaggtattgaaccatcccggactcgtcgtttccattgccgcttttgaagccaccaacaatgaattaagagatgccggcaaagcacgaagtgctgccgccagtgcggtggagttacatatcttgaagggccgccagatgattcccaaagtccaggagttgatcgacaaaaccgaggcggcattgcttacaatccgccccggtgatgacaaactgattcgtgccatcctcagcccggattagtctttatcgatgcatcacgagcatcaaaatcacttgcggattcccttcggcaccttccattgcttttccaaacactgttcccggtatgtcttgtgttgccttcatcgcatggcctggagtaggtgagcttgtcagcaggtctccgggttcaattttgccctggcgtggatctactttcactttgacgatacccgccaacgccaccggcgaccgattttgtgtgggtcccatggccaatccaaacgtgtcggaaaccaccccaaacgctgttttgtcgtaagccctggttgttttggaaaatcttgaattgttgaagtttttttgatcgacccgttcgattcggaccacatcacctggttcgactttttccaccaccggcacgttttccgccatatcgctgaacaacgcgccctgatttgtcgacaaactccccgacaacaacgcggtgccgttgccaaatatacgaaatccttgccaactggggccacaacacatcgccccgccgccgatgtatacactctcgttggtatcgccattgtcgtaactcatcaaaaacaacgtctcggcgtctccgccaggtgtgccgtttttcatgcagaaaccatcggtggagccgcctgtcgatcccgaccagcccgtgggcaaaccgccgcaataaccaaaacttaccgtactgccgcttttcggtaggttcagcgtggtcgtggcaatcgaagttgctgccggcgaacccgatgtcgtcagatattggctcaagtccggcttgttggacagatcgttataattcccactggttgcaacggctgccaacgccggtttgttggacagatcattataattcccgctggttgcaaccgttgccaacgccggtttgttggacagatcattataattcccgctggttgcaaccgttgccaacgcaggttttccggtcaaatccccgtaggctccgctaaatgccacctgcgccaccgatgtcgaaaacaagacccccaaacccggcagatcagatggaatcaaatattccgctgcgtccaacccacctaatctttcggcatcggaggccaacaccgtatatggcacggctacgattttctgccgcggtgtcagcacatcatcaccgacttgaatttcaagccacaactctgttgtcgataggtccattgagtccactggagccgatcccccctgccccaacacaaactccagccttccgccttcgatatccaggtcatcaaaggtatgaggtccccaattgggcacccccgacatcgcatcgggatacaatgccaccgtcacgtccatggtgccgctaaacggcaatccatttggagaccgcaattccgcaacatatcccacttccataggtactgccgcggccatcgatgaaaacagcaacaacccaatgataaccacagccaacattcgtcgttttgtgtccataaaccacctccgtgttgttcaaaacagccgggcagaagaaccccttcgcccgtgccgaaccttcgtttatcgctgtgccccattctataggattgtcggcgacaacggtaatggtatttagaattcgacggcggcaaaaagatgggggcgatggaatggatttctgcgaaaatgatcaaggggatcgattaagcccaaggtgttgacgctgatataaggctctccggcggcggttccgattctggcgcctgccattttgtcgcgggtttccaataccgacatggccaacgaagaactcaatagtgttccggaaatttccgtatttgacccatcggtcacctgcctggtcacctggctgcgataacagtgaaccaactcacgtttacgctccaccacgtgggatgtatcgactataaacgatggtgtgagttcgactcgcatgggatataccaacatctggtccggttgaaacggcggtagggactcggcatgagggaaattccgaagctgagcataaaataacgcctgggtgatcaaataatgtgccgccacatgatcgggatgccgctctttgctgggtggaatcaccacaacacggggcctcagtccgcgaatgaccgtgacgagttttgccagtgcggcttcaacctcttgaggtatcccagtcggaaaacaaccggcatcggtaggcttcgacaggttttctcccccatacgcacccactgcccaggccaatggcggcaataacgtatccggcagttccaaattggtgcgacagtggagtttcatcaacccgctcgccaattcacattcgccaatacgggtctctttcgtaccttgagacgccctttcaccccatgttaggtcgacaatccccgtacgatatccgcggtcggccatcgccagcatcacccccccacaaaacagctccacatcatcgggatgaggaccaaaagccactaggtccagtgtttctgtcgaaagttcggtcaggtttgccacaaaatctccttcgttccataggtaaacggcaccgtatgctccagtactttgtgtttaaacgtgttcatccccaccgccgcagcataggccacaacgctgaccacccgttcctggggaatgttgccggggcggatttccgcttttaatttggcccaacgttcggcactttctttgtcgcgaatgaaataggttttccgataatgctcaccgaagcggcgcacagcaaaattcaacgtattctcggtttttctgagcgctgattccatcatcgaccccatcggcacactggccaaatgcaattgttgaatgacgtctccaagcgacgtcgtcaacagttcggaaaccacgtcgggcgtcggaatccccccctccgtttgtgccaaatgtcgggcgaccagttgatcccacggcagtgataaatcgatggagtccaacccaattcgacgcatcaaggaccatgtacgtggcagcaaaatacaaaaactgggccgtggacatatcaccggcaacgtttggcggaacaacgaatacagcggaacacattgtgccagatacgccaactccgatggcccccccaacatcacggccgtcggcagcaaggaatcttgaatcactggccgcaacaaagccgaagtcgataccgcacgtggatcagcatcgattaaggcctccaattgccctgttgtcatggttcgatgttcgggataaccgaccacggtgtaggcgtcattgtcgttggcttcgaggcgatacctcggcccattcgcaccgtcgggatgcacaaacagcaacggagaccggggtcgtacataaaccgttggtgagtaacctaatgacatcaatcgttcattttgttcggccaacgcggcggaaatggtttcggtttgtaccaaagcttgtttcatcaaatcccgcgatgccgcagcaaactggggatgccgtgcatccacaaacaacaacccttcgtcggcaaaccattcacccagcgcgccggcaaaagcttcgctgtaggtggcatcaggacgatagtgacgccccaaccaatccatcacttcggcggcttttgcccgacccgccaacgcttcggcaaccgtgccgagtgcactggtgatctccggccccagaagttcgtcacgaatcgacgtttttggacggtgagtggaggccgacaacgacgttacgaccagaccgtcgcgagtcggaatggtagccgaccggatttcttcgatgtcgtgatcttcgttttgaagccagaagatcggcaccgcacgcactccaaactgtttgtgaatctgctgtgctgtgcgaatcacgccggcagctttataaaacgcaaacgcgggtcccaaaaacaatccgacctgttgcccagccactacggcgaccgtatttccttgctcaagccactccaaatggcgccgcgtggtttccgaaggatttggtgtggcgtcacgcaaagttgccactacggcggcacaacttgttttcgtcgccgcaatctgcaaccgatgtgcgatcgaacgttcatcgagaaaatggtgaggaaatatgccttcaacacgggtatcgttgttacaataatccgcggcaaaatgtcgaactttccggtctttcatcaagaacacacccatctcatttaacgttatgcccccgcttgattacccccaatacctatcacgttgcccccgccttttcacaagatgtctgtttttagcacaaaaatttcgccgcactaccgattccgggatggacatcggtccaggattggttgaaaacaactcgcccacatctcttttgagtttgtggactaacctgctaggcggataaggagtcagtttacgatgatggtttttcgaacatggttgttggtatttatggctggtatatggatagctccggcggtcgtggccaaacccgcgtcggaaatcgcccttggaatcgataagttggctattgccggaagcgtgctatacgtggcggcgcatcccgacgacgaaaatactcggctgttatcttatcttgccaatgaactgaagttaagaacagcttatgtttcgttaaccagaggagacggcggccaaaatctcatcggcaccgaacaagcggaattgctgggtatcattcgaacccacgagttgttggccgccaggagactcgacggtgcagagcaattttttacccgcgccatcgacttcggatactccaaaaccaccgaagaatcattacgattgtggggtaaagagcaagtgttgggcgacttggtgtgggtgatccgcaaatttcaaccggatgtgatcatcacccgatttgaaacggggggccgcccaacccatggacatcatacggcctcggctgttttggcggcggaagcatttatcaaagcggccgatccggaggcctatccagagcagttggcgttggtcacaccatggaaaagtaaacgacttttgcacaatgtgtctcactggaatctgactccggaaagcgacacgtctggttatcttacattagacgtcggaaaatataatcctctgttggggcttttgatgggcgaagttgccggaaaaagccggtcgatgcacaaaagccaaggttttggcgccgcggaagaacggggaccggtcgccgaatattttacccatcttgccggctcggatcccaaagaagacaatcccaatcaccgcgatccatttgcgggtttggatttttcctggaaaaggcaggcgggtggcgaatcggtgacccaactcgtgggtgaagccgccgccgaattggacatccatcatcctcatcgagtcattccaaagttgatccagatccttgcggttttggaatctttgccaaaaagtgcactgcgggacagcaaaatccgcgacatccaaaccctggtcgcttctgcggcgggattacacctggaagccaatgcaaccatagacgaagcttcccctggttcaactgttccggtccgggtggaagtgtatgcgcgggctcttgccgatgtgatactgcgttcggtgacccttccggatggagccgaattggcctccgaaatggaggttacaccacaaaaacctgcgattttgaatgggtcgctcctattgaaagagtccgaggcctggacaacaccttattggcttaaagaaccctcatcgccttatcagcacaccgtcaccgaactgtccgccattggcgatgcgatcggtcctattccgctaccggtcacgttttcggtgaatatcggcgggaaaccctttgaatggcagttgccgttatcttacaagtgggtcgatgccgtcgatggcgaacgccggcggccgtttgtggtcactccgcctgtcagcatcacatttgaacaatcggcaatcgctgtg

SEQ ID NO: 814 - DNA, 19346 bp, synthetic construct
  source 1..19346: mol_type = other DNA
  misc_feature 1..19346: note = Synthetic
gcgcaggatgcgcaagagcggcgatttacatggacgtaatggcaaatacttgctcctgcattatttgcactcccaccattccctggcggtcgtatgccgcgggcgcaggatgcgcaagagcggcgatttacatggacgtaatggcaaatacttgctcctgcattatttgcactcccaccattccctggcggtcgtatgccgcgagcgcaggacgcgcaggagcggcgattgaaaaacgttatttagaacctgtgtcaaaaaattctgattgcctcatcacttcccggttccataccctgccgctccatatcccgtgctaccttttcaatggataggcgaatttgttcgatgtcttgctgggatagatcttcatgatttggagcaactgcatgtccttttatccgccccgcaaatgcctttgcggtatcaaccatttcggaaaatacagcgcccggagatcgattcacggcaggtttggtaaaaaatatgacctcgcgagtagcaaagtctcttaaattatcaaagtcgaattccccggaatcactcatattcgccaggctgtacaagcacactttcgctttaccgattgttttattacgaacgaagtaattattttcgctgcgctccaagccgagttgtgtcgcacaccaatttatagcgccaccgtccaaatagtctgtatgttgctgctttacattgaccacaaatacagactcataatagcgtacaaagtccgagatggcatttgcttgttgcaatgcgctttcaagaggcgccataaatgcaaagctccgaccaatgcctgcggacaaattcacaaccaattctgaaaatttagcgagttcagtttcgctaatagggcctttttgatccgctaattgaatggttacgattatgtcgccaaaacgagcgtcttcagattccttttccaaatcacaccagttctttttaggtattttaaggccgagtatccggctatgcttagtaagcgcagacttggcctcacggtattgcgctaataccgactcacgacccacatcacgctcgcccggtagtcttacccaataatctatctggctgaccttttcaaacccgtcaatatctggatagctatatttacttgaagagcccgatttaaccgcgtccgcgaaggcttgttctgtttccggttggctgccctgatctagctgcggttcacctttaaggtctaaactgttatccagttcagctgagttatcggttgaatctttcagcaaagatcggtcggctaaccctgaatcacaagaccgtttcggaatttggattgaataaataccgtcggaataggagttggattgtggttcaatgatatcttccagcggttcgcgggcatcgggccgggtacgctctgactcgggaacattttcaaggatttcatcttcggcgatgtcctcagcgtcatcccgcacttgattctcaatttgttgcttctccattgcctgttgatgcgtgtcgtgcccagatttaatctgccgggattcagagtgtcggtgcgtgccaaccggatcctgttcgagttcatcgcgagacggtaaactatcgctcacttgatcatcaagtaccggaatatcatccgcctgcgaatccactccatccaaatccgctccatccaaatcgagattgttcggagcaccgttgtcatcaatactgcgtcggtttgatccgagttgcccgggttgcccggatttcgcggatttcaatttcccccggcccggcagtatcgaaataacataaatagcaatgatgaggatgataccaatagcgattaacacaatttgcagactcacattaattcctcaaactcgatttgatttattcatgttacacaattcgaactgttcatctaacgcgatgtgcgagcaggtagcacatgatcgcacatcgcttttttattacagagaccgttattgaaccgccatctcaatcgcctgatcgatatcgactgaaaccaatctcgacacaccggcttccaccattgtaacacccaccaacaaatccatggcctccatggtaattttattgtgcgttatcacaatcatttgactgcattcggcaagcgttttcagagtctggcagtatcgatcaacattggcatcatccaatgacgcatcaacctcatcaagcatgcaaaatggcgccggattgagtttgaacagcgaaaacaacaacgccaccgccgttaacgccttttccccccctgacaacaggtgaatatggctgtttcgctttcccggcggttgcgctatgacaccaatacctgcggtcagtaaatcgctacctgttaagtaaagttctgccttgcctcctccgaatagttttgggaaaaattcattaaaccccacgttaattttgtcgaatgtttgcttgaatcgagaacgagattctcgatcaatcttgcgtatgacactttcgagcgtatccaaggcttcgctcaaatcggcatgttgagtatcaagatattgcatgcgctcgctctgctcgtcaaattcttcgattgcaaccagattaaccggcccaatacgcgcaattttcaattcgattgcggagcgtgtctcttgccataaatcaacagttgcattatccggaatctcggcgccatattcttcaatgttatatccttgctcctcaatggattcagattgggtgtccctgcgtaccttgatttcttgcttggaaagtttgtgttgatccaaaatttcacgggcctcgttaacctgctccacctggcccgaacgattcgcgtttatctggataattttattgtcaaaaccggccaccttatctttagaggatgaaaaccgcgaatctattttcagtttctgttcgagtaactggtccagttctgcttgcaattcggcaaccgattcgctgggcttattacccttttcagtcaacgccgagaaacgtaaatcggactgctccacttcctgtcgaaggcgttcaatattttcccggatagattcaatgccggcttccaaccgctgcttttgcagctctttttggtgcagcttttcccgctcctggctaaccgcgttacgattttccacaacctgcgcatttaaatgatcgcgccgctgtatcagcttttcgcgttgttgatcaaggccgccggtttgctgcgccgcggtttccagtaacgctttggcattttcaatgtcattgcggtcgcccttcatttgcacaagcaaatcttcgagctcgccggtctgtttgttggtttttgcctgggcttccagatactgtgcctcttcacgaccaaaccggttatgtaatgctgacatatccgaacgcaatgcattcgattcaacgcgttgtgcctgcaatttggactcgagctcagtgcgctgattatccaaatcctcgatttcctgatcggcgcgtgccaccaactgaatgatttccagccgacgttgttgtaactggctgatttctccttccctgaccaaaacgcctgtttccaactggctctggctggcaaaatcgacccagtttgcaccgaccagcacaccctctcgcgtcacaacacactctcggccaataagtgcggcttgatgttcaatggcgtgttccagggaatccgcaacataaattcccgaaagcaacggcgacagattcacgttttcgacctcaatcttgtcgattagcctgggcaattctattctgtcctgtggcacctcaaccgcagcgctggcaatcaatgacaacccgaaatttggcgggcgacgcaatatgtcaatagtaatctcctcggcgcaaatggccccgaaaaacccgttcaaaagccgatccacggcgcgctcccaaccttccgatactttgatatttccagctaatttcggcgcatttctcaaaccactgtcactgagccaggattccagcacatcattatcaacccctagtgcggcattttgaatttcctgtagtgattccagtcgagagacaacttcttgtaattgggttctggcgttagcagcgtggtcgcgcttatcttccagttccgctgagagatgttttattgcagtttcggatgcctgaagctgcttttccgcatcggcatattgcttgtcgtggtttgccacttcgagccgcaatgcttcaatattcatgactgaaaactgctgtgttgaagctgttatttgctgttcgagtttttctttatggcgcgacccgcgtttcaagtgttgctcaagatactcgattcgagatttttggatttccttctgttgggcaggggcgcgagattgttcactaaatgcctccatttcagttaaccaatcctgcaatatcttttcggcctcaactaacctggcttcagcctcattgcttatcgactgcagggctcccagttccggtaaatttttctcaagctgtgcgcacaaaagaatttctttttgcctatccgattcaatttgctgctgtcgctcaaccttactcgcattaagtcgatccaattcttccgtttgtgatgtttgcgtttcgttctggtgttcaatacgttgttcaaggttggaaatatcggcacccgctcgataaaacgcttgctgtatttgattattttcttcgtgggattctgcttgctgttcacgcaaagtttccagctcagcgtcggtttgccgttgggatgccatggcagattgcaaagtgttttcaagtttcgcggttatccggtcttgctcgactaattgcgtatccagagcatgtagccgcaatatctggagctgaccgtttatttgtcgctcttgtttctttaaattcttatatcggcttgcagatgccgcctgtctttttaatctgcgtagttgttttccgagttggtcgcgaatatctgaaacctggtccaggttttcccgggtgtgtgcaattctggtttcggtttcgtgccgtcggtctttgtactgtaaagtgccggctgcctcttctacaaatgcacgtaaatcttcaggtctggcttcaacaatttggctcaccatgccttgttcaattatcgaataggatcggggacccaggccagtcccccgaaataaatctaaaacatcccgacgcctggttttcaggttgttaatggaatagatagaatgtccatcccgggtcagggttcgtttaaccgaaatctcagcgaattgcccgtaattaccgggtgcgcgaccatcgctattatcgaaaatcagctcaacagcggctttacctacaggctttcgtgccgatgagccattgaaaataacatccgtcatgttgtcgccacgaagcattttcgcggaagattctcccatcacccaacgcaccgcatcgattacattggatttcccgcatccattcggtccaactacgccaacaaggtgggccggaaagcggatatctgttgaatcaacgaatgatttgaagcctgaaacctgtaacttcttaagccgcatcagggggtttggtttttctcaacaggcaattaggggaacaagttagaataacttattgaagataaaatggatatttcatgttccgcggagttttgcgttcatgaacagataaccgtatcattttagcatatctttgaaccactaataagtcaattgtcttgcaaaattttggcatcacgctgatcaatatactatcgcttgcgttcactgaattctgtatgcgaatgagtttctggtggaagtttccaacaactcgcaaaccgaggataaccaaataaaaatctgccccactggctatctggaggaagggaacaaaaaacagaactagaatcttgcctgggttgttgtctgtgatcattgatggctttctagtaacagctgttactgtcacctgtcacatattttcgggcaaaaatattgtcgccacgacggaggagttagagcgtaccttgttgtataattgagcggataataaacaaacgaaacatcctatgaaaaactgcaaaaacttttctttcgatgtaggtatgacatcgcttggggtagccgttaacgagaacggtgaaattattcatggtgatgtgttgcttatgcacttagatgccggatcagtcaaggcgcaagccggtcggcggcggatgttccgcacccgcgaagcacacaaggcgcgggaagcagttctggagtctttgtggcggtcaattggcaaagaacctctgcagcgcaagcgtttcaccaagataacggggccaagcggcaagacgaccttccaaaaaaccaaggcggacaagcggctggaacgagagtttcctgccaaaggtgattcgactgtgtacgcttccagcctgttgcgaatcatgctactggaaggtgagccactggaagactggcaaatctacaaagccttgcacgccggcattcaaagacggggttacgaccagaatgtaccgtggaaaacccgcgaagaagccagagaaaaagaacaggggcggaaacccggctcagagaaaaagaagaaagaagaaaaccctgaaaatcagattgatcagttcaaccaggatttacaagaaatggcgcctgacgcgcgttatcacttgccctgctactacgacgcatggaaaatggggttgtgggatgctcaaacaaagaaaataattcatatacgccagcagtccaactccacgcacaaggcacgaaagtataacgccagcagggcatctgttaccaacgaaaccaaaaaattgcttagccaggcggccgagcagattccggaactcaatgaacatttaaccgaagacaaactcgaccaattgctctatgggggccagcaaaacgccttggacaaacgctatccgtccgccaccaaaattgacgggcttcttggacagaaatacccgcgctttgaaaaccgtattgtttctgagtgcgctctgataccgcgcctgaatgtatgcaagtcggaaaaatcactggcgattgaggtgggatttttactgcgcctggtcgactggcgttatgagactgaagatgaacatggcagcaagtcggagcattcgcttaccggccagcagataatcaataaatttcaggaatgtgattcagcgtggaagaaaaagtcacaggcgtataagccggaagaatatgccaaatgtttcaagttaaccccaagcaaggttgcgaaaatggcggaaaaattgggcgggtccgtcaaaacagggcacgaggacattccagccagtcggcacgctggaagaagtcgattcagccaaccggcgttgcatttgatgaaatccttgattctttccgaaaaaaccccgaaagggttttatgaagaactatcacaaattgttgcaactcaggaaaaagaaaatccaggtgcggaatttgggtatcaaatatttcctgatattccttataaatacttcctcgatgatttcaggtttcttgagaaaatgggaaatagccgcgatactatccatgttcccgacatgagtctggccgagcgctatctcaatgaatatggtgatgtggaatctgccattcagaaagttatcaactcttgtaattggccggaactacggcatcggttgaatgtgtttcgtcgtgaattggaaaatttgatcaaaaaatacgggacaccggatgctgttcatctggagtttatccgagaagattttctcagtccaaagagaaaaaatgaatatagcaaacgagcaaagaccggtaatgaggatagacaaaaagcaatcaaaacactcaaagaactaaagataccgattaccgagaaaaacatacttcgctaccgtttgtatacggaacaaaataaacggtgcttatatacggacgattccatagatatatcggctctggaaagttatgacattgaccacattttccctaaggaagatggcgggccggatgcgtactacaacaaagtgctgaccagtgcggatgtcaaccgcaaacaaaaaggcaagcgcttgccttgcgaatgtgattttatcaattgggcggcattcaagactcgcttgaaaaatttacatttgggcaacaacaagaaaaaattgcttttggcaagcccccggaaagaagcggaagaacttgtggaaaaatatacgggtttatctggaactgcatacattgcccggctcgccagggacattgtgtgtttgcggtttggttggcaacccggggcagaaggcgagcagcagcgaatatttgttatcagtggcgggttgaccagcaaagttgccaagaaatacaaactctatcaggcgcttggggatggttccaagcactaccagaaagaccgttcggaccaccgacaccatgcgctggacgccatggtgattagttatctgcgccagtgggcaagagacaagaacaaaaccgatttcttcaagtttcccgccggtgtcaatgcagattattttgccaaaaaactagcctgcgtgaatccgcactatgtaaccaagatgcggcctgcccttgctgaacaaccaaaaccaaacagaagtgccggcaaaaataaaatgaataaaaaggaatacaaaaatctcagcaaagaccccgaggaacgagggcagtggtacaccaataagtcggaaaccgggaaaggcacttctcagcacgggtatcttttttacaaagatgataagggaaaagtgtgtcataaaaccattcacagctttcgttctccttatgaggtgaagaaggaagtggaaaaaaaggccagcaaaattattggtttgttttatcaaggcaaaagtatcgatctgccgagtcaggatcagataacggcgacccaattggggagagatgcccgacttaaatttggtgagtacatgattatcaaaatacttaagaaagaagtaatcattggcgaccccaagcaaccgcaagagcaatccaaagatactaattcaacaggccgctaccggataccattcgccgaccttgaaaaaatcaaagtgtgtaatgaactgaagcgtgaaaagccatttgatttagatggattttctgtagacaaggataaaacgttaaccggtacctacagggtggataacggccaacccagcttgcggaattttattattattgacaccaaaaccagcgaggaaaagttggttaatttcgccagtttagtgaaatatcttgctgaaaagaactggctcaatgatcttgaagtaaaggatattgttacgataaacaaaaaccacatatcttatataaacaaagtaaaagcagacaacttacccaatcagaatctccctgatgggcgttatcaaattaagagatttgagagtggtgggaacgaagtatgtttggttagtcaaaatggcacggtttataggatgaacagcaaagttctggagtatgccaagcggaccgactaaattgagttactatctgcttcatttgatgtctcccggcatctatctgcacaaggaacgggggctgttgcgttatgagcgcggcgatgagcgaagacaattaccactggaagatattcggggcgtcattatcgttacagaaaacgtaacgctcactgacagccttatagcagccctgctggaaaacggcgcttttatcttgcactgcgaccaaaaataccgccccatcggtttaacggaaccgttatcaaagattatcaagcgcgatgtggcatatcagcaagcgcgttgcgccaagaaattgcaaacggccatctggcggcgactgttgcgcgccaaaattgacaaccaaaagaggctgttgaaaagcatggatgcccgtcatgcctatctggaaacaaaactgcaaaatgaagcgctcaacgaatccgcatgcgcgcgttattactggcgcgaatactttgcacgttgcggttttgcaggactaacccggcggcacgatgacgagcacgaggtcaatcacatgctcaactatgcgtatgcggttttgggcgccatttgccaccggtctattgttgcgcacggaatgagcccgctgtttggcgtgcaccaccgagcaaactttcacaaccatcctttggtttatgatctgattgaaccactgcgcccctttattgattaccaattatgccggtatctgaccggcgaccatggaaaggaaaaaacactcagggagtgggtcgtattttcccagggatgctggaatgccattgaagtagtgcacaacaagagcaaattcaaactgattgacggcattgacgtctatatgaattcggttgcaaaaacattcaggaataaagacccggggcatctgtggctgcccaaactccaagcaccctgaaaatgggctggatgctggtattgtttgatttgccggtgaccaccaaacgggagcgagatcaagcgaccggattccgcaagaaattgctggatgatggttatagcatgctccagttctcggtgtacatgcggtcgtgctcttcctgggagcgtatgaagaaacactctcgtagattgcgaatctatgccccggaaggaggtaatatccgggctatattgatgactgagaaacagtgggttaaatccattgccattgttagcgaacactatcggaaaaagaagaaaacaagcgaaatgcaccagttgagcatatttgaaaactggtagattggcctgctaaagcgcagtgcctgagaagccgctacgatagttaagattccccaatcgtgcatatagctgtagtcggcttcccagggtgcaaaactaaatatatcagtacccagccacaattcccacgtattctaacacactggaaaaagggggggaatcaaaacatggcatttattttaccatatacaactggaaattctaacacactggaaaaagggggggaatcaaaactcatcaagattgtttgttgtctattaccgggattctaacacactggaaaaagggggggaatcaaaactgcaggctaatgtaatcagtgtgttccatcattctaacacactggaaaaagggggggaatcaaaacaccagtcaagcccatgaacttcatcgaaaaattctaacacactggaaaaagggggggaatcaaaacagcaagctgcgcgtcgatattgacgcgatattctaacacactggaaaaagggggggaatcaaaacttagaaatgagtgaggatgatcagttggacattctaacacactggaaaaagggggggaatcaaaacccgggcgctgtcgacagcgtttttcgatcgattctaacacactggaaaaagggggggaatcaaaacaatctcgcacccagccgcgagcgctcgtgtattctaacacactggaaaaagggggggaatcaaaacgtctcatttatttccccctctcaattttttattctaacacactggaaaaagggggggaatcaaaactgcgtccacggtcgagcaaaatcatcatgtattctaacacactggaaaaagggggggaatcaaaacttgattctcgcaccatgccgctgtgaacttattctaacacactggaaaaagggggggaatcaaaactaactcgttatgccggttggttttttaagcattctaacacactggaaaaagggggggaatcaaaacgaaaatgctgtgcaaatatcaagcgttcatattctaacacactggaaaaagggggggaatcaaaacaaaatattcaaccggctcgccgtcgcaaacattctaacacactggaaaaagggggggaatcaaaactattgcatgatcatatctccagtaaataaaattctaacacactggaaaaagggggggaatcaaaaccggtaacagtagctgataacaagtttgataattctaacacactggaaaaagggggggaatcaaaacagtacttggtctcgattgaatagtctggacattctaacacactggaaaaagggggggaatcccctagccagattagcacagcgtaatccgactcatgagtacttgctggcgatgctgaggcacgtcgggattaaaggtcgggtcccatgtgatgcatggcttccggttcgttttctccaaccgaaatcaatggctgccattttactttctttaatttccattcgccggtatcgcggtcgtaggtggaatttacaaaacacttccactcgtcatcatttattgcttgatagtctgctcgatagtagtaccctggataacgagtctcttgtcgaaacttgatgtgctgcatatgggcttccgcggtaatgattcgatggtagttttcccaggcgcgcagcaactcatgtaaatccttggcgcgcatcttcaacgaatcttctttcagcattttcatcttgcgttcggccaccaccaacattttctcgttggtttgataccaggtggacacaccagcgacatattcgtccatgatcttctgcaatcggaactgcagcatcttcggtgtaatgtaatgtggatttatatcgatggcggtggtgtaatctttatgctcaagaaacgtacgaaccggtcgatatatttcatccacaatttgttccgtagtgcgcgataattcaggcttgaggtcaggattatcgaggcaatattgcaccatgctctttgctaccattcgtccttcagtaaacgaccccgaagaaaacttgtgacccgatgccccaacaccatcacccgccgtaaataatccgtttaccgtggtcattctgttatagccccagtgataatggtcgggggtgccgggcagatcatccgggcctgaacaccataaccctgcacaacctgcatgtgagcccagcaaataaggctcggtaggcatcagttcagacatttctttatccggctcaatgttctctccagcccaaacaccacattggcttatggtcatatccagaaaatcttcccaagcctccgcttcaagatgcttgatttctttgggggtcatggattctgccagttttgccatggcactgggcgtgtccagaaaaattgggcctcggccttctttcatttcaatcatcatcaagtgatttcgcaggcaggttcccatgttgaatcccaccgcgtatttgtcatagccgtggtctttcaacaagtcgtagtttttctcctggtagtcctcgccaaacgcgttcattgcttttgctttaaacaacaggaaccacgcgcctaccgggccgtagccatctttgaatcgggcgggaacgaaccgattttccataagggtcatttcagcaccacattccgccgccattgcataggtcgaaccggcattccagactgggtaccacgcacgaccggtgccttccccaatcgagcgtggacgaaaaatatttactgccccgccggccgcgagcaagcaagttttgaacttgtaaatataaatcttgttttccctcaccgaaaatccggctgcgccagcgattctgccagggtcatttttatccgtcattaaacggacgataaatatacgctcttgaatgttttcgatgcccaacgcctttttagcggcctcggcaacgatccatttataagactcgccatttatcatgatttgccagcgacccgagcgcaccggcttgccgccatcgcgtaatttcttcccttcatcgcctttttgtttccaaatcggtaagccccaatcctcaaaattgtgaaccgaatcatcgacgtgccgcccggtgtcgtaaaccagatcttctcgggttatgcccattaaatcgccgcgcacataacgcacatagtcggctggatcattgtcacccatataggtattgatcgcagacaatccctgtgccaccgcgccggaacgatccatcgccgctttatccaccagcttgattttcaagccgctcccttcagcccatttcggaatttcgaatgcagtgccacaagcccccatgccaccgccaataatcaggatatcgatttcttcttcgacgacttcgggacttgcaaatgtatattcagacacttgattcgcctattgaacagtgcatttcgttaacaactatatcactcagttcgccaagaactggcccatatcacaatgatgcatggcatcggtaaacaactttgtagggttgcccaaatcactcatatccgcatccggtttgccaccaaaaggatccgcggagccttcaggtgtcgttctaatagggaatttaaaccgtttcacagtcccatttcggaatttaatggtccacattatggagtcggtacccctcaagggttgaacctgggcacccaacggcacgacatccgcgtagtgtcggcattcgatcgcctgttgtgggcaaattttcacgcaggcataacattcccaacattgttctggctcctggttataggctttcatagcgtgcccggtaacggagccatccttatcaagcgtcatcaagtcgtgtgggcaaatatacatgcaagcggttttgtcctggcccttgcaaccgtcacatttatcggtacgaacataagtcggcattgttggtctcctattcggattaagcattgaattcacacaggccatggcgttctgtgccacggctgttccgtctatgtgttgaaactatcgttcttttgattcccggtatccattacggaaattgccaatctgataatttaatagtttttaaccgagaactctaatcagtattatcaaccgacctataaatttaattgataggcagtgataaattattcttataatcaagtattacgccctttaatttctgcctactctaaagcatcaggtgagtttgatcattagcggtatacataacaacggatcatgccatccatgatactatttgatgaagaaagcagacttgagtgaaaaggattaagaatgaaccaacaattactatttaggaatattgaagaaacgtatctatcgatcaatgacgtggcaagccagcttgaagtatcgactgcatcagttagaaactgggttaaaaccggatatcttgatcaaacaggtcggggtgtaatttcgagagagtcgtttgaaaatttcaaaaccgttgtggctggaggtgaaaaactaacagcccgagctaacaagtcattaaaagacactcatgaccatgaacaactacagagacaatttgatgacctactaaaaaaagaaaaaactgatctgaataatatagggtcacaatatgaagagtctttatccaatgcatacagaaacaaagagggaatctactatacaccaataaatattacggaacgcttctttcagcatttgcctgaagataactctcgtttatctttttgcgacccttgttgtggatcgggaaattttattctaacggccatagaaaatgggtttaagccagagaatatttatggctatgacatagatcccatagctgtagagattacaaaaagaagaatatttaaacgtactggttacgaaacaaacaagataatttgtatggattttttaaaatccatgttcgatcgcgaccatatctgtttcgatattattgttactaaccctccgtggggtaaaaaaatcaaaaaagaacagaaagaaatgtacgctcgcctcttgcgttccgggaccagtgctgacacgagttcattattcttttttagctgcttatcccgattaaaggagaatggatatttaggtcttttgttgcaagatgccttctttaacgtggcttcttttgaatgtgcacgaaaacaaacattatcactaaatatcatagcattattggatttcggaaaaccattcaaagggctattgacaaaagcaaaaggcattatcattcgacaacagaaagcgagtaatggcggtcttattcaatgcttggtgaatcaaaaatctacggttagattgcagaattcttttaataaaaacccaaaatctatattgaatttttcttgctcatcagaagagtcagaagtcattgagcatctatacagacggcaacatttaacactatttggcaaagctaaatatggacttggcatcgttacgggtaacaacaaaaaattctgtattaaagaaaaacgagatggttatattcctgtttatacgggcgcagatattcataaggagaggattaacaacccatcaaactatgtgcctgatgatttatctctataccaacaagtcgcgcctaaagaacttttcatggcgagggaaaaattgatttatagatttatttcttctgaattaatattttatcatgacactcaacaaaggatatttttgaatagcgttaatatgcttgtattagaaaatgatttcccaatcagcacaaaactactaaatcaaatactcaatagtaaagtgcttagctggttatttaaatcaatatttgaaacatataaagttcttcggtctgacattgagtcactcccaatacatacaaagtattttgacattcattcggaatttactgatgagtcatttttgaactacctaggcgtagaagaactgcacaatggaactttcagaattaaaaaataaaatctgcaaatgttttacgggttcgcccgaagacctccaaaacatcttacgggtcattgatgaagatcaagcgatttttccattcaataaatttgagcgtctaatttgcaatctgatagaaatagatggattaacctttctgcaatatatggagatcaggcaagaatatattaatcagaatcccaatttatggatatttgaaatttctgcaccgcgtggattcggagagaaatttgcacaaacatacgtgcgtgggaaatgtacacaattaaagcagccatctaaaatattagatcctgattattcggggcaatacgatatgtggcttgatgggataaaaatagaagtaaaagcctcaagggtagttgatagtgatagctcagaaccactgtatataaaagcactggctcgaaatacacatcgaccatttttaatgaatttccagcagttaaaaccacaatgttgcgatgtatttatttgggttgcggtatttagagacgaaatagtcatctggattatgagatctaatgaagtgctcaagaaccccttattttctaaaggacagcatcgtggtaatcgtggcaacgaaggacaattgcatatcaagcatgacaatattcatgccttcaatgagtatgaattaaaagacaatgatttggggcagtctatcaaagaggcagcaaaacgtagttgaagggatgcaaatccaacagtattctatacatgcgcccgtcttcattcgcaatgagcggttctgcaaaacattttccaagataataactattcggtgcctctataaattgatctttttctaaccaacaagaataaccccaggaatatcatggggatactcaatacctgacccatggacacccaatccaacgccactgccccgatatgaccatccggttcgcggtaaaactcgacaaaaaaccgaaatacgccataccccaagagaaacacgccagaaattcggcctggtagccgttgtttggatgaataccaccagacaataatgaatagtatcaacccttcgagcaatgcttcgtacaactgtgacgggtggcggggcggccctggcgcggtatagaacaacactccccaaggcacatccgtgatccggccccacaactcctggttaatgaagtttccaatccgaccaaaaaataaccccggcgcaaccaaaggcgctaaaaaatccgcaaccaccaaaataccccgattggtttttcgggcataacacccgagcgcgacaatcacaccgataagcccgccatgaaatgacatccccccatcccaaatggcaataatatccaagggacttgaaagataaaaactcaacttataaaacagcacataacccaatcgaccgcccactataatgccgacggcgatataaaaaaccaggtcaatcacctcatcttcctgccatccagaccggctgtgccgcgctctgtatcgccccagcactatgccggctacaaaaccacacaggtacatcaaaccataccaatgaatggatagcgggccgatggacagggctaccggatcaaaattaggatgtacaatcacgcttaaatttccgcgactaaatttttttgaaaactaaaagtaaaaattaccagctacgctttagccggctaatattgagccatgaattgtaactgattcaaattcagaccgcccccaggaagttcacatgaatctcacaaatatttatgatatatgtctaaccagttaatcaaccaaaccagtccttatctgctgcaacacgctaacaatccggtcgattggcatccctggactgagcacgcacttgatgtagcgcgaaatcaaaacaaaccgatcctgttgtccatcggctatgccgcctgtcattggtgtcatgtcatggaacgcgagagttttgagaatgacgtcatcgccaaaatcatgaacaaacactttgtgtgcattaaagtagatcgggaagaacgccccgacctggacaaaatttaccagattgcgcatcagttgctgacccaaagacccggcggctggcccttgaccattgcactgacgcctgatggccatgcgccgtttttcgcgggcacttatttcccggccgaagcgcgttacaacatgcccggttttggcaagttgcttgaaaaaatcgcggcgcatttccatgaaaattctgaaaaactggccgactaccatttgtcgtttaaccaagcgttggaaaaacttaacccgcaatccagcgcaagcaaaatacccgatcccttaaccgcgcttgcgcacgcttcggcgcatttggaaaaacaatacgacagcgagtttggtggctttggtgatgcgccaaaattcccccatcccacccaattggaactgctgttagttgccgcaagacatcccggcctgaccaacttggcgaagcaaactcaatcggcgaagacggccgcggagatgcccgcgcaaatggtgaccaacacgctgacgcacatggctcagggcgggcttttcgatcatctgggcggagggttttttcgctattccatagaccgaaaatggcaaatcccgcattttgaaaaaatgctttatgacaacgcacagctattagccctgtactgcgatggctatcacttgttcggcaacgcgcaatacgcccatgccgccatggccacggcgcagtgggttatcatcgatatgcagcaatccgatggcggatatgcgtcaaccctggatgccgactccgagggcgaggaaggcaaatactatgtttggagcgaaacagatttacgcgcaattctggtggaaaacgagtattcagtattagaaaattattttgggttatatggcgaagcgaattttgaaggaagttggcatttcaaccggaacccggaaaccgacttcgaattattggcgagcaatcctgaaactggcgatgaaattgaaagggcattgtccgcg

SEQ ID NO: 815 - DNA, 16960 bp, synthetic construct
  misc_feature 1..16960: note = Synthetic
  source 1..16960: mol_type = other DNA
cccgattacgctccgtgaatactcgtatttttctaaataaagtgtataaaaagagtaataagcaccgtggctaacttgcattaaaaagaaagcgagcagcatggcaatgactgttgggcttttgagcacattaacaatcggttcatgaccgaatgaatcctcatccgagacatcattcggtgcaataagacttgtcaaccagatcccaacaatcatcacgaaggcaatccaaggcagatactgcacaccgtatcgttctaaaacttcacccagtacgataacggtgataataaatccaatcgatccccataacctgactcgagtgtaatcatgcactcgtccttcaaggtggttcaaggtcacggcttcaaactggggtaaagatgcgctccaaaaaaatccgaaaaccagcatgacgatggctaatgtaaaataagatgtggcgaataatgcacccgtaaaaacgagaactgacaacaaacccgcaagacggatcgcgcccatacgattacctttatgatcggcgatccagccccaaagataaggtgcgataatttttccgacaacgagcagcgccagcagctcgccaatatcagaaggtgtaaatgctagggactcaagatagagtccccagtaaggtaaaaatataccgaccgtcgcgtaataaaataaataaaaaccagacagacgccagtacagtcctttggtcattctcctgattgagctggaatgatcggtgtttctgactgcacatccatattttgagcacgatgacgcataagatgatccatcacggttaacgccatcatggcttcagctattggcgttgcccgaatgcctacacaaggatcgtgacgacctttggtgatcacctcaatcgactcaccttgcttgtttactgaacgcccaggtaagtgcaagctcgatgtcggtttcagcgccatactgaccagcacatcctgtccggatgaaatgcctccaagcacaccaccagcatgattactaagaaagccttcaggtgtgatctcatcacgatgaaatgtccctttttgctcgacagagtcaaaacccgctccaatctcgacacctttaaccgcattaatgctcatcattgctttggccagatcagcatcaagccgatcaaatatcggttcgcctaaacctggcggcaaacccttggcgacgacattgatccgtgcaccaacagattctccttctttccgtagcgccttcatataatcttctagctctggtacacgttcaggatcagggctgaaaaacgcattcttataaacagcgtcccagtcttttaattctagtttaattgggcctagttgagcgagatagcccttgatagttatgccgtacttttccaatagatactttttcgcaataccgccggccgcaacccgcatggctgtttcgcgtgcagacgaacgaccaccgccacgataatcccgaacaccatatttttgttcgtaagtgtagtcggcatgtgcggggcggaaagtatctttaatattcgaataatcttttgatttctgatcaacattctcgatgatcaaaccaataggcgttccggtggttttaccttcaaatacaccggatagaatcttgacctgatcaggctcttttcgttgagtggtgtgcttagaggtacccggcttacgtagatcgagatcacgttgcaagtcctcctcactaatttctagtcccggtggacagccatcgacaatcgcacccaaggcaagaccgtggctttcaccaaatgtggtgactgtaaataattttccgaaagtatttcctgacatgattctattttaccattcgctcgatagacgtaatctttatattctatcctatatcgtagctaagattctccagcttcttatccatcaaatatttaaaaccactttttctcattctcggcattattttatggagtctgatcctaaaggaaaaggatattcaagcagtctatacaccgatctaaaaataaggactgggggatttctttaatcttagaatagctttttacaagtcttttgcatggatcaaaaacacaccttcaccaccctgaacaaaatctaaccaggtcatggataaattgggaaagctggcatccatcgcctcttgcatcaaaccgacttcaacaatcaatacaccatcatccgttaaacgttcttttgcccccgttaatatacgtcggacaatatctaaaccatcaccaccgccttctaatcccatcactggttcatgatgatattcagcgggtaaagccgccacatcttcagcgctaacgtaaggtggattactaacgattaaatcatattttttcggttccaacgaagcgaacacatccgatttgaccaaacgcattctgtccgtcaaatcatgtcgatcaacatttttagccgcaacttccaaagcttcatcggacagatcaatcgcatcaacttttgcatccggaaattgcaacgcgcacgcgatcgcaatacagccgctacccgttccaatatctaaaatatttttcggctctttcgtcatccacggttcaaaatagtcataaattaattcagcaaaaggcgagcgtggaactaaaacattttcgtttacataaaacggcaagccacaaaaccaagcttcacccaaaagataagctgcaggttgtctggtttctattcgttgctgaataatcgcttttgcttgttcgcaccgctgatcagaaaggggatcgtcaatggccgattcgggcgcatcaaaaggcacttctaaaatactaaaaaccaaatataccgcctcgtcttgagcattgtcagtaccgtgcccataaaacaagtcggcctgctcaaaaagctcagtggctgactcgaccaattgtcggacagtgttcgcagaagaaaggggggaaagtagatttgtcattagctgtatatatgctttgagctttgaatgaatataaattttattcgttggaagaagcccccgaacgaatcccaaactagttattcctaattaataatcccgaattattaaataacactagtgctttttaaaagaccaagccgccgcagaacataaaatgatcaagctagtgatagccaaccataatggcaccatttctgttcctgcttgtaattggccttgaatatcgatgtctagcttgctaaccagataatctgtgatcaacccggcaagtatagcaacaatcgcaactcctgctagatacgcgattagtgattttttccctaattctttgccgataatacccaatgtcgaaatattggttgctggacccgccatcaaaaacaccaaagcggtgcctggagaaacaccggctagcataaacccagcagcaatcggtgttgatgccgttgcgcaaacatacataggaatgccgatcacaaccatcaccaacatggctggcaagccactaccccactcaacgagaaatgaggttggaacgaaagtttttacggccgcagcaaaaagcatccctacacacaaccaaaacaacaacatggcaaaaagttcagtaaaagaatatcgaataccttcgattgctttttgtgcgaatccaaatattccgaccgtttctgaattgtctgttgaacaaccgttagcgtcagattcttttacaacgtcaggttttgaagggcagcaactgagatcagtttctagaacagactcttgagctacaggtgttgacgggcaacaacttgaagttacttcagtaaagagatcttcagtttcatcgtagcttgttgtctcttttgttttacccaccagcaagcccgcaacaatggccgaggttatcgctgcaatgggccgaacgatagccataaaaggccctaacaatgcgtaggtgatagagactgaatctacacccgtttcaggcgtagaaaccaaaaaagaaatggtcgcaggctttgatgcaccggctttacgcaaacccatcgctgcagggataacaccacaagaacataagggtaatggtgctcccagcaaggcagcttttacgatcgctgcaaagccatcatcacctaagtgtctctctaaaaaactcatgggaatcaagacgtgtatcaatccaccgatgatcagaccaagcaccaaccaaggtgccccagcaaggctgagttccaacaagtttgttatataggcgtgcagtaaatccatacctcgatcattcagttaatattcacagaatgcaagttattgttttgttccatattctgtttgttctggatattggacaggaataattcactggcaaaattcaaggacatccgttagcctttcttgacgggttactgaactctctactttaatagtgagttggaatttaagaatatattggagttttactatgaaaaagattttaagtattaccttggccgcaatgatggctattccgatgatggcttctgctcacggtccttcacgacaaaaagttatagaaaccattgtgatcgatgccagtccagaaaaggtttgggctattgttggtgattttgcgggtctcgacaaatggctacctccagttgcggctttaaaaatggaaggtgaaaaaacacgtattctttctatcggtgccgcggatggcccaacgatcactgaagagcttaaaagtctcgacaacgaaaagatgatgatgaaatataaaatcgttgatatgagcgtaataggtcaagagtctcacttaggtaagacatatgatgtgccaacaatccccgtttataactacctttcgatcattaaactgaaagaagttgaaggcggaactgaagtaacttggacgggtaaattctaccgtgttttccagctcaactatgaaaaaacaaaacctagatatccaaaaggcttgggtgactctgatggtgttgaagcgattacaggtattttcaaatcggggctagaaaagctgaagaagatttgtgaagaagacgaaggttgttaagaactttataatctttcaatagaaactcaaactggggcacgtgcttatgttacaaaataatataggcaggttcttcggtttttttatgccggctatatttctactggcagcttgtacacctaataactcaccgcaggcatacatcaccaatcaactcgatgacaccgttagtgttatcgacatcaagacacacaaaaacatcgctacgatcaaggttggacatcgtccggccggcgttgccgtgagtgctgaacgcatttttattagtaatgccgaaagtgtcgatatcagcgttattgataagaacactcacaaagtcactagctccatccctgtgggtaaaggtccggtcggaattgccagtaaccaaagtggctctcaaatctacgtcgcagattggtatgatcacgttgtttcagtgatcaatatcccttccaatgacattatcaaaacgataaaggtaggtaaatctcctgcaggtttaatgcttaacgaagccaaaaatcaactctatgtggctaaccgagatagcgactccgtctcgatcattgatacaaattcatttgaagtaattgctgaattaccaacaggtgacgcacccttcggccttgctcaaaaccctgtgacacatgacctttacgcgatcaatgttcgcagtgataacgtcactgttatcgacacaaattctttacaagtcaccgagacactggatgttggtgaatggccttattgtggaattacgaccattgatggcaagcagttatatgtcaccaatcaagacgaagatagtgtcacggtcatcgacttagccactggccatgttaaggctattatagaagtcggtgaaacacctgaaggcattgaccgttctccagatggccagtttatctatgtatctaactggggttctagtgatgtttccattattgatccggttaaacaagaagtgataaacaccatcaaaactggcgaaggtagtcgtgcatttggcctgtttattaactaataagatataatataatcgttcctatctccttatttataatcgcattccttccttaacacacaacatttagacgggttgattttccgtcatgcaacatcctgagctataatggtcattgtgatccccctcaagagaaggccatgaccatcatcaaacagcaagatctaatcgacagcgttgaagacgctctccagtttatttccagctaccatcctatcgattttatccaagcggtgcatgctgcctacgaaagagaagaatcgcaggccgcaaaagatgcaatggcgcagattctgatcaactcccgcatgtgtgcagaaggtcgtcggcctatttgtcaagacacgggcatcgtcaccgtatttatgaaaatcggtatggatatccaatgggaaggcgatttgagcgtgactgacatggtcaatgaaggcgtgcgtcgcgcttatgggaaccccgacaatatcttacgagcctcagtattagcggatcctgctggcgcgcgtaaaaacaccggcgacaacactccggcagtgatcaatatggaagtcgtgccggggaacaccttggacattcaagtcgcggccaaaggtggtggctctgaagctaaatctaaattcgtcatgctcaacccatcggataacattgttgattggatcgtcaaaacggttcctacaatgggggcaggttggtgtccgccagggatgctcggcatcggcattggtggcacagctgaaaaagcgatgatcctagccaaagaatctttaatggatcctatcgatatccaagaattacgtgtccgtggccctcaaaaccgtgttgaagaactacgattagaaatcatggatgcggtcaatgatctcggcatcggtgcacagggcttgggtggtttaaccacagttctggatgtgaaagtcagagactttccaacccacgctgccaatttacccgttgccttaatcccaaattgcgcggcaacgcgtcacgcacacttcgtgttagatggctctggtccttcgctgcaaacaccaccgaacctcgaagattggccagagatcacttgggatgtaggcccaagtgcgaaacgcgttaaccttgatgaagtcactcaagaagaaatcgaaacctggctaccaggccaaaccctattactgtcaggcaaaatgttgactggtcgtgacgccgcgcacaaacgtattcaagacatgctctcaaaaggcgaacctttacctgatggcgtagatttcaatgatcgctttatctactacgttggccccgttgatcctgtacgtgatgaagtcgtcggacctgctggcccaacaacagcgacacggatggataaattcactgatctgatgctcggcgaaacaggcctgatgggcatgatcggaaaatctgaacgtggcccacttgctattgagtcgatcaaaaaccacaaagctgtttatctaatggctgttggtggtgcagcttatctggtctccaaggcggttaaaaagtctcgtgttgttgcatttgctgatttgggcatggaagcgattcacgaatttgaagtgaaagatatgcccgttaccgttgcggttgataccaaaggtaccgccgtgcaccaaacggggccaaaagagtggcagaaaattattttggaaaagaaaacggcttaatttaaaaatggaaaaagatactctacatcgttttcttatcgaaaacacacaagtgcgcggcgaatggatccaccttgatcaaacatggcaggacatactcaactgttcgaattaccctgctccgctacggcaagtcctcggcgaagcggctgcggctgtttgcttattatccgcgacgatcaaatttgaaggctcattgatcttgcaaataaatggtagcgggcctgtctcgaggctgatcatgcaggcaacttccgaaggcgaaatccgtggtatggcgcaatgggataaagaccataaagatgacctcatttcaaccaacctgcaagatttattcggcgagggtcagatcgttatttccatcctcactgataaagaaagcgaacgttatcaagggatcgtcagtcttgaaggtgagagcttagcggaatgtctgcaaacctattttgaacaatccgaacagcttgatactaaagttcatttagctgcgaatcatgaagctgcggcaggtctattgatccagagcttacctaactcagactacgacaagacagatatcgttattgatgacagttgggatcgcgctgtgatcctgacagacaccattcaggccgaagagttattaaaccttgatgctgaagtactactgcatcgtttatttcatgaaaatgatttacgcctatttgatccacagtcgatcagctatcaatgtacttgctcgcaacagaaaatcgaagacatgatccattcgataggaaaaaaagaagcgattgagattatccaagatcaaaatatcatcgaaataaattgtgacttctgtaatacaaaatactcactagacgctatcgatattgaacgtgtttttgataaccaaattacggaaggaaacgcttctcttcactagtgtttctagataattttatcccagaatattgaattaatagcgcttatttaaacccgtgatgagtggatttattctgctcatccacaactgtttcgcacacgccctttacacaaccgatcaaatcaacatcctgtcgagagaaaaaaccaatcaataaagactaaagtacatcagagcatgcaagacaatccaccgataatttaatgactacagatgaattaattaaaaaaagaggtcttgtctcagcaagacctctttcgttatcaagaagaaatgttttaaccttctcctttctgaacatcatcaacccactcttcaatcgtaatcacaccaccttcttgttctggccgaccgtgatctttaggcggtaaaacatcctgcactagatcaacccgcttccatccagcaagtggcgtcttctccttttgccccggaacataatgcgacaactcttttaactcgtacttatgaatataacgcggacaattaatccacattttagtaagtttaacgcgaacgatcatctccgcttcaagatactcatccatcaacggatcatccttgcagacactcgcctcgccatgaaagcgaacacgatgcggagtctcaaaatcaataaataaaataccgacctttgacgttttctgaatattccccattgaataaaacatgccattgccatcataagatggaaaagcaatcgtcgtattatcaaccaccttcacaaagcccggcgccccacctttataagaaactgtcggctggccatgctcatcattggtagaaaggaaaaacatcggtcggctctcaataaacgcctgctcagcctcaccgatctccgtctgaacgatcatctctgtcaaacgatcagctaacttacgcgtctcgaactcatcctgaaaatctcgatgggcatcaccatatagctcactcattatcatctcctcattgttgtttttatggtttagagattagcatgtaaatagttactgcgctgaaagaaaaactaacgccatttgggagagcaagcataaaaaaaggcaaccgaagttgccttttcgtatcggtgttctattagaacttgttgccgatagtccccaccatcggaatatttgatacgtttaaaagtgtagaacacttttatattagtatcaagatagcttgataaagaggtatcagaacaacccaaaaagtttacaactagtaagatattgataatatttgagttctcagatatattatcacaacaacaaaaacatctccaacccaaaaatataaatatatttagacctatatgaagataagctatgaaagctgtggaaacaaaataatgctcggatgggtttgcatcatgattatcatctgtttaacactcgtgatcatcagtgctatgtgttttgaagaaacagagtttattcttactctaataagcactattatcgatatattcaacaatgactgactgaggggaaatgtctatgacgaaatacaggttagggctcgatcttggtaccgcttctatcggtgctgtcgctttttcactagattcaaatgaccaaccatctgaaattatctggcatgctgttcgaacatttgatgaacctacggaaaaaagccagaccggacgaacacctaaaaaagccgctaggcgtgatgcgcgtcaaaaacgaaaacagttcgatcgaaaagcaagtcgactccgacgtatcgcccaccttgcaccactactcaaactcgatgctagaaagatctctcccgataatggtcagaacctacctcgtttgcgtgcagaagctatcgagcatgagatttctctagaagatctgtttcgaatattcttaaagttaggaaaacgaagaggttataaaggccagttcaaagttaaggccagcgacggagaagtcaaagctggtgttgaacaaataactcaacttatggctatcaatggcctacaaaccgttggacaatatttatatcaccgtttacaaagaggcttacccaccaagctgaaagtacaagaaatccttagtactaaaaaaagaaaagaactgatagacatcaatcctgaacattataatctctacattacgcgagacatgcttgaacacgagtttgatcttatttgggaaacccaagctaaatttcatcctgttctaaatgagaaaaatctcgggaaacctgtaaaaacaaacttctttgaagcgatattttttcaacgaccgttaaagtcacccgctgccatggtgggtaattgcagtctaataaacaatctgccacgcaccgcaagagcacagccttcttttcaaacctttcgtatcgagaaacaaatttcagatctacgttggggtatgcgaaaaacttcacagcccttatccgtcgaacaaaaatcttgcttacgcatacttctcaatgatcccgttaacctcacaaaagaagggaaatttagttttaagaagttttatatggcacttgatgatttagagattagctatccagcaaagaacttaaatatggacagacaatctaaagggggacgagaagaattacagggtaatagaactttaaaaaactttgatcagcttggtctgttaaatgagtggcaaacactttcatcgaatcatcaggtcagcaccctcaactttctttctgatctgggctcacccgaacaacttgatgatgatcaatggcatacacagatcaaaggagcagctaaaggcaaaaaagccaagatgagacaatttgcagatgaagttatcaatttcattaatcttttacgcgaacacgaaaaatttaatcgtttaaccagcatgggcttcgatgctggccgtgcagcttattctataaaagcacttaatcaactcaatgaatggtttattgcaccttactggcaagaagcgccacagggaacagacctaccacgtatagacgaagaagccgctatcgaacaatgcttcagcaagctcgaacaaataacgaaatcaactcaacgcttaaacgtaacaccagaaacagggaatgatgttgttgatgttgcccttcgtcaaattaaaaaactagttaatcagtgtatcgatgaacatggggaacctgaacaaatagtcgttgaactaacacgagatatggggaagagtgtccaacaacgtaatgagatagaaaaacgcaatggcctaaataaaaaagcacgagatacagcaaaaaaagaaatagagaaactaaacaaggtgcctaccaacaacctgatcagacgttatcttctctggcaagaacaagtttcacgctgtccctactgcacaaataagatcgaagtcgaccaagcattacatggcggagaaacacattacgaacatattctcccacgctcgcttacccaagttggcttaaaaaccagtgaaatagttttatcacacaaaacctgcaacgaactcaaaggtaatcaaacaccacggcaagcctttgaaaaaaattcgcaacgctggggggctgtagagcaactcgccctgcacttcaaacaacgtaaactttatagaaaatcacagctactgttgatcgataactacgaagatgacacgactatagatgactttagtgatagacagtttcaagagacctcctggatatctaaagcagtagcccaatggatgcgtaacatctgtcatgatgtttttgtctctcgtggccaattaaccgcacgcctgcgacatatctggcatttagacactgtaattcctgatgtgcgaatcgaagaaggctacccggtgcttgatacagaaggcaaaagcatctcaatcgaagactatcgaatcggtaaatctcaatgggaaggaagagacctttccgcaggaacaaaacgaattaaacgtagcttagagaaacgctgtgatcatcgtcatcacttaatcgatgccataaccatctctatggtatcaagaaagctatatcagaatatggctaagcaatacaaagtcgagcagttcaaattagaagaattttatcgacaagactcacactatcgactagagcaagaaaaaccagaacctaagtggtctatagagcctccagtgaaaactttacgagatcaggcgatcagagtcattcgtgactgcaacatcagccataaaccagatagatattcctctggtggcttttataaagataccgcttacagcataacaactgacgaaaatgacaataaaacctaccttgctctgcgtatggatttactcaaactaattgatgaaaaatctttagaaaaaacgcttaaaaacttacaaaacattataagcccaagcattagaaaaattgtatctgaagccataaaaagtgattttgataatgttcaggaaacgctacagagaatagagcatcctctttacagcactaaagaaaaacctgtttacattaggaaagtaaaatgtaatcggaactacagcatagagacagcagagctaatcacctttggaaaaaataaggagcataaaaaatacctacaagatgcaggtaatgcctatcttgagatcacattaaatgaagagaaaacaaaagtcaccgactcacggctagttacaatgccacaagctgcccgaggtttaagctcattagctgaaaatacgattagattttataaaggagatactcttttaaacaaaagtaacgaacgtctttatgtcgtaaaacaaatcaagtcagcttctggaggaattttatttctcatacctatcgttgaaacaagaccagtcagtgaattggataaaaaagaaaattcaggagtgctcttacgagcaagtgtaaaaaaactgagtaactttattcacgtctcagatcatgtctgaacaaagagttatattaatcgaaaatccttgctatttatccatagacacagggagggtaaagttagcaagacctgaacaaaaagatacattcattcttgctaatgatattgcagtcttatgtttacatcaccccgtaattacgatcagtcaaggggtattgcaggcattgggaaaatctaaatcagcggttatcacaaccgatcaataccatcacccacaaagcctatctctcccttggtatggccactcacgtcaacttgaaaggctcagagaacagtttcatctacaacacagcccgatcaatgaacagctctggcaacagttaattcaaacacgcctaaaaactcaagcacaaacactcaggtttacgggtaaaaaaggagctctcagattagaacgtctagcggatcaagtattgcccgcggacccacaaaacctagagggacaaggcgcaaaacattattggaaatatttatttgaagatatcgataatgatgttaaaaaaagacaaaaacaaggtgcaacagacaccctcaacgcacgtttaaattttggttatgccatccttcgttcaatgatcgcaagagagctatcaatagcaggactacaacccgctttaggcatagggcatcacaataaagacaacccatttaacctagcagatgacttcatcgaagcttatcgctttactgtagaaacttgggttctccaacatgactatgcctctgagtttaatgctcttgcacgacaacaattactacaattcattacacaaagtttgagtatgaacaaacaaagctaccgattacctagcgccataaatgaaacgatcagcagctattgtcgcatactaaaaaaagcaaaaaaggaaaatatttctcttaaaaaactaaagctctctttacctgaaaaacagggggatttatggcctcaaatggttggcgtataatgtgggtaatagccgtgtatgactgcccgatgacaagttccgaagcgagaaaagactatacaatctttcgtcgtagtattttacaagagaacttttttcaactacaaaactcgctctacgccaggcactttccaacaatggcggctgctgaagcggtgattcaacgtctaaaaattaatattccagaaggtgctcaagtcgccttttttctagttacagacaaacaatacggaatgacgaaggagttttttggaacaaaatcaaccaaaaacaaaccagaagagcccgaacaaattgctcttttctaaaaaacctgcaggtatatcaataacctacaggcctcctagagtatcaaacattccgatggtggggtatcggaactccattaatatcggtgatcaagttccaaccagagtatcaaacattccgatggtggggtatcggaaccaactggatctttatcactaacaaaacaagagagtatcaaacattccgatggtggggtatcggaacgtatccggtgccatcctagtgggttattccagagtatcaaacattccgatggtggggtatcggaacgtaagcaatcgacagtaagttgtacattgaagagtatcaaacattccgatggtggggtatcggaactcttcttttgctccatgtgaccaaaatgatagagtatcaaacattccgatggtggggtatcggaacgctcgctacagcgtcaattatcatacaataagagtatcaaacattccgatggtggggtatcggaacggcggcgtgtctgcatcagcagcggttaaaagagtatcaaacattccgatggtggggtatcggaacagaagatcagctaatgttgaaagagttaatagagtatcaaacattccgatggtggggtatcggaaccgcgattgatggcttggctcccgttgaattagagtatcaaacattccgatggtggggtatcggaaccgaagcggggctttagctaaacttgtcttatagagtatcaaacattccgatggtggggtatcggaactgctatcgcggaactccatcctcgtaggggagagtatcaaacattccgatggtggggtatcggaacctagtgtggcggctaagattcaccgctatcagagtatcaaacattccgatggtggggtatcggaacccacacaccggagagtggtgcggtggtgaaaaagagtatcaaacattccgatggtggggtatcggaacgctaactaaaacatcagccgcaatatttgcagagtatcaaacattccgatggtggggtatcggaaccaatcgatagccttcttcacgcacgatggtggagtatcaaacattccgatggtggagtatcggaacacgcatcgatagacaagcctgattcattacaaatcacaataaaagcttaaaacgacgctgcccatttaaattatagttaagtacatttcatagcaaataattattttgaacaaaaaaaacccagcctaaactaaagctgggtttctttgtttctacggctataactgaaaattatttagccttaagatttacttttttttctaacacttaaggtaagctgaatacactcaacacaccaccaagacgtgtatatgagtttagccctttgaatgcacctacagcacccaaaccatcagtatcatttatcaagccggcggccattccgattccagcccagccacctacaccagacaatacaccaacgtattgcttgcctttatgagaccaggtattcgtgttaccgatgatgcctgatggagttttgaatttccaaaggagcttaccgctcttagcatcgatggcttttaagtatcccgaaagatcaccataaaacacgacgtcaccggctgttgctaaagcacctgaccacaccgcgaaacgctctgggatagaccatacaattttacccgtattcgcatcccatgctatgaagttgcccaggttgttatcgtgctcattattatttgggcaatcagggcaaacacgccccgctgggaacatacttagcactgcattgacatagggctgacccgcgacgtattcaccaccactgactggttcataatccatacatacgtggtttgttggtacgtagaacaaaccggtgcgtggcgagtaggctgcaggctgttgatcttttgaacccatcgctgccgggcaaatattcgttgaatttacatcctcaccattttggtcagttgaatattttgctacgacttgagggcggcctgttttcatatcaacatgggttgcccagttgacagccggatcaaatttctcagccagtaatagttcacctgtttcgcgatccattgtgtatgagaatccatttcgatcaaaatgcacggcacctttatgctttttacctttaacggttacatcaactagaatgagttcgttgataccatcataatcccactcatcatgtggagtcatttggtagacccaacgagcgatccctgtatccacatcacgtgcaaacaatgacattgtccacttattgtcacctgggcgtactgttggattccatgttgatggatttgctgttccgtagtacatcaagtttagatctggatcatacggccaccaaccccatgtagaaccaccaccgattttccatt

SEQ ID NO: 816 - DNA, 23213 bp, synthetic construct
  source 1..23213: mol_type = other DNA
  misc_feature 1..23213: note = Synthetic
tcttcttcgctcggggtcatgttgatccacaggcggtgaagcatcggcaaagcgacttcccattcttttttttcaagcatcatgtcggcataagccattacggcggcggcggatacggggggatattttttaaaccagtttgtcaacagttttttatcgcccgaattgacggcggctttttcggcgtttctgcgaatgacatagatgcggggccagtctttgttttttttcataaaagccgtcaaatcttcaaaagaagcgatattttttgtatcggtcagccgaatccattcgataattttaatcagtccgggatcttttgtttggacggccaaagaatgcgctttggcgtagtcttcgtccaaagcggtttgtacggcttgtttataaagggcagagttgtcttcggacatacggggttttgcgtaggcgccgagctgttgagctccgaaagaaagcgcgcatacaaaaacgacaacggaaaggatgaaccgtttgaacaaaagccgtatctccgaaaaaagtctgctgttgacgattcttgtggcatttttttaagataaggttaatttaacagatatttattcttcttgagaagggaaatcgtcatgttaaaaggatcattgacggcattgataacgccgtttcgccaaggggaaattgacgaagaagcttttgtccgttttatagaatttcagcttcgggaagggacgcaaggcttggttgtctgcgggacgacgggggaaagcgccgttatgacgcccgaagagcacgcccgaacgatagagttgtgcgtcaagacggttgccaaacgggttcccgttattgcggggacggggacgaacgatacgcaaaagacgttgcgtatgacgcaaaaagccaaagagctcggtgccgatgccgcattgcttgtgacgccgtattataacaaaccgtctcaggaagggttgtaccgtcatttcaagttcattcatgatgaaacggacattccgttgatattgtataacgttccgggacgtacgggggttaacatttcggtcgagaccgtcggtcgtttgtcggaattgccgagaattgaagggattaaggatgcgacgcccgacattttgcgccccatcaaaatcagacaggcggtaaaaaaagaattttccgttctttcgggggaagatgcgactgttgtggcgtttttggctcatggcggcgacgggtgtatttcggttacggcaaacgtggcgccgcgtttgtgccgagcgttgcataatgcctgggcgttaaaagattttgaaacgctggcgacattaagagatgaattgttgcctttgcacgaagcgatgtttgtggaaaccaatccgtgtcccgtcaaatatgcggcggctttgctggggtttggagacggttccgtgcgtttgcctttgtgggaaatatccgaatcgtcaaagcaaaaagtcagggacgccttgagctctctggggattttataaggaaggaagcatggcggaacataaacgcaaaacaatgatttccgaaggcacggttgctcagaaccgcaaggcgaactttaactatgcgatagaagaaacgatagaagcaggcatagttttgaccggaccggaagtcaaatcccttcgtctcgggcacgccagcatcaacgaagcgtatgcggcatcgcaggaaggggaattgtttttgcttaatgcatcaatattggaatacggatcgatcgggtatatgaaacatatagcgacgcgtccgcgcaagctgttgttgcataaaaaggaagtccgccgtttaatcggagccgtggcacgcaaaggctatacgttggtaccgctgtctctttattttaattcccgcggcaaagcaaaagtcaagctggggctcgggacgggaaagaacacggttgaccggcgagaagacatcaaaaaaagggattgggaacgtgaaaaacaccgcctgctcaaaggcgggtaaatgattgtacagccttttgcgcggttgcaattttatttgttttatgtttttctataggacagtatttttatttgggttgaggggatcaatggcaattcaaaactggcaggaaaaattgaaagacgccttgttgttgtcggacgaagatgcacaatccgtcctgaaaggcgattttaaaaccgtgttgtcccgaaatagggaaggcgctttgcggacgttaagcgtctacggggcatttcttgccgccgtcatgatctttttgctgttgttttccgtgttcggcggaatgttcaagctgattttgatgatgctttttctcggcgtcattgccgcgattggcgccgcaatcggaaaagaagccgcgcttcaggcgacaaaagaacccggcatattttattttgcgggctttttgttgggcatggtcgttatgtcgatgttttcggacattacttccgaaggctcgggcgcgtctcaatttttgttgtttttggttttgggtggcgccgtcggcgggtgtatcgcgatgaagccgaaatttcaggaaaaaaattgggcggtttctcaggttgttttggccgctttggttcttgtatgcgcttttacgatgacccagtccgcttttatccgcatgacgattgacggcaatatggaatacatccgccagtattcggaacaaaaacgccgagaacaggctcaggcgatgcgagaaggtttctcttccggggcggcagctcctcaggcgtgcacgacggaagaagaatgcaagcgcatgaatatgaaaaaaaatgactattatgctcaacacgaagccgaagccatggctacgtgcgagaatgccgtcgccaaagaaattacttcccgctttgaatggacggtttctccgcaggactataaatttacgaattatcaggttgacgtgttgaacgatatgattacgttaagcggcgatcgggctcagctgattgatgcgaacggcaataaaacacagatttcttatcgttgccgttacaatacgcgcacaaagacaacggatgtcgttatgaataaataaatttttcttgccagaacggaagttatgcgtctacactaatgcgaaattttttgcgaaaggcaagagtcaaagcctctttcgaggctgacggagataaatgatgaatcagactgcagttgaaacggaagcttactacgatattcttgaaaattcagacggggaattgttgttttgtttgaaagctcgagaaggcagccccgaacgccctcaaattctttatagcggcgaagatcacgccttgttttacagaacggcggatcagatgatcgttcttgattatattcacgtcgacgtcagagacgctttaaacaaagtttctacggttctggttgccgaattcagcgatgcaacggatgaaaatccgcaacgcggcattgtgcgcgaatatacggcgtcggttcgccacgtttcaaaactgcccttgccggcggattttacggcataagcttttgtgcctcgaaacaagcccatgaccttttgcggtcagtgggctttttttcgtttagtcttgccgttttttttaaaaagcgtataatctgcttgcaataaggaaggggttttcccatgtcgtccgattttcaaaaatatatttcttccgttttaaaatctttgccgagcgatgcaacggaactttcattgcgttctgccgccgtcggatgcaaaaataaagaagacggggcttttttggctcagatgttggaaaaacgtccgttggtttccttggagctcagctgcggctttttcaattccgaaggtttgaaagcattttcgactgctttgccgaaaatgaaaaacctgatgtctttggatatttccgtgaacggattagggggaaaagacgctgctcttttggctgaaatccttcccgcgacaaaaatcagaaggttggttttaaagggaaattcttttgaaggaaacaaagcgtcagctttgtttaaagttttgcctcaaacggaaatcagatcgcttattttggggcataatgctttgggaaaagaaggagccgcagggctggcagagggactttgcggttctaaagtcaagtttttggatgtttcaacgacacgcctaacggatgaaagtgcggcaattttggcaaaagctttgcctcatacttttgtaagaaagataaatctcggaacaaacgacataacggcagacggtgtttcgcaattggcaaaagttttgccggatacaaatatagaaacttttgccgtctacggaaatgcggtcggcaacggaggaataaaatctttgtcggaagtgttgccgcaaacaaaaataaccgacttgaatttgtttaactgttctttttccgatgaaggcggaaagaatttattgatagcattgcaacatcctgattgccgcgtttctaaaattcatttaggtctgtttcattcggcaggcgaaaaacagacggcgggggtatcttctcttttgacaaagatgcttcaaaaggctgcagaatcaaacaaagcaaaggaaaaatcgttaaaatcggaacgtgatgccgctttaaacaaagattttgaagaaatcggcgcatcgttaaaaacggcgccgtgcgaagaaatgtccggttttgattatttaatgcgtgcggcgcattgcgggcgtttgccggatgttatgacgtctttggcagagcagggacgtattttgccggcggaaatgtttttccgtcccgacaatcgcggagacacgctgttggatattgtttcggaacgccgccagtttaaagagttttttaagcccgaacattttgattcggcgcaaaagctgcaaaaaatatgggattcaattactcctgacgacaggaaacagctggatgccaaaaatacggttcaggcttttcaaaaaatcaaaaacgccgtcatgggaaatgcggttaagcaggctttgaaaaacaagacaaagaaaaatatcaaagcggcgtttcggacgcttttaaaacaaaaaatgaaaaaccgcggacgcaggggctaagttaatctgcgtttgtcaaaacgccgttcgccaaacgaaaagacgtgccgtcctgaatatcggaaatgctgtatccttcgacttcgacagtgcagtcggaacataaatctttgatataaccgttggcttcgataacggttttaaaattttcggtattgctttttacaataagggtataaggtttgttatcaacgtttctgatgtcggcggcatttgcacaaacaggcaaaaaagcggcgaaaagaataaggcttgccgaaaaagatttttttttcatgatttcccccgaaaaaactctttattttctgaaaataattgtactaaaaccgaaaagcagatgaaagaggttttatatgctgagcgcatcggaacagttttgcaaaaaatatttccctcgggtgtcgttaaaggactggcgggattggaaatggcagctggctcatcgtttgaccaagccgtccgattttttgccgtttttggatctgagccccgaagaaaacgaagaaatgacccgaaaaggggcttttcccgttgccgtaacgccgtattatgcgtcgcttttggctgattgccctgaaatcaggcgtaccgttctgccttcaaaagcggaacggacggtttccgcaggcgaaacgctggatcctttgggcgaagaaccttgcatggtttctcaagggcttgtccatcgttatcctgaccgcgttttatttttagtcaacgattattgttcttcgtattgccgatattgcacccgttcccgtttggtggcaaagcacgaacaaaaatgtctgccccgaaaagacagatgggaaaaggcgtttgaatatattcgcaatcataaagaagtcagagacgttttggtttccggcggcgatccattgacgcaaaacgatgaaactgtagaatatttgctgtcgaatttacgttccattcctcatgtcgaaatgatacgcatcggatcaaagacgccggctgttttgccgatgagaatgacttcaagcctgttaaagattatcaaaaagtatcatcccgtttatttcagccttcatttcacgcatccttgcgaattgacggcggaaacgaacaaagcctgcgaaaaaatcgccgatgccggcattccgtcggggtctcagaccgttttgcttaaaggggttaacgacaacgccgaaacattgaaacgtttaatgcacgcgttattaaaagtgcgcgtacgcccctattatttgtttcaatgcgatccgatagcaggatcttcgcatttcagggttccgataaaacaaggtctggagctgattgacgcattgcgcggccggacgtccggatatgccgtcccgacgtatgcggttgatattcccggcggcggcggaaaaattattttaacgcccgatcattatttgggacgcgacggcgatttcgtcttattcaagaattttgagggcgaaacgtggcgttatccagatccgcaataaaaaagaagggggaatgttatcccccttcttttttatcaaacgtttttatctgaccgactttgccgaaacataggcgacggcggcgtgttccagacaataaggctttccgggcaaagcttctttgccgcagaaatgaaaatcctcatccttcggatccccgatgggccaacggcaggaagtcgacgtcaaatcattgaccgtgaacaatttttctttggctttgtcaacttttttagggctttttttcgtttcttttgcttcaacgacgggagcttcttcctcaacggcattaatttcttcttcaccgcggcgaatgggggaagggcggctgttcaatcccaatctgtgcgcttttccgacgacggcatttttggaaacgcccaatgcttttccgatgtcgcccgttgtcagcccttcgttccaaaggcgtttgagttcttcaacctgttcgtccgtccagcccataataagttcctttgcgttaaatgccgtaaataggcgcttccataaaagtcatatctttgatgcccaaagcatcacggatattaccactatattttttgactgcaagcaggttttcttgagaagtcgaatacatttttaaaaacagttgtatgctgcgccaagcttccgctttatcttcgggggaaaagacgtcaaaagattcgggcggacgttttaatcctctccatgccgcaaggttaagcgccgtcgccggcgtcatttttgcgactcggtgcgctttgaggattttatccatggttattccgaacgttttcggggtaaaaccgtgctttgccagaacggtgcgcattttatccctgtatttttcgggcatgcgttcaaccctgtccattaacacttgaaacgggttcaacagttcttcgtgcagattgttttcaaacaacgccattctgcggattaaggaatggaactcgtccaatcggttggtgccgaattcggctttcagctcttttacggcgcttaacgaagcttctatatcgcctcgggtcacgggagacgtttccgtaaccttatcgacgggcgtttgaggctgtttggctttagacgcgaatttccccgaccgatactcttcgggcgaaagcattttatgcttatcaagtaatgacttattgttgatgtaaaagaaatcgtcgggcgtggtgttttcgtcaatggtaatgactttggaatagcttttccagacgtgtttttcccgatcttttgagggaaaagcttcgggcatcagaagtatataaaggtaaggcgacatatatttgccgtatttttttgcatattccttcatctgcggcgcaatgcgggtcgggaattttccttttaattctttgatgcccggaatattcaggatgcgttccggcatgtaaggcaacgtatgcaaaaacggagcaaaatattgataaatatacttcggggcactgacgattaaattatacagatcgtcttcggctttgctttgccggcgcttcagttcttcgacaccgcccggataagacatttcgatcatgtcgcgaatggcggaagaaaccgtttcttcgggagacaaggctttgacttcgcgatttctttctttcaggcttttcccgatgcttgaaataagccgcgataagctgtttccgcgttcttgcagttctgttccgtcgtcgttgcccgataaagcggaaaccgcaagagccggatcggcttttaacggctgccatttcccgttttcttccgcgacggcggaaaaaaacggaaacaaaagcgataaagaaagaaacagcacctgctttttcatatcaaggtagctttatgcgcacggaataaatcaacgttgtttttccccctgagacaacggggattttccacatgacttttccggcggagggttttgtataatcaatggtggacgttaaaatagtccagctcatgggcacggtttgataatacaagacggtaacggggacgtcctttttattgctgaaggtcatttcataggttgcttcaaagattttatccgtgatgtcgaaacgttttgtttgttttccggcggcggttacgtcaaacgcttcgcccagttccaaccggatcatttcgtcgcgcggcgtatggcgaatggtgtcttctccgacgaaaaggggttttccgtttttgttttgcttataaacgcggacggtgccggagggcaggggaacgcccaatcctgcctttaagtcgtttttgaacaaaagagcgacattgacgcttttcgggtcgaattcgggcatatttttttcttggaagtaagaagcgaccaaatcgtcaatgcggtattctttttcggctttgacggattttgcggacaacaatgccagctgttttgtctgatttgacaagacggtcgttttgcgatccaaagaatacaagtgataatccatcaattcttcttcgctcatggcgttttgcggcacggcggcatccatcatggcgcctgcggcggcgtatctggcaagaggacgcacagcggggcgtacgagattaagtttgcctgcgacaaagctgatgtcggcatcttcatagtctacgcccgaagtatttgtgacggtaacccaaccgtcaagactgacggcgttttcgtctttgttcagttctgcgatatagtttgcctgccaagacagtcccgaagtcagataacttaattcgatatctttgtttctgccgtgctggctgaagacgtcaagaaccaaagtcggcttgtcgcgcaaattttcgggtacgtcgggaaagatcagacgccctttataatccgtttcgattctggatccgattttaaggaccaatcccgcatcgacggacaggacgtttgctttttcgatggtatcttttcccgtcgccgggttagtgctgacgacgcggatgtctttgcccaagaatttttggagcaaagagtttctggatagcaggtcgaaattgaaattttgttccaagacgcggacgccgtcaccgttaaagacggcggtttcgggtttgatttgcgaagacacgttttgaaaagcgatactgttaatgccttttgtgaacggtattgtgcgggtatcgttgaccagagcgaaattttgattatagacgacgaggtttaaattttttctgttttttgtggtaacgagagtttcgcctttttcttcttttttgggcggttcggagtttttagcattttgagcttcggcggcgtttgcccggatcggtgataagaacagacaggcgaccaaagaagcgcaaaggacgtttttatagagcatgaggacgtttccttatcaagtaacagaattaggaagagtttaaactttggcgttcgtttctgcaagcgagataatcaagaagaagggggcatactcgcggtaacgccccctgattttgtgcatatttcggcttgttagcggaaaggcacaaagtaatcatctgctacaatgattatttatgttgcctcattataaatcttattgcaagatgttttttaaatattttcattttttagaaggtttatcagatggcgaaagattttgaatatattctcggattggatttaggggaaacatcaataggatggagcgttgtgcggctgaacgaaggtgttcccgaacatttggaacgtctgggagtacgcatctgttcggacggcagggatgctcagtcccacgaacctttgtccgttgcgcgtcgcattgcccgcgggttaaggcgcagacgcgaccgttacattcatcgccgtattcgattgacggatgttttggtaaagtacggactgatgccggaagacataaaggaacgcaaaaaattgcaggctttaaacccctaccgactgcgatcagaggctttggacagaaagctggagccgtatgaattgggcagagtgctgtttcatattaaccaacggcgcggatttaaaagcaatatgaagacggatcgaaaagattccgaaagcggtgcaatgaaacaggcgattttaaaaacgcgcgccaagatggaagcctctggggcgcggactttgggcgagtttttatattttttgaataaagacaagaccagcacgcaagaatatgtccccgtacggatgcgttcccattcggaaaaaaacaagacggtgtacgagatgtatcccgaccgcgcgatgtatgaagacgaagtgcataaaatctttgaacagcaagagttaagccccgaagcgcaaacggaaatttttaatacaatattttttcaaagaccgttaaagccggtcgaattgggcttttgcgaatttgaagacggagaacgtcgcgcttatacggcttctgtcgtttttcagaaattccgcgcgttgcaacaaattaaccaaatttatgttcaggacgattatgaacgccgtcctttaacaaaagaggaaaaagacattctgaaacatttccttttagaggatttttcagctttggacaagaacgggcttttgacatgggcaaaggtcaggactttgttaaaattgcagaaaaagaaatttaatttggaaagtgaacgtcgcaagggattaaacgccgatgtgacgtcatggaaactttcaaatgcggcgtgtttcggacgggaatggttttcatttagtgatgcgaaaaaggaagaaatcgttgccttaatcacaggagctgaaaaagaagaagagcttatcgccgaattaaaaacgaagtatggcttgtccgatgaacgggcaaaaaatacggcgaacgtttctttgcccgacggggtcgcttcgttaagcgcaaaagcaatgaaaaaactgattccttttttggaagaagggatgctttatgatgatgccgttaaacaagcaggatatgtattttccagttcgtttaaaggagtgttgcccgaaaagtatgagacgttcattgaacccgaaagcggggaatgctttgatgaattgccgtattacggtcaagttttaagaaggtatgttttaggcggcgttcccagtgaagaaaacaaactttttcccgaaaaatactatggcaaaataaacaatccgacggttcatattgttttgaatcagctaagaaagctgattaattctctggttgccaaatacggtcatcctcgcaaaattgtcgttgaaatggcaagggatttgaaactttccaaaaaacaaaaggatgcgatagccaaagaacaggctttgaacgaaagggaaaacaagcggataggggcagaacttgaacggttagatattcgtaacaactatgacaaccgaatgaaatataagctgtgggaagatctgtcgactgatcctacgaaacgaagctgtcctttttgcggaaaacaaatttcgcaacaggatatattcagcccagaatttgaaattgaacatttgattccgttttcacgctctttcatggacggacgctcgaacaaggttttatcctgtcgtcgatgcaacagggaaaaggggaacaaaacgccgtttgaagcattcgggaatgattcgacacgctggaatgccattatggggcgggttgaatctttgccggaaaacaaacgttggaaatttgcatctgatgcaatgtcgcgttttgagcgcgacggcgacttgttggcgcgtatgatgactgatacgcaatatatggcacggatagcgcgacgttatttatgttgtgcggcgaatccgaatcaggtgtacggcattcccggacaattaactgcaaagcttcgcgaacattgggggctgaattcgattttaagcgatcaaaaggaaaaggaccgttctgatcatcgtcatcatgcgattgacgcttttgttgttgcgtgtacggatcggggaacgcttcaaaagtattcaaccgagcgtcgggattatgccaaaccggaaatgccgtcggaaaaagcgccgcatattccgtttgcggactttcgattgtccgatattaagagggtttttgacgaaattatcgtttcgcataaacccgacaggggaaatgcgcgtgcggcgatactcaaaggcgggacggtggcgaaattgcatgaagaaacctattacggtatgggcggagaaggcagcaaaaaaggaacatggaaattgattcagcgaattcccgtctccgaaatcaagaaagcatctgatttggattgcctgattgatcaaaaagggacggcgaacccgcttcgtgtattgcttgtgggggcttcagaatccgaacaggaacaaattattgcgtcgtattttgcccgtcgcggcacacataaagttcgtacatatcgtgaacgcaacaaagacgttattttaccgtttaaggacaaggatggaaaactgtatcgctatgctgtatacggcagcaatgcgtacgcggaaatatactgtccggacaggggtaaaaatgcgggtaagtggcaggttgaaatcataccgaactattgtgcccatcaaaagggatttattccgaaatggcggcacacggacgcccatgcgaaactgattatgcggctttatagaaacgatatggttgcctatgaaaaagaagggaaaactgtaatagcacgggtcaaaaagatgggagggaacggtgttattgtttttcggaatcatctgatagcgaaagaagagggagacagattaagttggcaggctgttgtttcagggatgcagtcggcgaatcttcgtaaaatatatgttgatgttttgggtcgtgttatcgatccgaaacgtcccatgacacaaaacgaaacagatggacaggataattgaaataacgtcaaataaccgccatttagccgttgaacgcggttttatggcggttttcgaagacggcaaagaaatcgggcgcgtcccttttgatcagattggcgccgtgattgccaatgcacacggtttgacgtactccaataattttcttgtccgtcttgcggaacaaaaagcccctttggttatttgcggggcgaatcatgttcctgtttccgttttattgcctctggaaggcaattatttgcaaagttcaataatgtcggctcaggcggcaatgaaggaaacgaccttgaatcggtattggaaagaggttgtgcgggcgaaaatccgacaacaggctgcggtgttggatgcgttcggcttggaatccaaaattcttaaatcaatggctttaaaggtcagaagcggagattccgagaatatggaagggcaggcggcacgatattattttcagactttattcgggaaatcgtttcgccgagacaggacgcaaacgggaataaatgctcttttgaattacggttatacgattttgcgttcatccgttattcgcagtgtcgtagcggcaggtttgcatccgtctttgggactgcatcattgcaatcaatataatccgatgtgtctggctgatgatttgatggaaccgtttcgtccgatgatagatttttgtgtcagacgcttggtcggcgacggatgtgacagcgtaacggcggacgccaaaaaacggttggtcggcgtattgtcgtgttcaatgccgacggacaagggaagcagggaaatatcctatgtcatcaatgatgttgccgtttcgttggcaaaatgcgcacgaggcgaatcggatacgctgaattttccgtctcctatgtccgatttggcattgtggggaatatagatgtcggttacgggatacaatttaatgtggatgatggtaatgtttgatttgcccgtaacagagccggaagaaaggaaacgggcaactgcgtttcgaaattttttgttggatgacggttttgaaatgagccagttttcggtttatttacgtttttgcgggacgcgggaacaagcgcttccgtttgtgaagcgtatacgaagcaatgctccgcaagacgggaaaatcagtattttattttttacggataaacagtttggcgatattattacgatatgcaatcgcaaaccggtattgatgcatgaaacgccggatcaattgacgcttttttgataaggatttttgaaaaaagtgtgaggaaaaggtgttgataattttaaaaaatcgaagggtaaaatcaagaaaagccgttgattttcaacggctttcggatgattatagcagataattactttgcgtcaaaccgcaacttgcgtcgctttgaaaagccggtctcgccaattatagcagataattactttgcgtcaaaccgcaacatcagaatatgatggaaggttgggcggatgattatagcagataattactttgcgtcaaaccgcaacttgcgtcgctttgaaaagccggtctcgccaattatagcagataattactttgcgtcaaattctctttttaataaatattgaattgtttttatgtgcttgttatattgtttaaatcaattctaaactatgggagggaaatatgttggcggaaatcattctggctgccggatgcttttggggcgtacaggcaactttcgataacgtaaacggcgtccgcgaaacaacagtcggatatatcggcggaaatcttaaaaatccctcttataaagacgtgtcatccggacaaacggggcacgccgaagccgttaaagtctctttcgatccgaatacggtctctttggatgaaattctggacgtcttctttatttctcacgacccgacctctttgaaccgacaaggacccgatgtcggaactcaataccgttcggcaatcttttataataccccagaacaaaaaaaagccgcggaaaacaaaatcaaagaatatgccccttatttcgataaaccgatcgttactcaggttcttcccgcgaccgacttttatccggcggaagaatatcatcaaaagtatttccaaaaaactggggcaaaatgccacacttataaaaacgaagaaatgtggaagaaaaaactctcgaaagagcgctacaaaattatgcgcgaaaaaggaacggaaaaaccttacagcggaaagtatgtcgtctttgacgaaaacggaacttatcgttgcggagcgtgcggacaaccgctgttttcgtcaaaatcaaaattcgcaacatcgtgcggttggccgggattcgacagacctttgccgggcgccgtcaaaattcaaaaggatttcagccactctatgatacgcgacgaagtcgtttgttccagatgcggcagccatttgggacacgtctttaaagacggtccgaccgaaacgggagacagatattgcattaattcgcaagctcttgatttcgaggaaacaaagatgactcctcttggcaaaaactaacccagaaaaagcgggtaacgctgttgaaaaagcgtaaaatttatctgtacccgatgcccgaaataaagtatatgtgttctatattttgttttttctgaggaatgctcttatgaaagtcggaattatcggtacgggctacgtcgggttgccgacgggcgtggggttcgccgaattgggacatgacgtcgtttgcgtcgatgccattcaggcaaaggtcaatgctctgaaggccggaaaaatcactctgttcgaagacgggttggaagatttgttccgtaaaaatctgaatgccggaaaaatttcttttacaaccgaaatgaaaaaagccgtcgaaggcgcggatatcgtgattatcgccgtcggaacgcctccgcatcccgttacaaaagaagccgacatgaaatacattcatgccgccgcggaagaattggctcgctatttgacgggatataccgtcgtcgccaacaaatccaccgttcccgtcggaacgggcgacgatgtcgaagcgagaatccgcaaaatcaatccgacggcggatttcgatgtcgtttctttgcctgaatttttgcgcgaaggattcgccgttcatgactttttcaatcccgaccgcgtcatcgtcggtgccaataccgaaaaggcaaaagacgtcgttaaggaactttataagccgttcggcgacaaagctcatatgttgtttgtcaaacgccgttcgtcggaaacaatcaagtatgcttcaaacgcttttttggcaatgaagatacattatattaacgaaatggctaatttctgcgaaaaatccggcgccgatgtgtatgaagtcgccaaaggcatgggattggatacgcggatcggcaacaaatttttaaatccggggccgggctatggcggttcgtgctttccgaaggataccaacgcgatggcgtatatggcgcgcggttacggcgtgaatatgtctttgatcgaagcgacgatcaaaggaaacgacgcccgcaaaacggaaatggcggaacgcattttggcggctgtcaaaggaattgaaaatcccgtgatcggcgttttgggcttggcgttcaagggcggaacggacgattgccgcgaatctcccgcaatggatattattgccgaactgttaaagcataacgtcaaaatccgcgcttatgatccgaaagccatggaaacggcaaaggcattggtcgcagacaagctggaatatgcttcggatgcgtatgatgcggcaaacggcgccgacgttttggctgtgttgaccgaatgggaagattttaaatctttggatttggctcggttgaaacaagccttaaggacaccgaaaatcgtggatttgagaaatctgatcgataaaagttccgcacaagctcaaggctttgaatacacaggtatcggacattaaaaaaaggctccgtttcggagcctttttcattacgcctgttttgaaaaaaagtctgaaatcaatatcccattttatcgagatttttttcaatcaagcggacggtttcatcggacaacaccattttgttgcgcgttgtttcaaaaaattcgcggactttagctttgtgccagtcttttccctgtcgtgtccgtcctgcgcccgcccaatcgcaaatcatttcacgaacgtatttttcgggaatatcttgcgcttgttgagtaacaccgttcaacagcacccagtgttgccaatggtgttttgcacggttgaaatgttccatgatggcaatgcggtagtcaggtgtagcctgtaaagggtcgtagtgtcccgttttgcttctgatttcgcggatttgagggtaatggcgcgcataaacgcgaaacatggacggcaaaaatttatcccagtcatgaacaattccccgccaaaacaatccgtgcttaaagcagaaaatcatgacccagaatttatgtcgcaacaaataaaacagatacatgacaatatcttacctttggcggcgaagattttcaaaggcaatcgacaatatccgaggcaatgatgttttttcctgccttgacggcggcttcggaatggaggaatacggcggcgcaggcggcttcaaaggggggtaagccttttgaaagcatggtggcggttattcccgtcagcacgtcaccgcttccggcggtgctgagctcaaacgaagtctttgcattaacggcggcgcgtccgtcggcgcaggcgatgacggtatcggcgcctttaaggacgacggtgcaattcagcgtttttgcggcgcttaatgcggcggaaagcttgtccaaacctttcagttcggggaataaagcataaaattctccgccgtgaggggtaagaacggcgtttttcatgtcggtgtctttggcaaaagcaatggcgtcggcgtcggcgacaaaaggtttttgagagtccgaaacgatttttaagcgttcttttgtcgtttgtgaaatgccgcaaccggatcctatggcgattgcgcggattttcggattttgaacgacgtctttaaagtcttcgggggcggttatcggaaagacgatattttcggcacaatccgcggcataagcaggacaagcgtttttgtcggcgctgacggagacccatcctgctccggcgcggcgtgcggcacgggcggccagacgagcggctcccgtcatttccgaacctccgcaaatcaaaacggcgcctctggtgtatttatgcgtttgagccgttaaaggcggaatgttaaacagagtttcatcgtttatgaaaaatcgcggattttggtttttgacgatttcatcggggatgccgatggggcacacgacggtttcgccgacgtattcttttgccggataaaggaaatgagcgggtttaggacggcaaaacgtaacggtaagacagcattttaaggcagcccccagaacttcccccgtatccgccgcgacgccgctcggaagatcgacggcgatgcagggaacgtcggtttcgttgacctttttgacaaagctttgcagattttcgggcatcgggcggttcagtccgattccgaacatggcgtcgatcagaacggcttttttttgcaaaaggcgtttgattaaattcggattcatcagtgaagtgacgcctttccagcgagaagcatgtttcaaagcggcaccttttaaatcgggcaggtttcccgtaaagacgacttcgaccgaccatccgcgttgttgaagcaggtttgcgatgacgaagccgtctccgccgttatttccgctgccgcacaggatgaaagcgggtgtttttttgaatcttttggaaatttcgcacacggttgcaaagcctgcgtttgacatcagttcaaattccggcataatttttgcaacggtttctttgtctgcggcatacatttgggaagcggtcagtatttccaagagtattctcccgtggtttgatatttgttaatctttggggaatatcatataacaaatttttgtttcggagtatccgtttatggtggaaagaacggcagaaaacgtgcaaatccttgaaaaaaagccgttgtataaaggttttttcaaggcggacgaatattttttaagatacccgcgctatgacgggacgatgagccgcaccgtttccagagaagtcatggaacgcggtcacgcggcggcggtattgctgtacgatgccgaacgggaaaaaatcgttttggtcgaacagtttcgtgtcggagtttatctgacgggcgaaaacccgtggattgccgaatgcgttgcaggaattatcggtcagggcgaaacgcccgaagccgtcgcccgccgcgaagccgtcgaagaaagcggatgcgaagtgggagaaatcattccgatttgccggtatttttcgtctccgggcgggatgagcgaaacgctgtacgttttttgcggtcagacggattcttcgaaatgcgccgttgaggcggggctggaaaacgaaggcgaagacacccgcgttttggtctgggacgccgacgaagcgatacaggctcttttagacgggaaaatcaacaatgccgttacgattatttctttgcaatggtttatgctgaaccgccgtatgctgaaagaaaagtggggacggaataaagaaggggggctttaaatgaaattgcgtcaaaggctgaaaataacgggaagtgccgttgctttgtcaggcttgctttttatgggcggctgcgccaaaacgatgacggacaatgcgacgctggctttgacggcgggcgattatgagaatgcggcaaattatgccgtgtcggcattaagagacgatccgtccgatccgtatgcgatgatggtggcgggattggcgtttgaaggtcttgggttcccgaataaatcgcgccgctattacgaagatattttggaaatgaacggcggggaaatttccatgttcggagcatttaagcccgttcctcccgaagaaatgaccaaaacggcggccagacgtttgacctttatggaacataaaaaacgcccctttgccgccgtcaatcccgaaacgggaacggcggattttaccgaagtcgcttttaaagacggcaaagaaattgccgtaacggggcaaatttcgccgcaaggcatgcaaattgccgaaaccgtcgcgccgataaagggcgggcttgatatgctttccgaaggtgaacggaatattgttcagcgttttttgacgtttttgcgtttaacggacgaacagctggcaacacgccaagaatttgaagaacgccgagcggcaaatttgggcgggctgttgccttatacgctggctcccgctgggctcggtatggatttgcccgtgccgtccgccgaaacgattattgatcggttgaacgcgttaaaaacggcattggaactgcgctccatcacgccgcgcgaacatgccgtcgaacgggaaatgattttggaagctttgttgccgtcaaatcctcagcgtcgtatgacgccggttccgcctcccgtgaatatgttggaaggggcgaccgccttgcgccgtatcgaaatgttaaagaatttagggctgattacgccggcggaagcggaacaagaacaggaagccattgaaaaactggtttatttaaaactggggatgactgatgcgaacaaaggcataaatgccaaagcggcatcggcatgcatcacgaaatgtttgaatacgccttcggttgtttgcccgcaaacaacgacggcttcaaaaaagaaaacgacgaccaaacggaaaacaacggcgaaaaagacgtcttcaacggcaaagaagaagacgacgcaaagtttgtgtccgtgtccgtaagattttaaaaagaaaaggccgcttcatgcggccttttttgcaaacggaaaacctttcttgaaaagttttttttacgtttgtagaatgccgcatcaatttatttttaggtacgacggcatgcttacggctcaagatttggaacaaatatcaaaaagacgcacattcgcgattatttctcaccctgacgcggggaaaacgactctgacggaaaaactgttgctgttcggaggcgccattcagatggcaggcgcggtcaaggctcgcggagaacaaagaagagcgcgttccgactggatgaaagtggaacgcgaacgcggtatttcggttgcttcgtccgtgatgacttatgaatatgcggggtgtacgtttaatttgctggatacgccggggcacgaagacttcagcgaagacacttatcgcgttttgacggcagtcgattccgccgtgatggtcattgacgccgccaaaggtatcgaagatcggacgcgcaagctgtttgaagtctgccgtatgcgcgacgttcccattattacctttatcaacaagatggaccgcgaagctcaagacccgttcgctttgttggaagaaatcgaacagacgcttgccttggacgtttctcccgccagctggccgatcggtatggggcgcgatttcaaagggtgctacgatttgttaaacgatcgtttggttttgatggacagaaatgccgataaatctcagcttccgcaaccggcagaaacctgtaacggactggatgacgcaaagctggacgctttgttgcccgaggatgccgtttcaaaactgcgctccgatgttgaaatggtcagaggattgtgccctgcttttgacgttaatgcttatttggaaggttccatgacgcctgtctttttcggcagtgcggtcaataatttcggcgttcgcgaattgattgacgggttggtcagctatgcgccgtctccgcgtccgcaaccgacggcaaccagaaaagtcatgcctgatgaagacaaagtttccgcgtttgtttttaaaatacaggcgaatatggatccgaaacaccgagacaggattgcttttgttcgtttgtgttcggggcatttccaacgcggaatgaagctgttgcacaatcgcagcggaaagtatttgccgattcacaatcccgtcatgtttttggctcaagaacgcgaattggcgcaagaggctctgcccggagatattttgggcattcccaaccacggtaacttgcgtatcggcgattctttaacggaaggggaacatcttgtttttacgggcattccgacgtttgcaccggaattgctgcaaaaaatcaggtctgtggatccgttaaaagccaagcatttgggcaaagccttgcaacaaattgcggaagaaggcggtgccagcgtttttcgcccgttaatcggcacggattggattgtcggcgtcgtcggcagtttgcaatttgacgttttggcggatcgtatcaggacggaatacgagattcccgttattttcgaaccgacgtctctttatacggcgcgttgggtcaaggcggacaattctttggatttaaaggcttttatagattcgaacagggcgtccgttgcggaagaccacgacggcgagcccgtatttttggcgcgcaacgcgtggcatttaaacaagacggcggaagattacccaaagattacgttttcggcaacgcgtcagaacgcataagccgaaacgcggcataaggaaaagccccgttattcggggcttttttcaatatcggttttattgtcgctggttttattgccggtcgggcttttttcgttattttgtttttctgcctgttttttatcggggaagggcggctgttttttgacgacgttgttaatggcttcgaacagggtaatcagctcttgagggggcgggtctgattcccttaaataggggtgctttgcccaagccgtggagtggacactgaaatctttaagatagtccaaaccgcagacggtggcggattcgggatattttttaaaggagacggattccagtttgatgctgtcggcgtattttaaaattttgtctatatcttccttgtttttcactaaaaggacggagggcttaaagctgttgatcggagtttgtcccgaatacccgtaggcttcgcctttatcagtaatcaggatgccgacggcctcgtttccaaatccgctttctccgcattttgccaggatttttgtttcggg

SEQ ID NO: 817 - DNA, 20288 bp, synthetic construct
  misc_feature 1..20288: note = Synthetic
  source 1..20288: mol_type = other DNA
agtgattgaaaagattaaggtatgcggagcggaggggagggaagagggacgccctgaggcggctgacgggcgaagagcggcggagcggaaggggcggggagggaacggatgaagcaaggggcaaattgtgcaagccgctttctttcgggcgggcgtggaggcgagcgcgggcggagagggacgaggccgacgcaaaggggcggggctttttccctttcgcaccggcgggcgatagggcggttttttgcaaagcaagaaaaaacgccttattgccaagcaaaaaaaggggcggagcaaatccttatttttttgcagagcaaatgccatccgaagctattcattgcttggtaaaaaagggacgttcggggcggtgtgtccgagaggcaagagagccttctttcatgccgacggaacgagagcccgaaaaaggccgaaagaggatgacgggatgtccttatctttttcatgtcggcggacggagaaaaaacgccggcctttccccttcgcatcggtggtgcgacagaagtgacgcatccgacgggcgcgaccggaaaagagggcgcggcgacaacattaaaagcggcgggaaggggggcggataacggaaaaacggcggatacctcttgtttttttcggcgcaggggcatttgaagttatttattgcttagcaaaaacaacgatgaggcggctccgtgccccttatttttttcggacagaggcatccgaagctgtttattgtttagcaaaaaacaagagcgggcagaacagtgaaagccttcctgaccttgacgctttgccaagcaaaaaaaaggaatgaacgggaggaaaaaaggaagaatgaagaaaaccggacagggcaaaatgcgctcatccccttttcgtgtggccggaagatgcggaaaaagaggcggcgcgaggcatggcagaggagaaggcgtcagttggcgcggtgcgtgattggagaaatgactaggcggcgcgaggcatggcagaggagaaggcgtcagtccgatttgaccaaagtcccgttcgtcaggcgataaagcggagcgtcttcaatgtcggaaaggctgtaacctttgacttcaaccgtacaaaaagaacacaggtctttgatatatcccgccgcttcaatgacggttttaaagctttcccgatcgctttttacaataagggtgtacggcgtttgatccgtgtttcggatgctggccgcttttacaggcggaaccattggaaaaaagatcaatgcgcacaaggccaaaagcggattttttttcatggttaccccgaatttttctttatttctaaatcgttattgtactaaaacctaatgtaagatgaaagaggttttctaatgttgtccgattcagaacgcttttgtaaaaagttttttcccgacgtcgatttgaaaaattggcgcgattggaagtggcaattggcgcatcgtttgacaaagcccgaagattttaagccttttttggacttaaccgctgaagaaacggaggaaatgcaacggaaaggagcctttcccgtcgcggtgacgccctattatgcctctttattggtcgataatccggaaataaggagaacacttcttccttccgccgccgagcgcgtggtttccgccggagaaacttccgatcctttgggtgaagagccctgcatggtttctgccggtttggtgcatcgttatcccgatcgcgtattatttctggtgaacgactattgctcttcgtattgccgttattgtacgcgttcccgtttggtcgcgaaacatgaaacaaagtgtatgccgcagaaaaaaagatgggaaaaagcgttcgaatatatcgccgctcattccgaagtcagggatgtactggtatccggaggggatcccttgactctgaacgatgaggccgtcgaatttttgttggcgaatttgagagctattcctcatgtggaaatgatcagaataggatcaaaaacgccggttgccttgccgatgcgttttacgccgcaacttttgaaaatcatcaaaaaatatcatcccgtttatttcagtcttcattttaaccatccggcggaaatgaccgccgaaacgaacaaggcgtgtatgaagattgcagacgccggtattcccgcgggatcgcagaccgtgttgttaaagggcgtcaacgacgatgcggaaacgttgaaaaagctgatgcacgctttgttaaaagtccgcgtccgcccgtattatttgtttcaatgcgatccgattgcgggatcttcgcattttcgcgtgccgataaaaaaaggtttggagctgattgacgcgttaagaggacggacttcggggtacgccgttccgacgtatgccgtcgacatccccggaggcggcggaaaaatcgtgctggctcccgatcattttgaggggcgcgacggagatttcgttttgttcaggaactttgaaggaagcgtctggcgttatcccgatccggaataatggttgaatatcaatgtcttaaaaggacgcatttgtttttcggatgctcagcttccgagttccggccgtttaatcaaaatacaattaattgaagttctttcaactttgttgccggctcacgcttttgtcgccgcaagaatgtcgtttcggatgaggacttttaagcgttccatgacaaaaagcccatataaagaaacgctttgaacaggcaataaaaaggaaagccccctttctgaaaagaagtgaagcaagagggggacggacggacaggagccggatacaggctgtcgaaagtttaacacggaagaacggtaacgattgaacggattgccttgtatagaaaaagcaaccgagaagttgctgataaagtttcaaacgtgaaaggaaagcgggctatacggcgatcagatattcacggaagcgggaacgacatattttcaccatttattgaaacggcggaggcacaagcgacgatatcaaacgtagccgccctaagaaaaaagtgaaaagcgtcaacgagataagcttggacaaactcaaagccggcttatcttgaagcggaaaacgactttctagaaaactgaaagccttggaacaaggggcaaagtcggaaaattcgctccggtttccaagacttatcggaaatgaaattgcttggataacgccttcttcggacacatgaaggacgatatggacattaaatcctgccggacttttgaagaagtgaaaaagctgattgaaacttatatctctttataataattggcgtatccaatggggattaaacaaaatgacgccggctgaaggccggcaccattcgttaaaacctccttgaactgcccttagaggggctttcctcctttcggggggactgttcaataaagggggcttttttgaaaaaggggaggaaaaagcggttttatcgaaccgatttcgccgaaacataagcgacggcggcgtgttccggacaatacggttttccggggatggcttcttttccgcaaaaatgaaaatccccgtctttcggatcgccgatcggccaccggcaggacgaagaagtcaggtcgttgaccgtaaacagcttttgtttcggagcttccgctttcttgggtgtttttttcggcttttccttgacttccaaaggcagggattcttgcgcgggatcgtcttcggcgcgacggatgggggaaggacggctgttcaatcccagtctgtgcgccttaccgactacggcatttttcgacacccccagaacttttccgatttcgcccgttgtcaggccttcgttccaaaggcgtttcagattttctacctgttcgtccgtccaacccataattcgtttccttttctttttcgcgtttaaattccgaaaatcggagcttccataaacgtcatatcggtaatgccgaatgtttcacggatattatcactatatttcttgactgcaagcaggttttcttccgtcgttgaatacatttccaaaaacaaccggatgcttttccaagcttccgccttgtcttcgggagaaaatacgtcaaaggattccggcgggcgtttcaagcctctccacgccgccaaagtcaacgccgtcgagggcgtcattttcgcgactcggtgcgctttgagaattttatccatggttaatccgaaacttcggggggtaaatccgtgtttcgccaatgcggaacgcattttatcgcggaatttcggcggcattctttccgtgcggtcggtcagaatttgaatcggggaaaccaattcttccgccagattgttttcaaacagtgccatccgccggagttccgaatgaaaatcactcagtctgtccatgccgaattcggctttgagtgcgccgatcgcgcccaaagaagcctctatgtcgccttcggtgacgggagagtccgccgtcacctgatccgccggcgtttgcggtcggggcgtcttcgtcgcatatcctcccgattgataggcgtcgggcggcaacattccgtatttgtccaacaaagatttgtcattgatgaaaaacaaatcggcgggagtcgtattttcatcgattgttatgattttggaataacttttcggtgcgggcttttcccgatcgggagccggccacgcttcgggcatcaaaaggacgtaaagatacggcgacatatatttaccgtactttttggcgtattctttcatttgaggggcgatacgcgtcgggaatttgcctttcagctctttgatccccggaatgttcaaaatgcgctcgggcatatacggcaaagtgtgcaacagcggcgcgaagtattgataagtgaacttcggcgcgtggatgatcatgtcgtacagttcgtcttccattttgctttggcggcgttgcatttccttgactccgccggggaaagacagctcaaccatgtcgtggatggccgaatagaccttttcatcgggagccaaagcgtcgactttgcggttgcgttcggccataccggctttcaaccccgacagcagacggccgaaacggttcccgtgttcaaacaaatcgcgtgcggcgtcgttcggggcgttccggttttcattcgcgtcgtccgtttcgacgtcgacgacttccaacgcctgccagttcaacgcgttctgcgccgacgagggcgtcgccggcaacagaaacggcaaactcaaaagaacaaggttctttttcatattactgcaactttacgcgcacggaataaaccagcgtcgttttaccgccgcccgcaacgggaatcttccacaacaagcggtttgcatcgggtttggagtactctatcgtcgacgtcaaaaccgtccaagaggcgggggcgttttggtaatattgaaccgtaacggggctgtccttgccgtttttaaacgtcatttcataagtgatttcaaagattttgtccgtaatgtcataacgtttcgtctgtttgcccgaaacagtgacgtcaaaagcttcgcccaacgccagacggatgtcttcgttgcggggagtatgacggatggaatcttcaccgacgaacagggaatgcccctttttatcctttttataaacgcggatcgttcctgcgggcaaaggtttccccaaaccggagtccgcatcgtttttaaaggtcagatagactttcgcgctttgagattcaaattcgggcatattgcgcgtttgggtatattgggggacaaggttttcacaacggtattccttggcggccttgaccggaggcgtgctcaacaaagccagctgtttcgtctggttcgataaaatcgacgttttgcgtcccaaagaatacagatgataatccatcagggcttcttccgccattcccgcttcattcttcacggcggcgtccatcatggcggcttttgccgcgtacatcattctgggacgtgcaacgggacggacgatgttcagttttccggcgacaaagttgatgtccgcatcgtcatagtcgacgcccgacgtattcgtcaaagtcacccagccgttcaggttcaggctgtcttcggcgtcgttcagttcggcgacgtagttcgcctgccatgacagacctgaagtcaggtagtcaagcgtaacgttcttttcggcctgatcctgactgaaaacattgagaaccagagtcggtttgtcgcgcaggttggtgggaatgtcggggaaaatcaaacgccctttgtaatcggtttcaatcctgtcgccgatttttaaaatcaacccgaaatccgacgacaggacggttgcgtcttcggtcgtttccgcacccgttgccggattggtggaaacgacctgaatggttttatccagatatttttgcaacagcgtttcgcgggataacaggtcgaaattgaaattctgttccatgacccgaatgtcggatcctttcaaaacggccgtttcggggcggatttgacgggatacgttcttgaacacgacgttgttctggccgcgaaagaaagatacgtttctggtatccgaaaccaatgcgaggtcttcgttgtaaacggtcacgttcaaagattttcttgcatccgtatcggcgaaggtttcttttaaagtcatcaacgggctttttttcgcttgctgttttttttgttccgcgtccgcctttcctttggaggatttggaagaggcttgtgcatttgatgcgggggctgtcaggcgggcgaccggcgttccgtcgtcggattgcaccggcgtttgcgcgtttgatgcggtcggcaacaatcctgcggcgatgagagcgaacaaggcggatttttttaacatgacggaattcctctttcaaaaatgttagagaacggatgcattgctaaagagtgtaatcgccgcaacggttttgtgcaagtgtgatattaaaggaaagggaggcgcacgcgcagtgacgcctcccgaattttgtgcagatttctgcttgttagcggaaaggcacaaagtactcatctgctatgatgattatttatcttgccagagattgaaacttattgcaagatattttttaaatattttcattttttagaaggcctgagcaaatgacgaattttatggattatattctcggattggatttgggggcgacttccatcgggtggagcgttgtccgcttaaaggacggggttcccgaaaaggtcgagcgtatcggtgcgcgggtttattcggacggcagggagtcaaagtcgcaggagcctttggccgttgagcggcgcgtggctcgcgggatgcgccgccgtcgcgaccgttacatccgccggcgcacaaaattgatgcacgtcttggtaaaatacggactgatgcccgaagacttggccgaacgcgcaaagctgaaatcgcttaatccttacgaactgcggaaaagagcgttggatgaaaagcttgctccttatgaactggggcgcgcattgtatcacatcaaccaacgccgcggctttaaaagcaatttgaaaaccgaccgcaaagactccgaaagcggcgcgatgaaagaagcgattaaggaaacgcgcaaaaaaatggaagcgtgcggcgcacgaactttgggcgagtttttatatctgttgaataaagacaaaaaaagcacgcaggatttcgtttccgtccggatgcgttctcatttggagaaaagcaaggccgtgtacgaaaagtatcccgaccgtgcaatgtacgaagacgaagtgcgtcaaatctttgccaagcaggaattaagcgacgaggcgaaaaaggagatttttgacacgattttcttccagcgtcctttaaagccggccgaactcggttcgtgtgagtttgaagacggggaacgccgttcttacgtcgcttcgcccgcgttccaaaagtttcgtgcgctgcaacaggtgaaccagctgtatatcgaagacgatttcacgcgccgtccgttggaacaggatgaaaaggaaactttgtatcattatcttttggatgatttttcggctttggacaagaacggcctgttgacgtgggcgaaagcgaaagctctgctgaacacgcatcacaagctgaacaagaaaatcaaattcaatctggaaggcgaacggcgcaaaggcttgaattccgacataacgtcttggaaactttccgcttccggatgtttcggcaaggaatggtagggatttccggacgagaaaaaggaagaaatcgtcagcgtgattctggacgccgaaaattcgcgggacttggccgaaaaattaaaggaaaagttcgccctgaccgatgaaaaagccgccgccgttgccgatacgtctttgcccgacggcgttgcttcgctcagccgcaaagcgatggcgaaaatcattccgcatttggaaaggggattgctttataacgaagcggtggaaaaggccggttatacgttttcccgacgtttcaaaggtgttttacccgaagaatacacgactttcatcaatcccgaaacgggggagtgttacgacgagttgccttattacgggcaaattttggaacgctatgttctgggcggtgtaaagtcggaggaaaacaagcttttccctgaaaaatattacggaaaaatcaataatccgaccgttcacatcattttgaaccagctcagaaagctggtcaacgctttggtcaaagaatacggccatccgaaacggattgtcgttgaaatggcacgcgatttgaaaatgtccgaaaagcaaaagagggaagtcgccaaggaacaggccgcaaaccaaaaggacaacgagcgcatcggtgcggaattggaacggctgggggtgaaaaacaattatgccaaccgtatgaaatataagttatgggaagatttgtccgccgatgtgacaaagcggtgttgtccgttttgcggcaagcaaatttcggcggaaggcgttttcagccctgaatttgaaatcgaacatctgttgccgttttccagaacctttatggatgcgcggtcgaataaagtcttgtcctgccgccgttgcaaccgtgaaaagggaaatcaaacgccttttgaagcgttcggtgcggatgaaagccgttggaacggcattatgggacgcgccgagtttttgcccgcggataaacggaaaagattcagtcctgacgccatggagcgtttcaaggacgaagaacagttgttggcgcgtatgatgaccgatacgcaatatatggctcggattgcgcggatgtacttgtgctgtgcggcgaatccggttcaggtttacggtattccggggcaattgacggcgaaattgcgcgaccattgggggctgaattcgattttaagcgatcagcacgaaaaagaccgttccgaccaccgccatcacgcgattgacgcttttgtcgtcgcttgtacggggcgcgggactttgcaaaaatatgcaaccgaacgcaaggattatttcaaacccgaaatgccggacgaaaaagctcctcatctgccgtttccctctttcaggcttgaagacgtcaagcggttgtttgatacgatggttgtttctcacaagcccgatcaaggcgatccgcggggggcgatccgtaacggcaagacggtggcgaagttgcacgaagaaacgtattacggcatgggcggggaaggaaagaaaggatgttacctgttgatacagcgcgttcccgtttcggaaatcaagaccgcggcggacttggattgtctgatagaccaaaaaggcacggcaaatcccatccgcgttttgttggagctttatccggaaaagcccgcttccgaagtgatcgcggattattttgcagagcgcggtacgaaaaaggtcaggacataccgcgagcgcagtaaggacgtcattttgccttttaaagacaaaaacggaaagccttatcgctacgccgtgtacggcagtaacgcttatgcggagatttattgtccggacagaggcaaaaataaaggaaaatggcaagtcgaggtcatcccgaattattgcgctcatcaaaaggactttgtgccgaactggaggcatacggacgctcatgccaagttgatcatgcggctgtatagaaatgatatggtcgcctatgaaaaggacggcaaaaccgtgattgcaagagtgaaaaagatgagtgtaactgggcaattttctttccgttctcatctgattgcaaaagaggagggggataaattgagctggaatcccaccgcttcaggtatgcaggcagccaacctgcgcaagatccgcgtagacgttacggggcgcgtgttcgatcctcaaaaaggaaaagtaaaagccggcggttctgaaaatcaaacgaacggctcgcttccctctgatgtggaaataaagcctttttctgagggggccgagagttcaaatgacgtttgacttgctttctcccgaaacaaaagcaaaggattccgatggacaggattattgaaatttcttcggataaccgtcatttggccgtggaacgcggctttatgacggtcagcgaaggcgggaaggaaatcgggcgcgtgcctttcgaccaaatcggcggcgttattgcgaacgcttacggcattacctattccaataattttctggttcgcttggcggaacaaaaagttcctttggtgatttgcgccgcaaaccatgttcccgtttccgttttattgcctttggacggcaactatttgcaaagttcggttatgtcggctcaggcggcgatgaaggaaacgacaaaaaaccgtctgtggaaagaagtcgtgcaagccaaaataaaacagcaggcggccgtgttggaagctttcgggctggaggctaagcctttaaaaataatggttcccaaagtcaggagcggcgatccggaaaatgtggaagggcaggcggcacggtattattttcaaactttgttcggaaaaaatttccgcagggacaggactcaagccggtattaacgctttactgaattacggatatacgattttgcgctccgccgtcattcgtgccgttgttgcggcggggttgcatccgtctttgggcttgcaccattgcaatcagtacaatccgatgtgtttggcggacgatttgatggaacctttccgccccatggttgatttttgtgtcagacggcttgtctccgacggttgtgaagacgtaacggttgatgcgaaaaagcgtcttgtggctgtactgtccgtttccgttccgacgcaaaagggaagcattgaagcgtcgtatgtgattatcgatttggcggtttctttggcaaagtgcgcgaaaaacgactcggagagcctgaattttcctccgcctgtttcggatatggcgttatggggattgtaaaatgtctgttacgggatacaatcttatgtggatgatggtcatgttcgatttacctgtaaccgatcctgacgaacggaaaaaagcgacggcttttcgtaattttttattggacgacgggtttcaaatgagccagttttcagtctgttttcgcttttgcggtacaagggatcaggcgatgccttttgtaaaacggattaaggcgaatgctcctcaagacgggaaaatcagtattttgttttttacagacaagcagtttgcagatataataaacatcagcaatcgcaaacctgtttcgatgaaagaaacgccggatcagctgacacttttttagggcggatttttgggaaaatgcttgtggataagttgtttataactttaaaaacccgaatgggaaaacataaaaaagccgttgaaaatcaacggctttttcgtaacagattatagcagataaatactttgcgtcaaaccgcaacagatcgtttggaagggaatttaaatcagagattatagcagataaatactttgcgtcaaaccgcaactcggcataattgccaacttgccatccgtcgattatagcagataaatactttgcgtcaaaccgcaacaaacgtcgacgacatcttttaaactttttaattatagcagataaatactttgcgtcaaaccgcaacggaaagctttttggctatgctgtcgatcggattatagcagataaatactttgcgtcaaaccgcaactactgaactaatagacagtcttgttacaaaattatagcagataaatactttgcgtcaaaccgcaacagtaatgtacacgttcccacaccctcatcaattatagcagataaatactttgcgtcaaaccgcaactacaaaatgtggagaatagaatcaactactattatagcagataaatactttgcgtcaaaccgcaactggacgtcgatttttatttttcggcgttatattatagcagataaatactttgcgtcaaaccgcaaccaagacgttggctttgtccggtttgggcgttattatagcagataaatactttgcgtcaaaccgcaactcaggctctaaaacataattttcaggcaaaattatagcagataaatactttgcgtcaaaccgcaacaactccgaaacgctatttttggctttacatattatagcagataaatactttgcgtcaaaccgcaacaaaattccgtatatgatgccagtataagaattatagcagataaatactttgcgtcaaaccgcaactgtgtattaaaacaaacataatatgacataattatagcagataaatactttgcgtcaaaccgcaacaattgcaacactttttttatgatttctatcattatagcagataaatactttgcgtcaaaccgcaacccgccgtgttcggcatttggggagtgtacgattatagcagataaatactttgcgtcaaaccgcaactggtttgaaaataaaccaccttttcctaacaattatagcagataaatactttgcgtcaaaccgcaacaaaaaccgcgctatgctgaaagcctaaaaaattatagcagataaatactttgcgtcaaaccgcaactaccaggtgcatataaagcactttgtgacattatagcagataaatactttgcgtcaaaccgcaactatcaggtgcatataaagcactttgtgacgattatagcagataaatactttgcgtcaaaccgcaacgaaaataaatttgatagatttgataaaaaattatagcagataaatactttgcgtcaaaccgcaactcatttgtcatttctacctgcctttcttctattatagcagataaatactttgcgtcaaaccgcaacttggtaaggttcctttcgtcttacaaatacattatagcagataaatactttgcgtcaaaccgcaacatgcttctctgtctcatgaagggcctgcaattatagcagataaatactttgcgtcaaaccgcaacttacaaatatacatttgcatatttaaaaaaattatagcagataaatactttgcgtcaaaccgcaacgaaaataaatctgatagattaccataaaaaattatagcagataaatactttgcgtcaaaccgcaacaatgtatcaggtacatatcaaacagtacgtattatagcagataaatactttgcgtcaaaccgcaactttctgttaaggatggcaagaaccctgtgtaatatagcatattaaatacttgcatcgcaaatactcgaatatagtattcgaatcaattttcctgtcgaaaaatgacatggggcgggctgtcgggcatggagggaaattttgcgggcagtctgacaaagtataataaaaactgccgtaaaaaatgacgggattgttttttcagtgtacgcttcttatatcatttcacggatgaagatgacaaaaaaaggctgggaggcgtaaatgttggcggaaatcattttggcagcaggatgtttttggggggtgcaggccgcttttgacaaagtgaacggggtgcgggaaactcaagtcggttatatcggcgggcaatcggaaaacccgacctataaagaggtgtcttccggaaaaacagggcacgcggaagccgtgaaagtgacatacgacccttccgtcgtttccgttaatgaaattttagacgtgtttttcatttcccacgatccgacgacgctgaaccgtcaaggcgttgataaaggaacgcaataccgttcggcgattttttacacgaccgaaggacaaagaaaagccgccgaagaaaaaatcaaagaatatactccgtattttgacgatcccgtcgtaacgcaagtcgttcccgcatcggcgttttatcctgccgaagcttatcatcagaagtattttgaaaaaacgggcgtgcaatgccacgtttatcgcaacgaaaaaatgtggaaaaggaaactgtccgccgaacggtacggggtcatgcgggaacagggaacggaaaaaccgcattccggcaagtatgtcgtttttgacgaagacggcacatatcgttgcggagcgtgcggccagccgttgtttgattcctcttcaaagtttgcgacgacttgcggatggccggggttcgaccgtcctttgaaaggagccgtgaaaacgcgcaaagacctcagtcacggtatggtgcgaaccgaagtcgtatgttcccgatgcggcagccatctggggcacgttttcaaagacgggcctacggaaacgggcgaccgttattgcatcaattccgttgcgttggattttgaagaaaaacgtatgacgccgatcagttccaatcagtcggattgataccggtgtttttatcaagttcgcgttgagaggtgtttctgcggtgatgttgacggtcgcgacgatcgaatgacctccggtttcagccggcgggatgctttgttccgtgcaaatacgttttaaggcgttatccgcccgtttccgaccaaccggataagtgtcgttgaattgacaatgttttccccgttttttcagggtcgtattacaaatggtacggagcgggaataaaattatctgtacccccgatatgaaataaagtatatattgaaggcatcaaatgacgtttgttttttgtaagggatgatctatgaaaatcggaattatcgggacgggctatgtcggtttgccgacgggcgtcggttttgccgaactggggcacgacgttgtgtgcgttgatgcgatccaagccaaagtcgacgcgttgaaagcgggaaaaatcacgctgtttgaagacggattggaagaattgttccataaaaatctgaaagcgggaaagatcgcgtttaccacgtcgatgaaagaaggcgtcacggatgcggatattgtgattattgcggtcggcacgccgcctcatcccgtgacaaaggaagcggatatgaaatacattcatgccgcggcggaagaattggcgcaatatttgacgggctacaccgtcgtcgccaataaatcgacggttcctgtcggcacgggtgatgacatagaggctcgtatccgtcaaatcaatcccgatgcggatttcgacgtcgtttccttacccgagttcctgcgcgaaggtttcgccgttcacgattttttcaatcccgatcgggtgattgtcggcgcgaacaccgaacgggcgaaagacgttgtgaaagagctttacaaaccgttcggcgacaaagcgcatatgttgttcgtaaaacgccgctcgtccgaaacaatcaagtatgcttcgaacgcatttttggcgatgaagatacattacattaacgaaatggcgaatttctgtgaaaagtcgggtgcggacgttttcgaagtcgccaaaggaatgggaatggacacgcgtatcggcaacaaatttctgaaccccggccccggatacggcggttcctgtttcccgaaagacacgaatgcgatggcatatatggcacgcggatacggtgtcgatatgtcgttgatcgaaacgacgatcaaaggcaatgatgcgcgcaaggtcgcaatggccgaacgtattctggaggcggtgaaaaacgtcaatcatcccgttatcggcgtgttggggctggcatttaaaggcggcacggacgactgtcgtgaatctccggcaatggaaattattgaagaattgctgaagcacaacgtaaagattcgcgcctttgatccgaaagcgatggaaacggccaaaattttggtcggggacaagctggaatacgcttccgacgcttacgacgccgcgaaaggcgcggacgttttggcggttttgaccgaatgggaagatttcaagtcgctggatttgacaagaatcaagcaagcgatgaatgcgcctgaaattgtcgatttgcgcaatattttgaacaaatccgaagcggaagacgcagggttcggatatcggggaatcggccgctgatttgcgcatttgaaccgtaaaggaaaagcctccgtgtgatgcgggggctttttttgtcgtttattaaccgaaaaacagacgtgccaagttaaaaacgcccataaaaacgaacaaagaggctttcacttcccatataaaaccgatgaaggaaaggggaagcgttgcggacaacatgaaaatcccgagcgtttttgtaaacggcggggaaaaaggcgtgccgtgagcatccgttttgacaaggacgatttcaaaaatgttccagaagtaaatcaaggtcggcgtcagcaggacaaacaaggggttttctttgaaaatcctcaaaaaatcgaacggttgcgataaaaaataacataaggatgcgatgaacggcaaaaggaacagaccgagctggatgaacgcccgttttttatatccggcataaaaattatgaatgccgcatattcccgcgaacaaccccgaaaaataaaacagaaaagaatttttgggcgaaccgccggattgcaaaggaacgttttcttgcgttttttccggaacggaatttccggaaggtcgggcgttttcctgttctttgatatggttcatttccgctaaaaaggcttttctcacctcgaattcatcggaagtcatatcgggtctgtttatcggcatttgtctttgttctccttcaggggattggtttcaggcagtcaattatatccgaggcgatgatgttccgccctgcggcgatccccgccgcggaatgaagaaaaaccgcggcgcaggcggcttgaaacggaggcaaacctttcgccagcatcgttcccgcgattccggccagaacgtcgccgctgcccgccacggacaactcgaagctcgtccggtcttggattgcggcaattcctgccggcgaagcgacgaccgtatccgcccctttgaatacgacgaccgcattcagccgttcggcggcttgcaaagcggcggaaattttatccgaagacttcaagtcggggaaaagacggtaaaattctccggcatgaggcgttaatacggcgtttttcaaatcgacattgcgcacgaacgccaaagcgtccgcgtccgcgacgaaaggtttccccgatcgggctgtcgttttcagccttcgttccgtttcttgcgttacgccgtttccggggccgatgacgattgaccggacttttccggaaacggccaaatcgtcgaagtctgaatcccgattcaacggaaagacgacattttccgccgcatcttgcgtataaaatccggcggaggacgcatttgcggcgacggcgacccatccggctccggctcttcgggcggcgcgggcggacaaacgagccgctcccgtcattttttccccgccgcaaatcaggacgccgccgcgtgaatatttatgcgatccggcgtccggttccggcagggtaaaaagttccgtgccgttgacaaacagaaacggtttttgccggacgatgacgtcgtccggaatgccgatcggacacacgacggtttctccgcaacgctctttcgccggatacaggaaatgagccggttttggacggccgaacgtgacggagaacaaacatttcggcgcatcaccggcaatttcccccgtatcggctttgactcccgaaggcaggtcgacggcgatgaagggcaattccatggcgttcgctttgcggacgaaatccgacacgtcgtccggtaaagggcggttcagtccgatgccgaacattgcatcaataatgacgccttttcgtgaacggatgcgttccggcagggacggagtcaggtacgacgtttttcccttccacaaagacgcgtgtttcaacgccgcccctttcaatccggcgggcggagcggtcatgacgacttcgaccggccatcctctgcgctccagcaaacgagccgccgcaaaaccgtctccgccgttgttgccgttgccgcacaaaacgaaaacgggggcttttttgattcttttcgttatttcacaaaccagtgcgaacgccgcgttttccatcaggttaaattcaggcacgatttttgcaatcgtttctttgtccgcggcgtacgtttgtgaaacggtcagaatttccaacaggcgttctcccatcaggatttgatatttgttaatctttacggggtattatataccaaatttttgtttcggagtatccgtttatggttgaaagaagggcggcaaacgtcgaaatcgttgataagaaacctttgtacgaaggttttttccgtgctgacgaatattttatcaaatatccgcgttataacggggaaatgagcaggacggtttcccgcgaggtcatggaacgcggtcatgcggcggccgttttattgtacgacgccgttcgggaaaagattgttttggtggaacagttccgtgtcggggcttatctggccggagaaaacccgtggatcgtcgaatgtgtcgccggaattatcgataagggggaaacgcccgaagaagtcgccgtgcgtgaagcgtatgaggaaagcggatgttcggtgactgaactggttccggtttgccgttatttttcttctccgggcggtatgacggaaacgctttttgttttttgcggccggattgattcttccaaacatgaggatttgggcggtttggaaagcgaaggggaggacatccgcgttttggtctgggatgcggaggaagcaaaaaaggctttgcaggacggaaaaataaacaacgccgtgacgataatcgcccttcaatggtttgtgatgaatcgcgaaagtctgaaaaagaaatggggctgatgaaaggaaagggcagtgtcatgaatatgcgccggaatttgaaaataacgggaacggccgtatctttggctgttttgggatttttgagcggatgtgcggctccgaaatcggacgatgcgattttggctttggcggcgggcgaatacgaaacggcggctaatttttcggtggcggctttgcgtgacaatcccgaagacccgtatgccctgatggttgcggggcttgcttttgaaggcttgggctttccgaacaaatcgcgccgtttttatgaagatttgatcgagctgaatgtcaatgaagtttcgatgttcggcacttttcgtcccgtcgcgcccgaatcgatgatggaaacggcgaaaaaacgcctgacattcatggaacataaaaaacggccgtttgccgcggttcgtcccgatacgggaattgcggaatttacggaagtcgcttttcaacctgcggaaaacggcgtgaaaacgggaaaagcggaaaaaacggtgcttgccggcgggctggatatgctgtccgacggcgaccggaacgttgttcaacgctttttgacgttgatgcaattgacggatgaacaattggtaacgcgtcaggaatttgaaatgcgccgcgccgcgaatttgggcggtttgttgccttatacgctttcgccggccggattggggatggatttgcccgctccgtcggcaaagacgctttcggaacgcttgaacgctctcaagacggccttggagcttcgttccatcacgccgcgtgaacacgctgtcgaacgcgatattattttggaagctcttttgccctccgttccgcaacgccggatgattccggtcgctccgcccaaagatgttttggaaggggcgacggcattgaggcggattgaaatgctgaaggatttgagcttgattaccccccttgaagcgaaaaacgagcaggaagccgttgaaaagctggtttatatgaagctggggatgagagatgcgaacaaaggcataaatgctcaggcggcgtcggcatgcataaagaaatgcctcagcacgccgcaggttgtctgccccgcaacgacgccggccaaaaagaaaacgccggcgaagaaaaagcccgctccggccaaaaagaaaaccgttcagccgtcttgcgtctgtccggctcaataacttttttagctttgaaggcaagcgtcgggtattccgacgaaaattttccaaataacatataagcaatgtattttaagaagaacctccttgcttgccgcgggaggttttttatttaataaaaggatgatttttgttttgttatttttaaaaacggttgagtttatattttttaaatactgatttatgggttt

SEQ ID NO: 818 - DNA, 7268 bp, synthetic construct
  source 1..7268: mol_type = other DNA
  variation 2419..2523: note = n is a, c, g, or t
  misc_feature 1..7268: note = Synthetic
cgccgcgccgttcatgttgatggtcgcgcccagaggaatggaaacggagtaaacttccttatccagtttcagttcttcgcacagctgcatattgacggggatgttcgccgccgagcttcgggtgaagaaggcggtgacgccgctgtccttcagacatttgaagaccagcgggtagggattgcggcgcatgatgcaaaacaccaaaatcggattgacgaccagagcgacaaaaatcatcgttccggtcagtgtcattcgcaaaaggttgtagtctttaaagaagctcaatccgtttttggtgacggtcgtgaaaaaaatgcccatgatgccgaacggcgcaaaacggatgatccagcggacaatggtcgtcagcgcttcggtgatttgagcgatgacgtgcgttcccgccgccgtcgcgtgtttcctcatggcgattccgaaaatgatcgcccagatcagaatgctgatgtagttcgctttccgaagggcgttaacgggattttcaagcagattcgaaagcaacgccgtcgcgacttccttcatgccgccggggacggggtgcgtcgccgcctgcaagaagtgcattttgaccggaaacagaaaacaaataaggacggagatgacggcggcgatcagcgtgctgaacagataaagcccgatgattctgcggaattttcgcattttcaggcccgtcgcgttgatggccgcgctcatcaccgaaaacagaaccagcgcgggcgcgacggctttcagcgcgtcaacgaaaatcgttccgaacaaatgcagaaagtccgcttcgggaaagaagcggccggccagcgcgccggcgatcagcccgatgacaatctgggtgaccagagattttctcaagaaattgaagataaacgacataaacgcttcgtccgcaaacaacccgttgccacggtatcccaaaaaggcttggcggacaagaaaatttccgacggaaatcatcggccggattaaaaaatttaagggggcgacacgcggtcggcccccttcattttgtgaacgattcgttcttgttaacggaaagacacaaaataatcatctgctacaatgataaaaacattttgccatatatttgaaagtgtgtcaatatattttaaaacaatttttaagaggtatcgtcatgcgttatgtattgggtttggatctgggcgaaacgtcgctggggtggagcgttatcgaaacaaaggacggcgcgccgtgccgcttcgtcgatttcggcgtccggatattttcggacgggcgggattccaaaacgaaggaaccgcttgccgtcgcccgcagaatcgcccgaggaatgcgtaaacgccgcgaccgctttgtgatgcgtcgcgaaacgctgatgaacaagctgatcgagtacggtctgatgcctgcggacgaagcggaacgtaaggcgctggagcggctcgatccgtactttttgcgcgcgaaggcgttggatgaaaagcttttgccgtacgaactgggcagggcgctttttcatatcaatcagcgcagaggattcaaaagcaaccggaaaacggacaagaacgataaggaatccggcgcgaaagaggccattaaggaaacccggcaacggatgacggacgccggcgcgcggacgttgggcgaatatctgtaccttatgaacaaggataaaacgtccacgcaggattttgttcccattcgcgccaaatcggtcgttgtcaaaggaaaagcaaaatatccgctttatcccgaccgcgcgatgtacgaggacgaataccgccaaatcatggcaaaacaaggattgtccgaagaaatcaaggacgacttgtttcacgttattttcaatcagcgtccgttgaaacagccggaaatcggcttttgccaattcgaggaaggcgaacgccgcgcgtattgcgcttatccggcttttcagcaattccgtcttatgcaacagatcaatcagctgaaaatcctttacgatgacggggagcagaatttatcggatgagaatatggcggagaagcgggcggttttgtaccgttacggggcgcaggacttttccgctttggacaagaaaaagcggacgctgacgtgggcggcggcgaaaaagctgttaaagcgcttcggcgtcaatccgaaagcggctttcaatctggaatccgaacggcgcaagggcttggacgccgacacgacggcggcgcagttggcggatgaaaaatgtttcggcaaggcgtggttttcttttgacgaagcgaagcaaaacgaaattgtggcgttgctgttgaacgggcaggacgaatcgaaactgatcgaagaactgcaaaacagatacgcgttgagcgcggagcaggcggaatcggtcgcgaatgcgtctttggaggacgggacggcctctttgagcctgaaagcgttggaaaaaatnnnnnnnnnnnnnnnnnnnnnnnnnnnnnnnnnnnnnnnnnnnnnnnnnnnnnnnnnnnnnnnnnnnnnnnnnnnnnnnnnnnnnnnnnnnnnnnnnnnnnnnnnacgttttctttaaagacaaaggataaactgcccgaatattacgacagcttcatcaatccggaaacgggcgaggtttatgacgaactgccgtattacggggaagtgctgccgaaagcggtcatcggcgggacgcagaacccggccgataaagataaaaaagaaaaatactatggcaaaatcaacaacccgaccgttcacatcgcgttgaatcaggttcggaatctggtcaacgcgcttgtcgaacgtttcggtcatcccgaatcgatcgtcgtcgaattggcgcgggaattgaagctgggtaaaaaagccaaagacgaactgaacaggatccaaaccgaaaacacgaaagagaacgacgctatcgccaaaaaattggaagaagagtgccatgttaaaaactcttacgacaacaggatgaaatataaactgtggacggatctttccgataacgcttcacaacggtgctgtccgttttgcagagaagaaaaacctatcagtaaagaacggctgttttccgacgaatttgaaatcgagcatttgttgccgtttgcgcggtcttattcggatgcccgcacgaacaaagtcatttcctgccgcgcctgcaaccgtgaaaagggcaaccgttccccgtgggaggctttccacgccgacgaaaagcgctggaacgccattctcgggcgcgtcgaacggttttccttaaaacacgacgaaaacaaaagccgcgccaaaaagttccgggaggacgcttttcaggaggttgacaaagttttggatcgtatgttgaaagacacgcaatatatggcgagagtcgcgcggcaatatttgtgctttgccgcccatccgtcgaaagtttacggcatccccggacaactgacggcgaaattgcgccatcattggggattggaagctctgtttccagaagaccaaaaggatcggacggatcaccgccaccacgctttggacgctttcatcgtggcgtgcacggggcgggggacgttgcagaagtacgcaaccgaacgcaacgactacgcgcgcgaaatgccgcaagagaaagctccgcatctgccgtatcccgatttcaggttaagggagcttcaggacgctttcgaccgcatggtgatttcccacaaacccgaccatggcaacccgcaaaaagcgattaaagaaggcaaaaccgttgccaaattgcacgaggaaacgaattacggctttgccggcgaaggggagaaaaaagggacttggaaactgatccagcgtctgcccgtttccgaatttaaaacggaggcggatctggacgtcatcatcgaccaggccggaacggcggacaagattcgcgctttgttggacgggaaagacaaatccgaacacgaagcgatcattcagaaatatttttcggacagaaacacccggaaagtcaggacgtatcgggaacgaaacaaaaaggttgtttttccgtttaaaaataaaaacggaaaagtatacagatatgctgtttttggaagcaacgcgtatgcggaagtttattgtcccgacagggggaagaatgccggaaaatggcaacttgaagttgttccgaactattgcgcccatcagaaaggctttgtgccgaactggcggcatacggacgcgcacgccaaactgattatgcgtctgcatatcgacgatatggtcgcctatgaagaaaacgggaaaaccgttatcgccagagttcaaaaaatggatgctcaaaatggggttttctttcaagaaaataaagtggcaaaagatgaaaaaaaatccggagtaggggcggcaaaaatgcagatgcttaatatgcgcaaaatcacggtaacgatagacggacgggtgatcgatccgaagcgtccgaaagggcagaccggtggatagaatcattgaaatcgcgcaggatggtcggcatctggcggtcgaacgcggctttatgacggtttgcgaaaacggaaaggagctcggccgcgtcccgttcgaccaaatcggggcggtcatcgccaacgcgcacgggttgacgtattcgaacaatctgcttgtccgattggcggaacaaaacgcgccgctggtgatttgcgggtcgaaccacgttcccgccgccgtcgttctgccgatggaaggtcatcatttgcagggcgatatcatcacggcgcaggccgcgatgacgcccgcggcgctgaaccggtgctggaaggaaatcgtacaacagaaaatcagccgtcaggcggacgtcgtcgccgcctgcgggtttatggacggtccgttgcgctttatggcgaaacaggtcaaaagcggcgatcccgacaatcaggaagggcaggccgcccgtttctatttcacgacgcttttcggacggagctttcgccgcgacagaagccaaagcgggataaacgctttgctgaattacggatacacgatcctccgttcggcggtcgttcgggcgatcgtcggggcggggcttcatccgtcgctgggcatccatcaccaaaaccagtacaacgcgatgcgtctggcggacgatttgatggaaccgttccgaccgttcgtcgattactgcgtccggaaaatggatttcgaaggcgtgcgcgacgttgatccggacgccaaaaggcggctggtcgcgttgctgtcttgtccgatgcccgccgaaaaaggcgccgtcgaaatcgggtatcaaatcgtaacggcggcggtttcttacgcgaaatgcgtgacgggcgaatcggacagactcgtttttccttttcccgtcggtgaagcggatttgcagaggttgtgaatgtcgataacggggtatcagctgatgtggatgatggtgatgttcgatttgccggtcggcgaacccgatgaaaggaaaagggcgacggcgtttcggaattatttgttggacgaaggttttgaaatgagccagttttccgtatatctccgcttttgcggcacgcgggaggcggcgatgcccttcgtcaaaagaatcaaaagccgcattccgccggacggggacgtgagcatcctgttttttacggaaaaacaattcgctgatatcatttcgttcaagaatcgaaaaccggttttgatggatgaaaaaccggatcagctgacgcttttttagccggtgaaaatgcgggaaaagcctttgtttccaaaggctttttaaaaacacattatagcagatgattattttgtgtcaaaccgcaacgcaaatgtaaggcgtccgatcaatagcgttattatagcagatgattattttgtgtcaaaccgcaacaataactataactaacgttccgttacgttaattatagcagatgattattttgtgtcaaaccgcaaccaagatcgcatatccgatttccgttatgatattatagcagatgattattttgtgtcaaaccgcaaccggcgggacgtgtcatcggattcgttcggaaacggcgatttgctctcgttttaacgggagtaaatcgccgtttttactttttttattcgacggcgacgaccttgaaatcgtggtcttcgaccgctttgacgagcgctttgctttccgtgtccgccgacaggacgaccagcgccgtgcccgttttgtgatcaaccgtcgcttcttcaacgccgtccaactgttccagcgcctttttgaccgtcgcttcgcaatgcgggcacatcattccttcgattttcattcttttctgcatctttttttcctcccttaaaggcttgtttgaaaacttcgcttttttgtcccttgacgcgtcgcgcgggtcgattccgttcaaccgcaacgcgttcaggcagacgcacaggctcgacaggctcatcgccgcggcgccgtacgacggctctagcgtcagaccgaaaacgcccgccgccgccggaatgcacaaggcgttgtagaaaaacgcccagaacaggttttcgtgaatgttcccgatgactttccggctcaagcggacggcagccggaacgtccgtcagcgagctttttgttaaaacgacgtccgccgcgtcgatcgcgatgtccgacccagcgccgatcgcgaaaccggcgtccgccgccgtcagcgccggcgcgtcgttgatgccgtcgccgaccatcgcgacccggtagtgatccctggccggcttcccggtcagccgttcgaagagcgtccgctcaatactgccgtttcctttctcccggagagcccggatcaccgcctccttgccgtccggcaggacgcccgcgatgacctcggagaccccggcctcgcggccgatcgcctcggcggtccttgcgttgtcgccggtcagcatgacgacgtggatgcccatgtttttgagctccgcgattgccttcgcgctgtccgccttgatcgtgtccgccaccgcgatgacgccgagcagccgcccgtcctccgcgaaaagcagcggcgtttttccgtttccggccagctcttccgccttcttccgcatctccgccggcagatgaaccttctttccgatgaaggcaaggcttccgccggtgagcgtccttccgtccagcaccgccgtaagcccgttgcccggcaatgcggaaaatgaagacacctcgcccgccgcttctccccgcgcctccgcctcggcgaggaccgccttcgcgagcgggtgctcgctcttcttctcgagcgaggcggctttcctgagcagttcattttccgaaacgccttccgccgggatcatatccgtcactttcggagcgccctccgtgatcgtgccggtcttgtccagcgc

SEQ ID NO: 819 - DNA, 23303 bp, synthetic construct
  source 1..23303: mol_type = other DNA
  misc_feature 1..23303: note = Synthetic
tatcgaaatccatcacacgagtatatttgagagaagaaggtacaggtaattcaatccaattctcaaaattttcatatttccatatttttgagccttcgtcatcaaccgcaataatccaaagcgaattttgaaactctttgatggatgtaatttgtccgtctatcttaaaactttcccatttttcattatctcgaattcgacatagaccttttgatgttccaatccatttatctccaaaacgatcagcatgaatggcaaaaactcgattgcttagaatcttagaattttgagtagaataatacgatttcccatttaataaatcaaccgttagaataccttttcctgccgttccagcccaaatttttccatccttatcttcggtcaaagaagtaactaaaaaattccctaagttactaaaatcaaaatagttaaattttcctgttgaatccattctcaaaatagcactgcggtaagtccctaaccaaatagtttgagtagttggaaaattttttgccaactgaatacagctaatagaactttcagtataggaatcagattgaatgccagggtcaaataattgaaaggtctctttttctaatttgataagtccttgagccgtaccaatccatttattattttgtgcatcaatagcaatggcattaacggcttgatttcggatctgaggatgctgattcaataattgatcctgagccagaatatctaattctgaaaaacaaaaatattggaaaagtactatttttagaattaagaaaaaacgcatttttcgtagaattttagtttattatttatctccattgcacccatcaaaattgaaaactttcctgagtattcgcaaataaaatactatttttgtgcgaaatttttctatcaaaatttagagtatcgtcattcaatgggtaagttaacaaaacgagattttgaaaatcattggcaaaaaatcggctatgaaattccccgtaatggttttatccaaaaactacataaaggttattataaagttattcgaaaaaaaattactgacgtagatcaaattgtgggtgcctttttcgcttcgaccaaagaccgcaatggtttttcaatgggaattttcatggcatgtactgattgttttgcgtacgcagccgtatatcctgaccgtgatgttgtcgttttagagttatttccctatactaaaatcgaaagttttgccacagcactatcagcagaaaaagagcctactacactggtcataaaaatatatgataaagaagtccaaattgtaggacatgagttccgaattcctgatgcctttctaatcaatttaaagcaatctggagtattacaacttgcataatttgatagtcaatatttataaaaaaagtcatgatataatttctatatgatgactttttttgtcgaataaataattttatatatcagtaataaattaaaaatcaacctaatcgagctaatagtttctgagtcttatcttcaaaccctggttttcctagtaaagcaaacatatttgatttataggcttctactcctggttggtcaaatggatttacatttaaaatatacccgcttacggcacaagctttctcaaaaaagtaaatcagttgtccaagtgtatacggtgtaatttcaggaatttcaatacgaatatttggaacgcctccttctacatgagctaacattgttcctttttctgccatatgattaacttcaccgatggtttttcttgccagataattcaatttatccagattcgctttttctttttcgatagtcatatcttgagtaggttttcctacagaaatgactgtttcaaaaatactccgctcgccatcttgaataagttgccccatagaatgcaaatcagttgtaaagttcactccagcaggaaagatacctttgtgttctttaccttcactttcaccataaagttgtttccaccattcaataaaatactgtaaacgagggtgatatcctgctaaaatctcaatttttttacctttccgatatagcgcatttcgcacggctgcatattgtgaaatcggatttttagctaagtctatttctgtatccgtaaactcttgcatcgcttttgcaccttccaccaactgacgaatatcgaatcctgctgcagcaatcggtaataaacccacaggggtcaatactgaaaaacgcccaccaatatcatctgcaatgtcaaacgtttgatatccttcttgatcagcaagttttcgaagtgcgcctttcctagcatctgtaatcgctacaattcggtctttcgcgccatcttttccatatcgttcttcaaggtcttttttcaacatccgaaaagcaagcgcaggttcagtagttgttcctgacttagagataacagctacggcataggatttatttttaagaataccttgtaaatcagtcagataatctgcacaaatattctgtcctgcataaataaccaaaggagcttgacgctcagttttggaaagcattgccgaaaaatgatgagataaagcatcaataacagctcttgcacccagatatgaaccaccaataccaacgacaactaaaatatcagccgtattttgaatatgagtcgctacagtttctaatttttggagttcttcttctgaaatatctgagggtaaagtttgccagcctaaaaattcatagccttttcctgttttgtcatgtaagcattgattatgtgccaaaatttcgccttcgaagtccacaatatccgcttccgttagaaatccagaccgtttggctagggtttgtgtaaaattgacttgtaatgaaatcatttatcatcttggtttaggtaaaaaaacttaaaatcctaaaaaagattttgatgaaacgttatttgagatttgtcttgagaataaaatccctagttacagaatttcgttcagaatctcaacaattgaacgacctaaattcgaagtattcaattaaaataatttattttttcaacacgaaaatcaattacatgacttcaaaacgagtcgtttgtttttctatcttttccatgtaaatttttacatctcctgcctttttttgcggaaaattgacatttgattcttattaaaatccgaattttccttcgaactttgcattcatataagatggatagtgaaagttatgaatcttaaaattgcttctaaatttcaaaacaataaaaattcaattatttatggtacaaaaaaaatatcattggttttttatattgatattatctacttcatttttagcaagttgtgataatcaagaagaacaaatggctaaaaaaggagctgaccaattgttaaataatgattttcatggtgcattacgaacattcgatgacctactccgaaaatatcctaatcatgttgagggttattctaatcgaggagcagtcaaagtaaatcttggagatctgaaaggtgcattcaatgactttactcgtgctatcaagattaatcctaagcacgcccctgcttatggaaatcgtgctttaatttattttcatactaaacaatacgaaaaatctattactgattataacaagcaaattgagcttgatcccaataatttgagcgcatatttaaatcgtggacaagtcctaattgagattaaaaaacccgcagaagcactcaaagacttcaaatatctagttgataatcagaaagataataaggaagcttttctttggtatggaattgctctaaagaatactcagcaatatacaactgccatagatgcctataatcaagctttacgactagatgctcaattttcagatgcttacttgatgcgtggaaatgcattagatgctcaagagcgaaacgaagaagcctgcaaggactggcagaaggctgctgaattgggaaataagtcagccagagccaatttaagtcgttgtcaataagaaaaataggtaactttcttcgaaaaaaatcgtagaaacgactggagtcatgaccaaaaatccatacttttgcaaatctaaattttggaattaatttttaaatcctaattataattgataatatgctcactatcaaagtcaaagacaatgagtccattgataaagcgttaaaacgcttcaaaaaacaatttggtaaaacaggaacgatgcaagagttacgttcacgtactttctataaaaaacgttcagtacaaaagcgtgaagagcgtattcgagcggcttatcgtgaaaaaatgcacgctaaatataattattaaggcttatcgtctcttaattttggtatttgcccaaaatttttttgattacctttggtaaagttcacaatctttgtcaaaggtatttttttgtccgaatttatgaccttatatcatttagatacttaaaaatcaattttttatatagatgaattcagtagctcattttctattttttgtttttatcattactcttctcataacaggatgcgaagattcacctaaaaatgtagaaaccaaagctgtaacccttcaattccaagaagtttacttgactgaaaacaacaaacgacttcaggctgatagctttccaaaagtgcgttatggcacaaaattaaaaatgtatattactgattttaaaggatataacttaaagaaagggaaggcatttttgggatgtgcggtagaaataaccgacgaatcaggaaaacaaatccaaaaacaagaagacattttgaagacatacgaaacacttggtattacgcctgaagatgccaaaaatttaatgacttcaatggtagttagtacgcctttagaagtagggaaaaaatacttttggacagcacgactttgggataaaattggagctggggaaattatggcaaaaacacaaattgaagttattagtgccaaccctgtacagattacccaaaatggtttaacaattcaagaagcctttttgatttcgtatgattcgacaagccaagaagcaagccgacttcacaataatcaagtgaaagctggacatcaattaaaattacatttagctggtgttcagggctttaagcaagataaaaatggagtaattcaagcaggttgtactcttgaaatacgggatcggaatgggcaattaattttaatgtataaagatatgtttgaaccatacaccaaaggagtgcaatcgaaagaagtagagcaaatgaccttaaatttagttacttctaaaccacctcaagctggtgaacgttatgacttaattgcacgaatttgggataaacaaactgaaaaatctgccgaactcacactaaattttgagattctggaataaaacccaatttattacattacaagcctatcaaactattggtttttgagtctttaatattatcgtactgcggggtgtcttggacatttaatgccttgataaacataacttaacgaaactccaagataatagaaaaagtcttcattttgagcgtttactcgcagaaatttactgggatttcctattaattcaaaaccgtcagatttatctccaaaggttttgatagttcgaaattctgcattaaaattccatgttttagtgagtttctttttaaagccaattccaaatggcattacgatttgattaacttgctctcgtttaacttcctgattattttgtcgtttaatttgaaaacgttctccaccaattcccaaaaagataaaaggactccacttacggcgggcttcgcgtcgaaagttaaaaaaattatactcaattgtccctgataaatcatacagatttcccgaaaaatcaaagtttcgtatgttttgaaaggcatcactagtattagtatctttcgctccaaactttgcataatttagtccagccttcaagctcagaaaaaagtgaatattatatttaaagaacagctcaccacttggctggatattccgaaaattataattcggtgcaagatcacctttataattaaatgctccaccgccaaaaccaaactcaagagcttgagcaaagttggcattagtataacaacaaaaaacaaaaaacaaaagacaaaaatggcgtttgttaaattgcatgaagaaaaaaaggatttaagttaggataagtagttaaaaatctataaggtcttgaacaccttatagattcgatttttagaggctatcgtgacgctcctctatgccaatgccaaggattgcgatgacggcgtttgaaaggctctggacaacgtacttgccctggcaaaatataagataaatgaattcctgttaccatataagaatcgcggtcacgattatttcctcgaatattttcgtatgcctgactatatttaccaagataagtaatatattcattaccatcaatcggactcaagtaatatttgggagtaactatatgatcacttaaaacgacaggaacacgtccgttctcccttgttcggtcactcaaggcacgagccaaatccgccttatcggggtcatcaggatagagttcagtaaagataccggggtctgggaaatccccactcacatcatccaaataatctgtaatcaagaatctcatattgacttcaaaactcaaatcccaacgttgtccaatacgttttttaaagccaaatccgaatggaatagctatctgaattggtgaataaggcttgccatattcgatagtttttcctgtttctggatttgtccaagatccgccttgtccttcagtagtatattttcggagttttacccaatcatctccaaactcttcaggcatcaacgctttgggttcatgatagagaatagctataccaaacgttaagtagggtaaaactttatctggacggttataatacaagtctcgatgagctgcaagattcacaattcctgagtaagacaactcaaaaatatcattccgaaaatgtaaattccgaacataacgaaactgattatcaatgtgcatcgcattagcggtactatccgagcctttgagccgaccataagaaaacatcagtcgactggtgtacattgggcggtgtcgtttgatatataaaacactaaaattggctcgggtaaactcaatatcagtagcataaaaatcttgtagaggagttaggtcgccaaagtagttcatcgcattgataccaaagccaatacttcgatacccttgccgaaatttattccacgtccagctttgacgatgaggcggtttccatttacgttgctttttccacaatttgacccgtccctttttcttattttcttcgtaatcggttgatttatgaggagttagtttttgttgttctcgttcttcttgtgctgatacataaggaataactcccaatacgaccagccaaagtaaaagtagttttctcatgaggactttttaactttttgttttttaacgcctaaagaggcagattgatataatcttagatccgataaaaccaaatttggattaaaaaacattgaaaaatttgatttttcttgagttgccatttgagtttttcaacgtgattcttaggaaaagtgttcctctactacactccatcctcctaaaattaattaaaatataaaatcgataataaaaccttacccagtcttggaaactaggtaagtctttggtctaaatttattttttcatatatttcagacgaattacctctttttcagttagataacgccactttccacgtaaaactgtttttttggtcagaccagcaaagccagtacggtcaagttttaaaacttcatagcctaaatgctcaaaaatacggcggacaattcggtttttgccactatgtaatttcagacctacaattcgtccatcgccaaaaaagaaaaaatcatcaggctgaatcaagccatcttccaactctaaacctgcctgtattttctctgcatcttcctcagtaataggcttatccaattcggcttgatattccttagtcacctgagatgacggatgcgccaatttcttggctaagtcgccatcattcgtcagtaaaagtactcctgtggtatttcggtcaagccgtccgacaggaaaaactcgctcatcgcatgcttgccgaaccaaattcatgactgtctttcgaccttgcggatcattcgtggtcgtgatatggtctttgggcttattgagcagaacataaacaaacttttcacggcgcaaaattttattctgatatttgacttcgtccttgagttgcacccgataacttggcttctgacaaaccttatcattcacctgaattttgcccgtaaaaatcaattcatcagcctctctccgagaacatattcccgaattcgcaacaaatcgatttagtcgaatccctttttctgccgtatctttagggatggctcgtttttcaagtttttttaggcgttgactattgtagtttggtgttctaattttctgatgatcaggatttttcgaatcagaagaattggactgagcagtcttctttttggtgggttttccttggagttttttgcgccgtgttttacggtcgggtttctctttaataaacttaccaaatggattttttttacctgtttttttaggagatttcatatgattatcagcgtcagtataaacgcaaagtcttcagttaaatgtgttcgattagattttttattcttctgttttcacctgaattttgaggtcaatttcaggagcttcctcatcttttccaaagcgcaagaccgcttttgcccccgctaagaaagaagtctgctctaaagttggttggatagttttgaagagtatttcggcattttcgccataaataaaaagaataccgtccgccccatcaaccgcaatttcatgtccgtcataaatgcccacttcttgagtattcactattttttctagttcatcttccagtcgaaataacggagtcaaatcccccatcccataatcaaaatgaatcaaaacggtttgaggataatcttctggcgtttttttaggaggctttttttctttccttgaaaatagttttcgaaacagactcataaccttaatcaaaaaataacgttttgcttgaaaaaaatagagcttcctcattaactaattaaacccttttttgttccctgaaataataagctggcttaaaatttaggtgagcatctaatagggcttcacaaaaatagcaaacagaatggttaggatcaatttgtagatgggaatggaaacttgacaagttttgaaaactggtaaatttctatctcaaaaaccatttcttcaaagctgaattttatctttataatgaagggttttttagccattttggggcgtaatctcaaaaaaaaatgaaacattcgaaggttgaaagccccccaatgtttcgtttttttttcgtaaaaccctctataactctatgattttaaaggaattacagagggttaggtacaaaataacgaaaatttaaagcctttttcaatctcctgagtctgctgttcaaggttcaaattggtacaaaataacgaaaatttaaagcctttttcaatcctcgaagccgttttttatcgctattccatggtacaaaataacgaaaatttaaagcctttttcaatgggatttgtaaaaatgagttggtggtcgaaggtacaaaataacgaaaatttaaagcctttttcaattaaacaagatggtaaataaagtaattttatggtacaaaataacgaaaatttaaagcctttttcaattgatcgaatagaggaattgctattggaagcggtacaaaataacgaaaatttaaagcctttttcaataaccgctaaaaacatgatactaacaagacggtacaaaataacgaaaatttaaagcctttttcaattcaagcccgcatggaacgaagcaaggaaaaggtacaaaataacgaaaatttaaagctttttgttaatttgcttgtttttcaaaattttgaatgttatctttcagaataaaaaaagcagaactcttattaaaagagaactgctttgaaggttgaatcacctacgacatttgaaaatgtcttattgaaaaggcgactttaaattttcgttggctcaatattacgcaatctattttataaaacctaatttatcttatttttttaccgttaaatttctttctcgtatgttagaacacctctttcagcgttacgaaaaaatcaaaaatgcccgttatgtccttggtttggatttgggagtggcttccatcggctgggcaatcgtagatacttcccaacaacgaattgtcaagttgggcgtggtcaaatttcgggaaggttctgccagtgataaccaagaccgccgccaaaaacgaggcgcacgaagaaaccgaacccgattcctaaatcgccgtgaaaaacttcggaacttatgccaaaaataccttacgaatggcgagccagttttgactactggttctaaaaatatttgggaacttcgtgttaaaggactttttgaaaaacttgataatcaggaatttgcacatattttattacatttcaaccgacatcgaggcttcaaatcgaaccgaaaaacagacaaaggagcagatacttcggcaatgaaaaaaacaattgcagagacacgccaaaaactcgaagaaaaaaaacaaaccctctctcaatattacctcgacctcattaaagacggacaaaaaatccgagccaattttaccgaaaatgacctttgtcctgaccgtgcgatgtaccaagaagaactcgataaaatttgggagaaacaaaaagaatttgagccatacaatcaaattttgaccgatgaattatatcagaaaataattgaagaaactattttttatcagcgtgatttccaccagaaaaaagataaacgaaacgtaggtaaatgtcctttttttccgcaaaatctccgtgcgccgatttattcgatggagtatcaggaatttcgagttcgtcagattatcaataatttaagactgactgatgaccgaaatggagttgttgatgaatttttaccagaaaaagttaaaaattacatttatgaccgtatgacctttcaaacgaaaagcaaaattaaggcatcggaaattatttcattaatccgaaaaaataaagattgttatcgaggttccttattaaattacgataaaaaagaggctttttatggcaatcgtattggttatgagctgacgcaaatttttggagaaactcaggctaaaaagttaatagttgaatacgaccaaaaaggtgaaaattctgctctccacaaattgatacataccttgcgctcttgcccattttcggaaaacgacaaagccgaagaatggctcagaaattatgcgctaaatctcaaaaatgaagaaggaaaaagctggataacccccgaagaagccgaaaaatttgccttgctcaatcctgatagtggatatggaaatttgagtacgaaagccctccgcctcattttgccttatttacgacaaggcttcatttattccgaagcctgcgaaaaagcaggactcaatcataccgatcccaatgacgaaaaagaccgtaaactaatcgaaaaattagaacccattccagcccaagaaagattgaatgctacagttaagaaggctctaaatcagatgattagtttggtaaacacaattaaaaaagataaagaactccctgagattgatgcggtggttttggagactgttcgagaactcaaaatgcccgaagaaaagcgaaacggtttaaaaaggcgaaatgatgccaaagctcgtcgccgtgaagaatatgcccaaattttaaggcaggaaggagttagagagagtggacgaaatattcgtaaatatgaactttggcttgagctgggattacaagatagcgaagccttgaatgcgatagatatcaagaatttctcagattttacccgaaaagtatccgctaaagcccatgaaaaatatcaactttggaaggaagccaatcggcgatgtccttacactggcgaaattattcggctttcagatttattcaatacacaactggttgatattgagcatatttatccccgttcgaaaaccttagacgattcttttatgaataaaacaattgctcttcggacggcaaatgcccagaaagaaaaccgcctacctctggaatatctcaaagccacaggaggaaatattgaggcatttcggacacgagttcagcattttcagaaaggcaaacgagaacgatttttggcaaccgaaattcctgaaggttttattgcccgaaactataccgataccgcccaaattacgaaagtagccctagataaacttcaagaaattttccccgatgtgattgcaactaatggctcggtcactgccgttttgcgaaatgcgtggaaactccaaaaatctcgtgataccttagtgcatcatgcgatggatgccgtagttatttcgtggacaagccgaaatattattcaggctttaagcaccatttcgggacaaggtggaaatatttataatcctcagaatgaacgaaaacaaggctggcgaaaacttcctttttctggtttcacggaatatgtagaacgagaattagataaaattacggtctatcattacaatcgtaaacgactggttcaagacaaattagacctaaaagataaaaaccctaaaaagaagcctgtggttcgtggcgcactccacaaagaaacactttacggaaaagcaacggtcatacacaccgataaaaaagggaaaacaaaagaagtagaagtttcgaccaaacgaattaaagttaaggatgataaaggcaaaccccttccaaagagtactttagcgaaaattcttagttctgatgtacgagaaagtgtccatcaatggctcgaaagtcctgatagtgaatatcccaaacaccctaaaacagggcatcccatccgaaaagtacgaattgatgcaaggctaaatcccgataaacttctggaaatttgttctcacaatctcgaaaaaggacaaaatgcccattttgttgctaatgaccaaatttacattgcggggatttatcaaaatgcgaaagggaaacgtaaattggcttatttttccctatacgaaagccttcaaaatcataaaaataagtatcctttattgcctgaaacccaccccgaaaaccctagttttcatttatggttgcccgtcaaggcaggcgatatgtttcgatttgaggaacaagaaattaatggaatttatcgggtgctttcatttagtgaaaatagcattgtttttgctcatcatactaaacccatcgctgagaaagattttaagcggtcggttgataaatttgaatacgttacacccgtgaaagttgatattttgggaaatgttactcctaaaataacgtaagtttcagtcctaaacttgctaattattaataaattagtaggtttagattttctctaaattcaattttacctatgaaaagaaccttatattttcaatcacaagttattctaaaatgtcgtcagcgacaacttcttattcaatcgactgaccaaactcatacccttcctatcgaagatattggaacagtcattttagattctcctcaagcccaattcacaggagcagttttacctgccttacttgccgaaaatgtggcggtcattacttgtaatgaaaagcacttgcctacaggtttattactaaatctggatggacattcctatcaatcaggcatttttcagtcacaactccaagccaaaatccctcagaaaaaacagctttggcaacaaaccatcaaagccaaaattcgaaaccaacgaaatctacttcaaaaatttgggttagatgcccaacgcctgactgaattatttcgtcaagtccgttcgggcgatacaggaaataccgaagctctggcggcagcctattattggaaaatgcttggcattcaccgtgaacgaatgggacaatttcccaataatcgacttaattacatttatgcggttttgcgagctaccgtagcccgaagtttagtaggctcaggactattgcctgtattggggatttatcatcatcaccaacggaacgcttattgtttggcagatgatattatggaaccttatcgtccgtatgctgatgatatcgtttttcagaccctccaagaagaacctgatatctcggaagaactgactcctacgataaaacaaaaacttttgaaaatcaatcaaatagattgtcatttacacggtgagcgtttccctttggaagtggctgtacgccgtacaacatcctccttagcgaactgcttccaagaaggaaaaggagaaattttatatcctatttttcctgttcgctagagtaatagttcgtaagttttctccaactctccaagattttaaaactcttggagagtttaaatattgatttacagcaaattaatatttatttccatagcgtagggtttgctacgctatggaaatgcttgactatcaataaattgtaattttaaaaaatcatgttaacaaaaaacttacgaactattgtagaggttattacgaattattccaaaaagttgctgttttagcgaagcgacaccaacaaaaacaagaattcaaattcaatcatgttacatgttacgatttaatcaatggagaattatgtggctatttgtactatttgatttgcctacggatactcgtcaagaccgtaaagctgcccagttatttcgagaaaatctaaaaaaacaagggtttgatatgttcaattattcggtttatatccgtcatgccatgagttacgaagtggctcaaaaataccaaaggcgagttcggaagattttgcctaaatatggtaaaattacgatgttgatgctgacagataagcaatttggggacatcgaaatttatgaaaatatggctccccaaaaacctccagaaggaggcgatcaattgatgattttttaggtgttttttagccattttagggcgtaatctcaaaaaaaaaatgaaacattggggggctttcaaccttcgaatgtttcatttttttttcgtaaaaccctctataacactatgattttaaaggaattacagagggttaggtacaaaataacgaaaatttaaagcctttttcaataaaacagttcttctatcgtaggtattacagggtacaaaataacgaaaatttaaagcctttttcaatatcggagagtggactgtctttgccataggaggtacaaaataacgaaaatttaaagcctttttcaatcattagcagagaaagtattggagcagttgcggtacaaaataacgaaaatttaaagcctttttcaatacatagaacgttctaagcatttcagaaaccggtacaaaataacgaaaatttaaagcctttttcaatgattagtgaggcacttttggagcggtacatggtacaaaataacgaaaatttaaagcctttttcaatcttcggagcagttgttacaaccagtgcatcggtacaaaataacgaaaatttaaagcctttttcaattgcctgatgctctttttttaatttcctcttggtacaaaataacgaaaatttaaagcctttttcaattttcactacaataaaatctaatgctcaaacttcaaattcaattcctgcgccacttcttgtaaatcatcaatcacaggagttaatagcggaattccattcattaggcgtttttcggtcatttctcgttcggggtctccggggataagtactttatcttgtccttgtgcaggttttgcacttcggaaacgctgaatccaattatccatatgtttcttaaattcctctcgaggacggaaagcatcaatacgcattgcacctaagaagtgtcctagcccctctcctacagggtcttcgggtaaaggcaaaaaactcacaaaaggtggtgcccaaggtccatagccagcccccgataaaactgccgaaaagatatccactatcgaacccaaacaatatcctttgtggcttccgtgtatgcggtctccaccaagtggcaataatgcgcctccttttttgacggcagccgagtcagtggtcgcttctccttctttggattgtacccaaccttgtggcgcatcttcgtctttacgttgtaaaatctctaatttaccattagcaacggtagtcgtggcaaaatcagcaacaaaaggcggttgctcagaggtaggaatcgcaatggcaatcggattagtccctaacagccgttcggcggaaaatgtcggcgaaaccaaagggctggcattggtcattgacatcccaatcatatccttttggagggctttcatagcatgatatcctgcaatgccataatgatttgagtttttgacagctacccaacccgttcctgcctgttcagcttttttcatggcaattgccatcgctttcggggcaacaaccaaacctaatcccttgtctccatcaattgtagcggtacttggggtttcgtgaataatccgaattaaagggcgaggattaatacgtccagctttccagagtcggacataacccgataaacgggcaaccccgtgagaatcaatacctcgtaagtcagcactaagtaaagtatcggtggcttgttcggcatcagcatcggaacagcccattttttggaaaacttggaaggtgaatgttctgagtgagtcatgagtgatgacggtggttggagaagttacaacagatgatggagcggtcataagcggtatggtatttaaatctaatgttaaaaaaaatagttataatagaattatttatctattagattgaatttttaaggcaaaggtcacttacaaaggtaagaaacaaaaatgagtttgtcaggcgaattagcttagagttttagatacactatctgctaaaacggaaatcccttttcgaaagttttaattaacctacatataattagttaaatatatttaaattattaaaaaagaaagttggctatgaaaacacagccaacataggttatatttagtcaatttctataaaatcttttccaaaacatgagaactacgtaaggctctaatcttctttcagaagttgccctaattgatgaattaaacgagtagaaagttcgctatcttcggtattgcctgcaaagaaatgttgcatttcttctatatattttataaatcctgttctatttttagttttaatataatgataaagcatatctgcttcttctcggaaaatttgtaaaacctctaaaacatattcattataaatttgaatatcagcataaagacgtggattttggaggacataacgtgtaaaataaattaggaaaatacgataagttggtgaggaaaatttcttaactgtctctagttctccgtcaaatttagagagggttttcgcactaacaaaaacattaaaatgatttagtccttggacaatgcccataattttatcgtggcgtttataaccaacatgatacacgaatgcaccttctttagtcagtatttcttggaaaaaatccaaaaactcaccaccaattcggttggagtaatttaataaaacaacttgtccttgtaactttgtaatttgctgggaatacattgggtgtactgaatgaaattcaacctcaatatcaggtaattgatgttgtaattctaagaatttttctactacaaattttttgacactacatacctcaaaaagtactttgccatgtaaataaggataaatttcttcgagaacttcagtcattgcaaaaatcggaacacttaaaaacacaatatccgaattttggactaattcggcattggtctcaaattcacctgtttctttagcagtgaacttaacttcaaaatcagcttctcgaaagaattgtaccaaccaacttcccattcctgcactaccaccgattacacctattttttttgtcggattcatcattattgtatctctacgaatttaaaaattgcttaatgtggagtttatgagtttacatctaagaggtgctaaaaatatatataaaactaagaaaacttacattttatagattagtgaataattttcatctaatttctaggaatttcgataaattcttgaattcctttagaagcataagtttgtaactttccttcttcttcataaatcagaaaaacatctaattcaggcattttttctgcaatagttttcgccatttctgttcccgccaccataaaagccgtggcataagcatcggctgtcatgcaatcaggagcaaaaaccgaagcacttaataagctatgttcgacaggatagcccgttttaggactgatggtatgggcatatttttttccatctcgaatataaaaattacgataattacccgaagtagcaatagcccgatcctggagttgaacaattcctgtaattttttggtcttcattagcttttggattgtcaatgccaattttccaagtcaagtttttgttattcaagcctttacaacgagtttcaccaccaatctcgactaagtaattttcaatattttgagtttctaagagttgagcaactacatcaactccgtatcctttggctaaagcactaaaatccaactgaatatttttttcaagtttttggatatttttattatcaaactgaatcttagaaaatccaatcagttttagtaaagaatcgacctcattttgaggcatttcggctcgtttttcgggtccaaatccccacgcattaaccaatggcataaccgtaggatcaaaagctccattcgttacctgataaatttctgcacttttttctaaaacaggataaaaataaggtaacttaaattgaaaagaatcttgctgattaaactgtgaaatttcagagtcagaaatataggtagaaagactttgattaaatattttcaagatagagtcagtagaacttttcaaatttaagtctttgtccgccaaatatttgacagtgtaagttgtccccattgttttcccttgaaaactgaaaagaggtgtttgattttcagatttgagaggtggcgttatttgagagcgatataaccaaactgctcccatcagagccaacagaaataagctatataaagcgttttttttggtattggacatgagtttttagcaaaaaaaataggcttgctaaattccagaaacttagcaagcctaagaaattattcgataaattaaatcaaattattttctttcaaatattctgcaatttgtacggcattagtagcagctccttttcgaagattatccgctacaacccaagcatttaaggttttaggttgtgtttcgtctctacgcaatcgtcctacaaatgtgtcgtcttttttatgagaccagataggcattggatatacattttccgcagggttgtcttgtaaaacaacattaggcgcagaagctaagatttcccgaacttctggtaattcaaactcattttcgaattcaatattgagtgattcagcatgtccacctacgacaggtacacgaacagtagttgccgttactttaatactgtcatcacccatgattttattcgtttcccgaatcattttcatttcctccttagtgtatccattttcttggaaaacatcaatatgaggtaaaatattcaaatcaattgggtgtggataggcggggttttcaggtgtttttccattgcgttcatccattaactgatcaacagcttgcttacctgaacctgtaacggattgataggtagaagctattactcgtttaataccatatttgaggtgtaaaggattcaaaaccactaccatctgaatcgtggaacaatttggattggcaataattttgtcttctgccgttaaggtatgtgcattaatttcaggaacaaccaattttttggtcggatccattcgccatgcagacgagttatcaataaccgtagttcctacttcagcaaacttgggcgcatattcgagggaagtacctccacctgctgaaaaaatagccacgtcgggacgtaatttgatggcttcctcaggggttacgatggtgtacttcttgttcttaaattccaatgtcttacctgcagatcttgccgaagcgactggaattaactcatcgaacgcaaaatctcgctcttgaagcacatttagaatttcggtgccgacaagcccagtcgcacctactaccgctaatttcatcgtaatttggatttaaattaaaaaatttaccaaagatacgggtaaatttctatatatgcttctaaactgactattttaaatatagaattctcggatattgatgtctttcctaaacgaggcaaagttttgattatcaagtatttttgttgatttttcaggctaatattatcaataaaaacacccacaataaactgataatcaatattttatttataacctaaacaatttctaagatttttagtgaaatttcaaaatccattgactctatccaaattcaaattgatttccgtgtggttttgcctaactttggagtttcaaaaacaaaatctggacggaacgcatgaacccgaaaaaaaatttcatcattgattttgatagtaccttcaccaaagtcgaaggactggacgaactggcgaaaatttcccttgccgaccaaaataatgtcgatcaaatcacggcacaaattaaagccattactgaccaaggcatgacgggcgaaatttccttccgtcaatcgctcgaaaaacggcttgatctcctcaaggcaaatcgtaatcacatcaataagctgattgattttctgaaagataaagtttccgtttctgtcatacgaaacaaaattttcttagaaacatatgcagatgatatcttcattgtgtcgagcggttttcgggaatttattgaacctattgtcgttgagtatggtatcaaacccgaaaatgtttatgccaacgaattcatctttgacgaagagggaaatgtcataggatttgatgcctcaaacccactttccaaaaataacgggaaagtaaaattaatgagtgagttaaatctgaaaggagatatttatgttattggagatgggtatacagattatgaaattaaaaaggctggttttgctaataagttttatgcctttaccgaaaacgtaagccgagatagtgttatcgaaaaagctgaccatattactccaagccttgacgagtttttgtatgttcataaattgccaatggcgatttcttatcccaaaagtcgaattaacgtacttttgctcgaaaatgttcatcccaaagccaagcaaatctttgaaaaagaaggctataatgtccaaacagtagcaggagctttagacgaagatgaattatgtgaagcaattaaaaatgtctcaattgtcggcattcgttccaaaactcacatcaccaaaaaagtgcttaaacatgccaataaattaattggagtgggtgccttttgtattggaacaaatcaaattgatttagaggcttgtgctgaaaaaggaattgccgttttcaatgcaccgtacagcaatacccgaagtgtggttgaattagcaattgctgagattattatgctaatgcgaaatttgcctgacaaaaccgaatctatgaaaaaaggaagttgggacaaatcggctacaaatagttttgagattcgaggtaaaaaattgggattagtcggttatggaaatatcggaacacaactttctgtcgtagccgaagcgatgggaatggaaatttatttctatgatttggtcgataaattggcaattggaaacgctaaaaaatgtgatactttagaggaattattgaatctttcggatattgtttctttgcacgtcgatggtcgtcccgaaaacaaaaatttcattggggaaaaagaattttctcagatgaaagatggcgtaactttcttgaatttggcacgcggttttgtcgttgaaattcctgccttggttcaagcattgcaaagcggaaaagtacggggggctggtgtggatgttttccctcaagaacccaaaaacaatcaagaggaatttgtgtcggaattgcgaataatgaataatgttatcttgactcctcacattggcggaagcacccaagaagctcaggaaaatattggtagtttcgtaccgaacaaaatgattgaatatgttaatacaggtaatacgtttggtagtgtaaatttgcctcagattcagttgccaaagctcgaaaatgcccaccgcctgatgcacattcacgaaaataaatcgggaattatttcgcaaatgaatcagattttggcgcaacatgatgctaatattacagggcaatatctcaagacaacggaaaaaattggctatgtcatcacagatgtaaacaaggaatattccaaagaagttgtgaaagccctcaaaaatatcgaaggaacaattcgtttccgagtgctttattaattgatttgttttttaaccaaacctataaggttttcaaaaaccttataggtttttattttgtgatttttttcgtattttgctacaaatcaaacttttaaagaagatggaaaagactcaggaaatcgaagaattattacaagaaagtaaaaaaaactgtcatgatttagagaatatactctacagtagcaaaaaggaagatgaaattaactggggagcatttgagaaaaaatttagtattacagtaaaaattatagaccaaattttagtaaaatcaaaagtgatagaagatatcaatacagaaagtgagatgccaatttggcataatttaggttacaggtatagtactctgatattcaatcatataaaaaaacatcaagataagaaaaaaaatagtttgtttttaaaacttgaccgcagggcttatagctttgattttttatcatacctaaattcccttgcccaaccttccacaggaaaaaatattaatgattttaatagaatagattttgaatctttaatcttagaaagactgtctgatactatatattttttagataaatatatacatttaacaaaacaacctaataacaaagactttaaaaataaaactctaaaatatgctctaaaatatatgttaattcttgattttcaatgtattcaatacatcgaagaacaacttcctgtaaatgcacaatttattgtttttgcaggtgaaaatggagacggaaaaacgtccattttacaggctttgagtttaggtttttataattcaaatgacttaccagaaagtgaaataggtcgaaaagatactgtcattcacgtccaatataaatccaaagacacctcattccataatgaaatatataacaatccctactggacaaatttatatgctttacagcaacatattgccgaattaaagccttttgcggcgtatggtgcatctcgtttgaaggttttggaaaaagccaaaccacaaaatccactcttaaatctgaatacggata
